United States Patent Application Publication US 2011/0183924 A1 - sequence listing, part 63

SEQ ID NO: 214753 - DNA, 327 bp, Homo sapiens
tcaagatccacagcttgaaaaaactggactagactgtgcttgagtgcagagaccatgacatattcatctttctgttactaagtgctagagcaggtgctcagtagatatttgaataaattggtaattgagaagaggagtaagaagtgaaatcagagttgtaaaaggaatagatgtttttgacaatgaagttcttggatataataaaggcagtcgaggtaaagcactgtggtacttatggttggtatgaaatttgtttgtttgcaggaaatagaaaccagtgttagctgaagcaaagaagaatatattaaaaggattcagggtatctca

SEQ ID NO: 214754 - DNA, 288 bp, Homo sapiens
ggctggctggtacttctcaagcaagcgggatctactatgtcaagttttctactgtagctgcttgatgtaacctttatgatgtggtcaagtgacacagaaaccaggaatcacttcctactcatcagagttacttattgtccaagcccacatggagtgatgttgcctgttttaaactgggatgtggtcctccttgatgccggtggtgggcaggaacatccgtaactggcacttacacagtaagcctggcttcctttcttcactgtgtgttgctcacctctatccccaagc

SEQ ID NO: 214755 - DNA, 470 bp, Homo sapiens
ggttaaaatttgtatttgcaaatcctttgacccaccagcaatcacattacaaaaagaaaaaagaaggccgggcatggttgctcacacctgtaatcccagcacttgggaggctgagacagatgggtggatcacctggggtcaggagttcgataccagcctggccaacatggtgaaaccccatctctactaaaaatacaaaaattagctgggtatggtggcaggcatctgtaatcccacctacttgggaggctgaggcaggagaatcacttaaacctgggggcggaggttgcagtgagctgagatcgtgccaccgtacttcagcctggggtgacagagtgagactatctcagaaaaaaaaaatacatttttaaaaaagaaaaaggcagccctatttcatatgtaattgaaaacaatgtcaaggtctgttaatagcataagatggtattctatgaactggaagagaggaggga

SEQ ID NO: 214756 - DNA, 357 bp, Homo sapiens
tctcccttcccctccttctttctgtctctctctcactttctttctcttcaggtcatcactcaccctggtggaacccaaaatgtcacatggtgagacactgaagcctcctgccaatagtcacatgagtgagtctggaagtgaatctttcagcaccatcagatgactgtatcactggcttacagttttactgcaacctcatgagaaaccagagcccaaaccacacagctaagcagctcctgaattcctgactctcagaaattgctattttatcctgctaagttttggagaaattggttatacaacattggataacagacatggctaaagaaagaataagctggaagatagagctaagta

SEQ ID NO: 214757 - DNA, 82 bp, Homo sapiens
tgggtctgtgcacatagccctgtggcaatactgtaaaagtccattgtcctcctatgtaaaggcaaactgttcctggctctct

SEQ ID NO: 214758 - DNA, 435 bp, Homo sapiens
ttttgtctgttcctgaccccagagagggtcagctgcctgaaggcaagtgccttctttcactttatatgctgcagagccctagcccagagccacgaggaccagagatatgtgagcagcaggggctggatctcactgaatgcccgtggcttctgctggcaattggactcctcccgtgtcaagctagagacacagaatcaagacctcagggccctgtgcctcgcagcccctgtggccaggacattgagaagtgagggacttgctggcttgtccactctcggccttcctgactccccctgaaccgaagtagccccaactctgcaggcctctggcatcactcacacccaccacctaccgagacctaaaatcagcatctgccaagttcaacccagccctgcacgggaagctgcaatggaccaggcgagtttgacataggca

SEQ ID NO: 214759 - DNA, 430 bp, Homo sapiens
agggcacgggatcaggttgtcgtacacaaagcgggttcctgatagaaaactagctccaagagggggggtttttaggggccacatcacactgggccttgccgaccatggtaggaagttggagggtgttaaggtagaggtaacatgagcttatttataattttttaagatgagccacctcacccagccagaaactagtcttatggttaagtaaagttacttagatttttcttgttctgtttttttttttaatttagtgctttaaaattatttgataaaatacagaattcagtgggaaggacatattaaaaagatattgtataatcttttgacagtattggcaaagagtgaatgattctttttttaaacatttcattaagctgatagataataacagacaaaaataaaatgtttgttgtgaatttctggagtt

SEQ ID NO: 214760 - DNA, 435 bp, Homo sapiens
ttaggatcactactgcatttctacatgcaaataatgcaagttaattgaaccttaataatctgagcctgcttgccattttgaaataacagtgcctatgcaaagactgagaggggagctcactataagcaccatccatactttggatattggggaccccttgtggacaattcagacagagcgagggctctctgagattgcctgtcaaaagcaagtaaccaaaattcacacatgaaaaactgaatggaaagccacacagatgtggcactcacgtcgttcaggaaaagcagtttctctgctgttgtcatgtgagacaatcaaattagtctataagtttaatacaatcctaataaaatcttaatagggttttaaaattggaattggagaattctgattctcttttggaagagaaatgttcaataacagccaaaaaaaaaa

SEQ ID NO: 214761 - DNA, 724 bp, Homo sapiens
agcgttttggggctagaagttgcggactagtagctgaggcggcacgggagtgtaggcgcgcggggtcgttgccgggggcacagagtgagaacaagcaagggagccctgctgaattgcagcttaggaagccctgaatcctggagatatgttcctgacccttccttcttgaagggacagctgtgtaaccattcaaccatctggccatcagtttccacatctgtgaaatcaacttctgcctcatggagccgtgagttcccaagtgaaggcagtgaggggctgtggtgtgatccaggaggctgagaattatgcagtgggtgctgtcaccttgaagacatcagcgtgatcaggcagatcatcatggtactgcatttcctggacacgatcttaattttcttaatacctccaccgacatttcaaatagcgtctctaatgccccagagacttttatgcccctaaggtagttttctttcttttgtgaagcagaagaagggaaattgttaaagggaatattttaactaaatttatttccataaaactatctttgtctttatatctcatggaaagtgttaggtagcctcaggattatatctccgttggaaaactgtagatgtaaaccttcttgctatctacatacttacatatttttctgttgttatttacttatgaatagcattttgattatagcagaaataaaatacattaaatgactaagctcagaaataag

SEQ ID NO: 214762 - DNA, 503 bp, Homo sapiens
cactgtcattcacacccatccgtattgttcgtatcgacacttgcttgatgtggacaaagtaaaaccacttacacagcacctcctaaaagagtaagtttccagttttcccagaaaaatctagaacttgggataagggctgaggagacttctcccattaggaacaggattctaaccgtctccttctcccctctcacttcgccagaaagcctctacttgcaccagttttatataatgggccttgacattagatttttgttggatggaaagggttttttcaggcaccatcctgaagagcgaaagctgcttttcatcgtgtcttgtgcacagcaggcgctaaggaagtggctgatgcctttaacttttgctggagtcgtggggttttgttctagtgatgttaggtagcttatgccactaattaaaggagattttttttcttctctcagtcacatagtgtaatttacctatagagtcttgacaagtcttggaagcagatttctgtttaa

SEQ ID NO: 214763 - DNA, 585 bp, Homo sapiens
  misc_feature (93)..(94): n is a, c, g, or t
ggaacagctatataggaaaagctattaccacgaactcgcgtattagcaggaaccagagtatgacccgggaacacgctttgatcatgaaacgtnntttaactagagacggggtttaaccgtgtaagccaggatgttcttgatctgaccttgcgatccacttgcctcggcctcccaaagtgctgggatcacaggcatgagccaccgtgcccggcccattatttgtttctaatactgaaaatttttaattgaaatataaaggcttttctttcttctctcaaactcctggtctgaagcaatactcccgcctcagcctcccaaaatgctgggattacagaggtgagccatggtgcccagccccatttctctctttcttgtactaaattattttctttggacaagttgttaagaaattcattttcaagtctgcagctttctgtttacatcagtgcttactgttattcaaaaaacatataccaggtaaagctcaatattttccattatttggcaaataagttggttcttaaaaacaaaataattataaagagtgccactaatcctcctgctgctgtcattaccactactaac

SEQ ID NO: 214764 - DNA, 518 bp, Homo sapiens
aagggagccagcgtaaagtgagcatccattactgtatgtctgtaagggcctaagtgcttagagatgttccaaagccacagaaaatgacatgagatcaagtgttgtttactccaaaaaaaaaaaaaaagaagaaagaaaaaatttaaaaaagcttaacaataagcgattaatctatgttaacttctatctaaaaaaagaaaaaagacactgttttcaaggtgggctatcaattacatgttacttgaaaatatttcctaaacatttttgatatctttaaccccgaagaaaaatgttcataggggaatttgctacatcttttgtagtcacaataaaaaagccaatcttgtagtctgttggaattttacattggagaaagggctttatgatattctttgacaacctttaatgctagcaattggcattttactttctatacttactttgatactttgcaaaatgtaggtcatgttctgcttctttccagtaaatcccaggaaatcaataaatgatatatgttt

SEQ ID NO: 214765 - DNA, 445 bp, Homo sapiens
gagacggagtttggctcaggatggagtgcaatggcatcatcttggctctgtgcaacctccacctcccgggttcaaggcacggtggctcacagctgtaatcccagcactttcgcagtcgaaggtgggcggatcacttgaggtcaggagttcaagaccagcctggccaacacggtaaaaccctgtctctattaaaatgcaaaaatagctgggcatggtggtgggcacctgtaatcccagccacttgggaggctgaggcaggagaatcacttaaacctgggaggtggaggttgcagtgagccgagattgcgccactgcactccagcctgggcgacagagcaagactctgtctcaaaaaaaataaaataaagagtaaaaaagaaatgaaagaacatgtcctataaaggtgacagtgtttgaaattatgcatttggggccattggaatat

SEQ ID NO: 214766 - DNA, 445 bp, Homo sapiens
ggccaacatagtgaaaccccatctctactaaatatataaaaaattagccaggtatggtggtgtgcgcctgtaatcccagctacttgggaggctgaggcaggagaatcgcatgaacccgggaggcggagtttgctatgagctgagattgcactccagcgcgggtgacagtgtgagactctgtctcaaaaaaaaaaaaaaaaaaaaaagctccctggtcatgttgctctagaagttgtaagcacattagcttgaagctagaagccactttaagatccttttattgctgcctgtgttcctctatagacgttttagctcaacttctacacatggtcttagcttttttgtattacagaacctagtacctaatttgcatttttacttctttcattcttaatgaaccactgtgtgaggacatgctttcttttttatggacagttcagctagg

SEQ ID NO: 214767 - DNA, 563 bp, Homo sapiens
tgagaggctgaggtggttggatcacttgaggccaggagttcgagaccagcctggccaacatggtgaacccgtgtctctactataaatacaaagtaattatccggttgtggttgtgggcacctgttcatccagcactcacaggccccagaggcctgctgcttaaaagaggtactagttacccataggacctatagcaatggtatcagaacggtttctacctccaccactgtggtctccatccatgggagaagatcccaataaacagtaatctgggccaggcgtggtggctcacacctgtaatcccagcactttgggaggccgaggtgggcggatcacttgaggtcagtagtttgagaccagcctggccaacatggcaaaaccccgtctctactaaaaatacaaaaattagccaggcacagtggtgtgcagctgtaatcccagctacttgggaggctgaggcaggagaattgcttgaacccaggaggtggaggttgcagtgagcagagatggtgccactgcactccagcctgggtgacacagtaagactccatctcaaaaataaa

SEQ ID NO: 214768 - DNA, 195 bp, Homo sapiens
tagttgcaggaaaaacccaggtccaaatgacacccacagttgaccacagttttacctaattaagtaaaaaactttttttaaaaaaataatttattttgttatcctgttaccagtactttcaaatacttaagaaaaaaatcaatattaaagtatcagttttgcaatccagaggatatttgtactttttcaaaaaaa

SEQ ID NO: 214769 - DNA, 426 bp, Homo sapiens
gcgtggtcgcggccgaggtacagtgacaccatctcggctcattgcaaactccacttcctgggttcaagcaattcttctgcctcagcctcctgagtagctcggactacaggcacacactaccgtgcctgactaattatttaaaatttgtttgtggtctcactgtgttgcccaagctggtctcaaactcctagccttaagcaatcctcctgcctcagcctcccaaatctctgggattactaacatgggccacagtgtctagcttctttcttctttcttttactttttttctctttattttcttccttcctccctccctccctcctttctctctctttctttctttttttcttcctttcctttcctttcctctcctttcctttgctttcctttctcttcctttcctttcttttttgtattttgggtctt

SEQ ID NO: 214770 - DNA, 824 bp, Homo sapiens
gttttcatttttatttatcttaaaattcaaagaaagaaagaaatataagaataatgaatgcataataacacatcaagcctgggttatattcatctttagaccaatgcagttgtaaaacaaaatgctaatttttttatggagaaagggtttctgaagacaaaaatgtctagggcccctaagtcataacacagcccagaccaggaggcaggacaagtagaggcatggccctgggtgtcacgttgagcacttggggcaggtgcacaaagaggtttggtaagtaccaaggatctgggctcctgaatgctgggctggcctcccattccccaaacccttctcctcccccagtgctgaagagcttccctggataaaggagagaggcctagagcccccacagagcagacaacctctgcacagggtctttggcatcctagaaggccctggttcctcaccctctggcttttccactcaccaatcccaccaggaaatgaggttaaccttgaggggggctgagacagatgcctccaaagaagccagtcctgaccccatgcaagctgctcacccccaccatagggacagtccttcccccacgaaacctgctcatccccaccgtaagggacagtcctgaccccacacaagctgcctatccccaccataagggaccatacggcacttcatcttcttagctaatggcaaataacagcatcttagagatcacctacaaaaccccctcatttcacagatggggaaactgaggtcccatggggaaaggaactcagtcaagaggaggcgtctctgcatttctagaagaccctctcctttcatat

SEQ ID NO: 214771 - DNA, 386 bp, Homo sapiens
tctatttaaatattttccaaattttcttggttatttttgaacatttttatattaacccagtgttgataattcaaggagctgtggtatgacgctgctgtcttcttgtttcttcttgctctcattcatggtgccttatctccctatgtggttttgtgagatttgaccatgtgcaactccattatttgaggttctttgactctggaaattctctgcagcctaaggtgaagctcagatcgtccaggagaaccacaccaaccacagactgaggtctttttaccactaacataatttgaagcctagctctaaaactgtctgaagagtggcttctacttaagaattctcgaggaattttcttcttctacacagcacgaaagtcaaggcaggca

SEQ ID NO: 214772 - DNA, 509 bp, Homo sapiens
tttcattaagaaaattattaatgatggtggtataacagtaattgattgcagagcaccacaggataacgcgatgccgaaaacccatgtttcatgaacatctgaggctttttctggttacgttctattaatattttgaggagtgagcaatttattattcctttcctaggaatctatgattgtaaaaatggctgctttttaaaaaccacagttttgattcaaattgtcatttctaaggggttcttaaggtcaagacaagtgaccccactagtgactgtgttatttaaaatagagctgtctgttgcaaattgcagaatggcagcaacttctgcaaatagtgagccttgtgtcatttccatttcttactatgcatttactgtttttactgttatgttagtgatttattgatgttatttcaatctgagtctgggtgtactgaatagtttattgtctttagttattactactatatgctatatgatgtgaaaaatacatttgtttttatatcagca

SEQ ID NO: 214773 - DNA, 615 bp, Homo sapiens
atttctccatgaaaggttctctactattccaagccatctctctatgtggtagctcattaaccacaagtcatttgtttccttctgttagatatttgtaaatatcttttgtgtcaactcatcaagggacagggtccatgtttcagacttcttttttttttttttttttgagacaaggtatcactccattgcccaggatggagcacagtggcacgaccacagcttactgcagcctcgacctcctgggcttaaggtatcctctcagctcagcctcccatgtagctaagactgcaggcatgcaccagcaacccggataatttttggtattttttgtagagatggggtttcaccatgttgcccaggttggtctcaaactcctgagctcaagcaatctgcctaccttggcctcccaaagttctgggattgcaggtgtgaaccaccacacctggtctagacttctttatatcacttcataagtttcaataaacatttaattaattatttatctaattatagtttacaacagagagatcctagaaaatctagatgaacaagagtaacaatgagctaaatgctcctctattcctagtaacagaatcattatctcaccaaacctca

SEQ ID NO: 214774 - DNA, 168 bp, Homo sapiens
ttcagaattagttgccgaggtgggtgcaaagaaagcctattaatatgtgtagactgcccattcccagaataaaccacatttcctcaatatattactttcatggcattttacaatattttcaagtttagttggacataattccagagatatgacaagtcaataggtgga

SEQ ID NO: 214775 - DNA, 383 bp, Homo sapiens
cacacactcattttccaatctatcattttgtctaagttcctacttgtctttaaatactcagcttaatacatcatcttctctgtgaagcctattctgttaatcttccaactctaaactagatatccctcctctatgctcttagaggtccctttcaagtatttatcataaagcttatcacttgcctaatgaattactatgtgagtcctcagaattctgagaatggctgctcatctgtacagtggctaataatatctacactgaaggactattataaggataaatacatgaagtgcctagcacttaaaaaagttccagtaaatgatggctatactatattattagcatttttctcaaaagtaagcaccctaatattcactttacta

SEQ ID NO: 214776 - DNA, 486 bp, Homo sapiens
cggcatggggggagacctggggatcccaaacaaaggcagagcctgggaagcacccactcgacctacctcccattatctggacccaggtttctacaaaacatgagagctctctgcaaagaagaaaagaaaaatggacggaactcgaacttaaatccaaccttgtggttacaattacggaggcccacccaggccagcactgtgcgggccccttcaggcttctctcaggctctcccgagacacaccggcaggctgcagtgctaccactgtggtaaaggacaaggaaactgaggctctgtgggattccgggacttgcccaaggtcacaccatccttgaggggtcgagccaggactggaacctcagtccggccactacaacttcataaataccatcgccctgagatgctgaaatcccaggggccccccaccctcagaccaggtgccggtattgtcagcatcgagaaaacaaagtgccagtgaattatcaac

SEQ ID NO: 214777 - DNA, 460 bp, Homo sapiens
ttgttataatcaatcagtgaacctacactgacatactgttatcacctggtgtccatagtttacattagggttcactccgggtgttatacattttatgggttttgacaaatacgtcatgacacgtatccatcattatagtatcatgcagattagtttcatcaccgtaagagtcctctgtactttgtctgttcatccctcccccacttactcctggcaaccactgctctttttactgccttcataattttgctttttccagaatgtcatatagttggaaccatatagtatgtagcccctatgcatgactttttaatatatgcatttattgtttgtaatatactaggtcactgagttatacagatcttgcaaatattgacactttttattatactatataatatccagtcatgcagcctctcaaaaaactccactgtatacatgtggtcttagtagtattatg

SEQ ID NO: 214778 - DNA, 285 bp, Homo sapiens
caaaagctcccatcagcagatcctgataattatttcttttgcagagattaagaattcagtgtccagcagatcagcagccgaaaaggaagatataaagcgtgtcaaaagcctggtggttcaacacaatgaacatgaagaccagcacagcctagatttgggtatgaaataatgcttttacctatactcgtaggggcatcccagatccaggtttagagtggacaagaagcaagtaaattttaacataaaatattccttcctggtaaccttatctatttcctgaaacgc

SEQ ID NO: 214779 - DNA, 519 bp, Homo sapiens
cggctcagtctgagggacagagaggagtggttttgttttgatcactttcatttgtggcagtctatgcctgcctcttgctctttcaacaaatccatgagattcctcattctcctctttcctcttttttaaaatcttaatttcctagtcatttcaaatttgctgtttttcgattttctcctccacctgtccttcaccttaatcctctaatcccattcgagcaaagtagtaagttcttttctttgttttctccccgtagttttctattttttatttatttctttttatatcttgggaagtttaccctttttgccaaatgtgaattatgctcatttggacatttaagaattcattttctagttttgatgaggctaaaatactacggttttttcacttttttttttttttttctaaatcactaaacttcttgaaagaggtctacacttgctctatacttagtgtctttacatttcattaattcctcaacccaatactgtctggcttccaccaacaccactcaat

SEQ ID NO: 214780 - DNA, 375 bp, Homo sapiens
ctcctgcgctgagaggctgcagtgcacagcacatacctatgttctatatatgttagatttatacctaagtgtttcattttttgagggattttaaatggtattgtatttttaatgtcagtgcccatgtgtttgttgctagcatgtagaaatagaattgacttttgatcgtttatcttatgtcttgcgaccttgttaaactcacttattagttctaggagggcttttttgagggtagattccttggaattttctatgcagagacaatcatgttatctgtaaatgagggcagttttgtttcttcctttcctgtctgtgtgccttttatttccttttcttgcctattgcactgcagccttaacggtagggctcgatctt

SEQ ID NO: 214781 - DNA, 557 bp, Homo sapiens
caggaagaagactgccatctgcaaatcaggaagacaatcatcatcaagaacttaccatgctggcaccccgaacttgggcttctgttgtttaagccacccagtctgatattttcttatagcagcccaagctgactaagacaggcagtcaagaattaaaatctgcttggaggagcaccaacatacccattttaaaaaccttattatgtgaaatggctacagttatttaaactcaagaagaacatggaacaagaaagagaaataaagtcagtgagatgaatggactaaaataacctagcagttaatggaataaataggaatgaagccccttttccagtgttagggtcagcctgggatttatcaaggctctaaacaaaaggaattgatcatgagaggttagcagagacatacgggaagcactgcgagagtattcagcactagttggagatttgaattctaactttaaaattctgagacttttgatctattaatttatccattttcattgttcttttgctttgactataaagaaacaaaataaggcacaatcaagtgaaatc

SEQ ID NO: 214782 - DNA, 1100 bp, Homo sapiens
actaggttctccggctccagctcctgcgccgcctgttgctcgctcctccgggcggtcgcttcccgcccggtgcccaggggtaggcggcccgagagcgcgcaggcagccagcctcccgccttcgtcccctccccgtaccgcaggagccggtccgaggggtccggagcgtccctgagagcgcggaccccggcgagcagcccagtgcacccgggactgcgcgccgagacccccggcgccgcgcggcgatgaacgcgaccttcctgaaccacagcggcttggaggaggtggacggcgtgggcggcggcgccggggccgccctgggaaaccgcacccacgggctgggcacgtggctgggctgctgtccagggggcgcaccgctggccgccagcgacggggtccccgcggggctggcgcccgacgagcgcagcctgtgggtgtcgcgggtggcgcagatcgccgtgctctgcgtgctgtcgcttaccgtggtcttcggcgtcttcttcctgggctgcaacctgctcatcaagtccgagagcatgatcaactttctggtgcaggagcgccggccctccaaggacgtgggcgcagccatcctggggctgtactgagcgccatctgggtccgccctcgccagcgctgctgcaagaaggaccccggagacccggaccctcgccccgctctctgcgctctgccgccgcctccgggcgggcagctacgtgcctggggcgcccgggcggggacgcggcgagactgtcggcgggggcgcgggaagggacttggacgcccggctctgtcctgtgtgcgctgcagcgttgcggggtgggagaatgtggggtgagggttcttaccagttttttttttgtttgtttgttttttaagacgttcggggcagggtgggagtgggtatggagatgcaatttgggactgcggtcgctcgcgtgggagttttgtgtgtacgttggtgcgggtgggttcggaacacggtgcgagtgggtgaagatgtgaagcgtcagagtcgctgagcttgttggcctgatcttgcgtttggaaagaaatcttgtaataaaactgcagccgtagggcttcaggcagcttcccacc

SEQ ID NO: 214783 - DNA, 461 bp, Homo sapiens
taaggacatgaatagacagttctcaaaagaagatatacaaatggccaacaaacgtatggaaaaatgctcaacatcgcaaaccaaaaccacaatgagataccaacttactcctgcaagaatggccataataaaaaaattaaaaaataatagatgttggtgtggacgtggtgaaaagggaacacttttacactgttggtgggagtgtaaactcgtacaaccactatggaaaaccgtggagattccttaaagaattaaaagtggatctactgtttgatccagcaatcccactactaggtatctacccagaggaaaagaagtcattatacaaaaaagatacctgcacacggatgtttatagcagcacaattcgcaattgcaaaaatgtggaaccaacccaaatgcccatcaatcaacgagtggataaagaaaatggtatatataccgtggaatataactcagccg

SEQ ID NO: 214784 - DNA, 271 bp, Homo sapiens
ccagggcgggcgggtccctgagtcagaacccgcgacccacaggcggcatcgatctgaggcattcgtttttcatttttccacctttggtttgatgtcattggaaaagaaagaaagaaaaaagcatgaaacggaaactgggtggagagaaaagattaaaatctctgctgctgccgatagctccccacagcaagatgctattgctcagggtttcagagcctagtttgtcgaaacccatccccctcgcctccgttttaagacaaaagtaaaaaat

SEQ ID NO: 214785 - DNA, 455 bp, Homo sapiens
caaggatagcaccagtcaatgaggaatccacatctatgatctaatcacctttcaccaggccccacctccaacattaggaattacattttaatatgagattggggggacaaatatccaacctatatcagatggtttataatatgcaaatcaataaatgtggtacgttaacacaatcaggtacaaaaaacatatgaccattacaatagatgcagaaatagcatttcataaattcaacatcccatcatgataaaaactttcaatcaattaggtatagcaggaatataactcaacctaataaagacatgcaaatggccagtagatatttgacaaataatgattagcatcaccaatcatcatggaaatacaaatcaagaccacagcgagatattacctcatacctgttagaatggctattatcaaaaagacaaaaaataacaaatgctggtgaggatgaa

SEQ ID NO: 214786 - DNA, 252 bp, Homo sapiens
tgaggtagatggtgctttaacaaataatctctaagaactattcaactgttagaatctacacttaggtcttcgcagttccataagcaccattttgatgtgaagaggtatttcagggaagaagtgtgtgtcttttctctctgggggcacaaagacctattgacaatatgttgtaaaatccaacttcagaggaataaaagtgtcaaactatttgtgaacaactatgtgttaaatgaattaatgatgaatcagttt

SEQ ID NO: 214787 - DNA, 361 bp, Homo sapiens
ggtaccaatttttctatgaatgtctgatagaattctgctgtgaatctatctggtcctgaatgttttttttgttggtaatttttgtattaccatttcaatcttgctgcttcttattggtctgttcaggatatctagctctccctgatttaagctaggaggcttgtatctttccatgaatttatccatctcctctaggttttctagtttatgagcataaaggtgttcatagtagccttgaatgatcttttgtatttcagtggtgtcagttgcaatatctcctgtttcatttctaattgagcttatttggattttctcttcttttcttggttaaccttgcgaatggtctatcaaatttatttac

SEQ ID NO: 214788 - DNA, 494 bp, Homo sapiens
ttcatgtagtcttcatcgcccattaacaatattggcattataagaaatgaggaaatactgaaggaaagcacaaccaatactagatattaaattagcaaattaatattaaagagaaaagtgtgtactttgaatatattataagaacaataaatttagtgactagactttttgttatgacagaaagcagaaaactaattgttccaataagacagctctaccaactctagctttttcatccctcaaactagtttaattattaaagccattattggttccagaaacttaaaacttgaccaaaggtttaataatttatttaatatattaattcaacaaatattaatatattacctgtcatttgcttaggtgataatctgctttaagaaagatatggggctgggtgcagtggcttacacctgtaatcccagcactttgggaggccgaggcgggtgaatcacctgaggtcaggagttcgagaccaacctagccaacatggt

SEQ ID NO: 214789 - DNA, 265 bp, Homo sapiens
ggttgggctttgtcctccttccactcacttttcttacctctcccctcctctttccaaggccacctgcctgtaaatgtgctccaagtgcaaacaaacttttttccactcatcctgacatccaaaagtttgtgtctgagaaagcagtgtccaccaatccacctatgtccgactcatagggctgtctgtttattgtgcagatttgtagatgccagtgagccaagatcgggccactgcactccaacctgagagaacgagactccgtctc

SEQ ID NO: 214790 - DNA, 1774 bp, Homo sapiens
cccttggaagctggaatcctgcaacaatggcccagggtgtcctctggatcctactcggattgctactgtggtcagacccagggacagcctccctgcccctgctcatggactctgtcatccaggccctggctgagctggagcagaaagtgccagctgccaagaccagacacacagcttctgcgtggctgatgtcagctccaaactctggcccccacaatcgcctctaccacttcctgctgggggcatggagcctcaatgctacagagttggatccctgcccactaagcccagagctgttaggcctgaccaaggaggtggcccgacatgacgtacgagaagggaaggaatatggggtggtgctggcacctgatggctcgaccgtggctgtggagcctctgctggcggggctggaggcagggctgcaagggcgcagggtcataaatttgcccttggacagcatggctgccccttgggagactggagatacctttccagatgttgtggccattgctccagatgtaagagccacctcctccccaggactcagggatggctctccagatgtcaccactgcagatattggagccaacactccagatgctacaaaaggctgtccagatgtccaagcttccttgccagatgccaaagccaagtccccaccgaccatggtggacagcctcctggcagtcaccctggctggaaacctgggcctgaccttcctccgaggttcccagacccagagccatccagacctgggaactgagggctgctgggaccagctctctgcccctcggacctttacgcttttggaccccaaggcatctctgttaaccatggccttcctcaatggcgccctggatggggtcatccttggagactacctgagccggactcctgagccccggccatccctcagccacttgctgagccagtactatggggctggggtggccagagacccagggttccgcagcaacttccgacggcagaacggtgctgctctgacttcagcctccatcctggcccagcaggtgtggggaacccttgtccttctacagaggctggagccagtacacctccagcttcagtgcatgagccaagaacagctggcccaggtggctgccaatgctaccaaggaattcactgaggccttcctgggatgcccggccatccacccccgctgccgctggggagcggcgccttatcggggccgcccgaagctgctgcagctgccgctgggattcttgtacgtgcatcacacctacgtgcctgcaccaccctgcacggacttcacgcgctgcgcagccaacatgcgctccatgcagcgctaccaccaggacacgcaaggctggggagacatcggctacagtttcgtggtgggctcggacggctacgtgtacgagggacgcggctggcactgggtgggcgcccacacgctcggccacaactcccggggcttcggcgtggccatagtgggcaactacaccgcggcgctgcccaccgaggccgctctgcgcacggtgcgcgacacgctcccgagttgtgcggtgcgcgccggcctcctgcggccagactacgcgctgctgggccaccgccagctggtgcgcaccgactgccccggcgacgcgctcttcgacctgctgcgcacctggccgcacttcaccgcgactgttaagccaagacctgccaggagtgtctctaagagatccaggagggagccacccccaaggaccctgccagccacagacctccaataaagacagcatggaaacaa

SEQ ID NO: 214791 - DNA, 439 bp, Homo sapiens
tttgagcaatgtttacagtatggtgcctcaaaaatctctcttgttgctttgctgattaatctgttcagtaaataatccatcatcagaaacactaaactcagttgccctttgtagtcattatgttctgagagttctcccataactcatacccaaaaagtataaaatgatactatatgtgagaagaaaaagtaaaagtagagagcattggatattttctcatttctgtaacttgatatgttaaatttgttatacttttttttttttttaaacagagcctcgctctgttgtccaggctgaagtgcagtggtgcaatctcagctcactgcaacctccggctcccaggttcaagtgattctccagcctcagctacttgggaggctgagacaggagaattgcatgcccgggaggtggaggttgcagtgagccgagattgtaccct

SEQ ID NO: 214792 - DNA, 431 bp, Homo sapiens
ggagaaaacaaagtgcaatactcttttctgctgttcacaacatcaaattggtaattataatgttggtatttgccacatgccagtaggagatcccgcaccgttgaaacataaagaggatactgtttattgctctgggaatttacagtcccgcttaggcagaaaagtaaccatgaaaagttcttttttttttttaaacatatgatattggttaaaacttggctttcttaacttccttggaatttgagtcttctttgtgggataaagggagatgacagaaataggataattggaaccttttgtagttgtgcacagaggggatttaaaaatgaaatagccagtgttgcaagacacaatgagcacaaagaggtcagttgtggaaggagtgagtgtgcaggggaagagaggctgtttaacctaattatccttatcca

SEQ ID NO: 214793 - DNA, 444 bp, Homo sapiens
ggcactgagaaggcacagcaagtaaggtgggaggaaaaccatggcaatgtggtgtcttggaaatggaataaatatctgctacaggaggaggcgatgataacggtgtcccatgctcttgttaggacacagttgaaagatctcgagattgaaaactgagcttcacagatgtcaatattaagaactgatctttggacttagcaatgcagagctcattggtatcttttatgagaaaaatttcagtggcgtggtaagaccagattctaattgaagtgtgtccaaaacaagaagggagcttaagcattaaattttattattattattattattattattattattattttggaaatagggtctcattttgtcatccaggctgaagtgcagtggtgccatcagcacggctcactgtagccttgacttcccaggttcaagagatcgtccctc

SEQ ID NO: 214794 - DNA, 510 bp, Homo sapiens
  misc_feature (444)..(444): n is a, c, g, or t
tttcttctcatacttcatgctcatttctctagaagggcttatttggtttagagtgggtctggtaacatcctctgtaaataattcagtgctttcacaggatgacttctaggttgtttgcttttatattgggtccctgagctggttattacatcacccatatgtcttagactggaggaagactggggcccagtgaaataagctctcacacaagttggaattagtgcatagcagattccatctgtttttgccactggcttccttctccctcatatcaggacaaagttcttgctaaaaagaaaaaaaaagtcaaaatatcatagtttcattcccacaggcagtttggctttggttatgtatttgactcttagacctgtaccttgtgcccagcactgaggatacaacgcagaatgggacatgccccagcctcctctcaggagccactanagatgtggagaattcttgctgaggaacaaacacatgtttttgcctgtctgtggttttcgaagttta

SEQ ID NO: 214795 - DNA, 471 bp, Homo sapiens
taaaggactttaatactttgcaaaaatctattctagtgaactacaattatcctcaacttacacataaggaaactgaaaacacaagtactgtagtcaacctaggttactcagccagccatttttaggacgaggaatataacttacatcctattccttagtagccagagttacagttaagttccatatactataagagaatatttgacttctaacatcatagcatctttatagcaatattctcactatggctgataccaacgggttgaaccaccagcttgtaaaattccccagcatgtaaaaccagttcctgccagccagcactagctgattccagccctctgctaagttaccaagccatttatacaaataaacaaataggacttgcaagataaatgttaaacccatgtaagagaacaagttatactcaggtgttcatttacataaaaatcatctacggtctaaatttaatgt

SEQ ID NO: 214796 - DNA, 544 bp, Homo sapiens
gacagaatttgaattgtgcctcaaccagttactactgtgtgactctgggctagttgtgaacctctctattcctcatttcccctcatctgtaaactgggggaaacactaataccaacattgctgggtggttgtgagcaaacaataaacaaataatagtgtaagcaaacaataaattttagcaattgtttataaggtatttctcttgtcaagtaagccaagttaatcatctaatggctcctataaaataaagcatagggccaggtgcagtggctcatgcttgtaatcccagcactttgggaggctgacgtgggcggatcacctgaggtcaggagtttgagaccagcctgaccaacatggtgaaaccccatctctactaaaaatacaaaaattagctgggtgtggtggtacgtgcctgtaatgccaactactcgggaggttgaggcaggagaatctcttgaacctgggaggtgggggttgcagtgagccaagatcacgccactgcactccagcctaggtgacagaacaagactccgtctccaaaaaa

SEQ ID NO: 214797 - DNA, 772 bp, Homo sapiens
gtactcctgtagtcccagctactcaggaggctgaagcgggagagtcacgtgaacccgggaagcagagtgagctgagcacacactactatactccaggctgggtaacaaagcgagactcccatctcccaaaaagcagttctggaatagaactcacgctagatggatagaccagtggacactttggaaccttggggctggggaggaaactgcccatccagtaaacccccaaaaagccatttgttctgcactacgtatattgcttattctttctggtcttaagtacttgcctctcaacctccctttttagtaaaagacaaggccacgtgagaggcgggactatcaacattgtgatgaatttacttgaaacccagtgcccaaaatcaatgtaggtagccaagtccaaaaacctgttctagtccaactagtgaaatcaaactgtgatacttggataagcttagaaggaaacgtgaagaatacgtagctgctttgggtttactctggttcagttgggctgttgaaatcttaacatccttgggcttatcacctactgcttgtcagccctgttccatgtccaggggatgggggtggtgacaatccagttccaagaccctcatgctctagagaggaaggtggccagccagggttgtaactacgatgaaaaagcagtgggagggtctcctatgaggcaagcctaaggacaaaaaggaaggccttgcagcctgtattctggataaggaattaaaagctcagttaattgaagcccaaaaaaagt

SEQ ID NO: 214798 - DNA, 456 bp, Homo sapiens
taatagtggctgccggcatcccgggctgcactgtgggcacagctgtggggtgttggggttggcagagagcctgggtccctggaacacgatctggccacctgtggactagagcagaggatgaggtcatcaagctgcaaatagatccgatttcccttaatcctcgaatgcctgaaaagttgtgtggagatgacatgctccccacaaattcaattccttcagaaacctgtccgggcgttgcggctcacacctgtaatcccagcacttcgggaggccgaggtgggcggatcacttgagctcaggagttcaagaccagtctgggcaacatggtgaaaatccatctctacaaaaaaccagccaggcatggtagcgcccacctgtggtcccagctattcgggaggctgaggtgggagaatcgcttaagcccaggaggcagaggttgcagtgagacatctcacc

SEQ ID NO: 214799 - DNA, 530 bp, Homo sapiens
ctgggatagattatttgcctctgtctaggactggtctaaatgctctctttgtgggtgcccgctgaattctgtcctgtgttgttttccactgtggcaacattgaatcaatcaggcagcgctgaattccaatgctaagtcccatgatcacttcactcttccttaccctatctcacagattctctctccataccacacagctgctgctggaggattgggaaggatggtataggcagctcaagactgcctttcctaccctctttggtgcctctttccttaacttgttcaaagcagatactgtgatcactcacttggtttttggttcttatgaatgtgctcttttgtgtggatagttgtttgatttggtgttcctgtagggagatgatcactggaagcttgtatttggacatcttgctccacctctgagacatacaaaagaaatttaatgaagaaaatttcttaataataaagtaaagcacaaagtagagagaacgagaggaaatgaaatgtgagtgtacaggtcatagtaaaaa

SEQ ID NO: 214800 - DNA, 432 bp, Homo sapiens
ttcattcttcaaacatttattatgttctatgccagctagtacctgaatcagtagaagctcaaatgcatagtttctgatcttgaagatctcaaggattgctctctactgtgagaaaatctaggtagcatcaccatgaaagtgattatctcaatgggaacttctatgaaaatgtatcactaatattttggatcagtagactacactcaaaactcagcaagcagatcacaataaaagttcacctaccaaacacacacaacacaccaatgaatgggtattagaactcagttactaaactgtaggaaaggttgatgcaacactttcaaaacaatgtagtgaccaataataaattaataaggctaatactcatcatgatatatctatatgaggaagaaaatgtgcttaaggttgaacgttagaatcagattatacaaa

SEQ ID NO: 214801 - DNA, 454 bp, Homo sapiens
atataaattaagcaatgaatacattggagcaaaatttagagtaccaacatcaagagatagtgtggtatttcatttcaggttatctcacttattattaattactacttaattgggagtcgtgtttcctcatcagtttttagaaaaaagtttaaaccagctgggtgcggtggctcacgcctgtaatctcagcactttgggaggccaaggccggcggatcacgaggtcgggagatcgagaccatcctggctaacacagtgaaaccccgtctctactaaaaatacaaaaagaaattagccgggtgtggtggcgggcgcctgtagtcccagctactcaggaggctgaggcaggagaatggcgtgaacccaggaggcggagcttgcagtgagccgagatggcaccactgcacttcagcctgggcgacagagcaagactccatctcaaaaaaaagaaaaag

SEQ ID NO: 214802 - DNA, 378 bp, Homo sapiens
cacagcttattatctctgggcaggagctttcccagggtcggaggggcaagggtctagttgtgagggagagaggtgaaagcaaaagggaaatgctaaatgacatggcacagcaagcaaggtctaggcagctgcgcctttgataacaagctgcttgaagagaaagaccagatcggctgagtgaaagcactgtccatcctccccaccccttccttcctgcttcctcctcttcccatctcctccagcttctccttaaagggactaccgaatgatgatttccttgccagtaggaccttgacataaaacccagcccacaacatcacagttgattttcaagggatgagcttctcagaaaccagaatttaattacttaattttgag

SEQ ID NO: 214803 - DNA, 555 bp, Homo sapiens
cgcgatgacttacgcctgtaagcctagcactttgggaggctgaggcgggcggatcacgaggtcaggagatcgagaccatcctggccaacatggtgaaaccccgtctctactaaaaaatacaaaaaaaattagccgggcgtggtggtgggcgcctgtagtcccagctactctgagcaggagaatggcgggaacccggcaggtggagcttgcagtgagccgagatcgcgccactgcactccaccctgggagacagggagagactccgtctcaaaaaaaaaaaaaaattttttttttacactatttcttctcaaaatatttttatttgtggaacaaaatgtttttaagttaaaagaaaaaggcaaaaaactagaattctttcatgaaaaactgaccctccctaaccccaaaccccagttctaagggcacagagaagaaaaagacaaaagaagctattattgtgaattgtaagggaaccagtcaggctggtttaggaaatggacttcagggatctttcaatatagttcattctagtccaccacccaggctacagggctg

SEQ ID NO: 214804 - DNA, 144 bp, Homo sapiens
aatacaaacactataggtcatccacgggggttgtggtagtttaacccttcctataaatttccttacagaaagcgtgagtggtgcctgatgtatattgtgtgattgttgtcgattgctatagtacacgtcccttcatagtttata

SEQ ID NO: 214805 - DNA, 141 bp, Homo sapiens
tgtgtgcatgtgtgtgagggtgtgtgcatatgtgatggtgtgtgcacatatgtgagggtgtgtgtgcatgtgtgtgagggtgtgtgcatatgtgtgacggtgtgtgtgcacgtatgtgggggtgattgtgcatgtatgtga

SEQ ID NO: 214806 - DNA, 428 bp, Homo sapiens
ccacagtaatgttcattaatacctcgtgtgagacactgttttccttgtgtagttcagaatgctactttacttcctgacccctggaaaccaggaaatgattttattagcaggcaagagaacacacacacacacacacacacacacacacacacacacacacacacactgtcactctctctctccctttctctcttagcttttgtcccccaaagttgaataacataatttttgggaagaggaagaatccttggcactgaattgtagacccatatggttcttggagatatggtctaaaaatgtaattgtttgaaaactttagtgaaaacaaagtttgtgatactatagatttatagagcatagagaaatagaaattttccacatatttgctatgtctcccacttctgcataatgaggttgaaaaaagttac

SEQ ID NO: 214807 - DNA, 324 bp, Homo sapiens
cgaacttatagacagttttattctttatgcactgtctatacctgctttcatgctacaatggcagagttgtgtagttgccacagagactgacagaaaaagttggtcaaattctgccgtactgtgctggtgatgagagcaaacattcttgccttgtttgtgatcttaagtggaaagcattcagtcttgcatgattaagtaatgacgttagctgtatatcataaatgcactgaggaagttttttttctgttcctagtttactgagacttagtggggggttgctttgtattttgttttaatcaagaatggattttggattttgtcaaa

SEQ ID NO: 214808 - DNA, 630 bp, Homo sapiens
ttaaatattttgaatagccctgctaagcagtaatgaatataagaggtctagcctcgtgcctggctcatagaaagcactcaggaaaaggtagctgttattatcattgataatataaaaagattacaatacttagtcattatcaacgagatccctcaactgttctgcatttgatatgatttcccactgacctgtgtcttgaattcctccatgtgggtttaacaatgactttcaaagtacagtgatcaggctgtgctacatacttcaaagtgttctggtaccagctctaaaggagcaggtgctaccttcagtctccttagactgaattagaaataataataaatgatacattatccaggtacagtggctcatgcctgtaatccccacactttggaaggctgaggcaggcaaattgcttgagcccaggaatttgagaccagtctgggcaacatggcaaaaccccgtctctacaaaaaatacaaacgttggtgggcgtgatagcatccacctgtagtcccagctactcaggaggctgaggtgggaggatcttgatcctgggaggttgaggctgcagtgagccatgatcatgccactgcactctagcctgggcaacagagcaagaccctgtctcag

SEQ ID NO: 214809 - DNA, 377 bp, Homo sapiens
tttttaataagtaggagtacacacggcccaggccaggtacagtggctcacctggctcactcttgtaatcccagcacgttgagagggtgaggcgggcggattgcttgagcccaggagtttgagaccagcctgggaaacatggtgaaaccccttctctacaaaaaaatacaaaaattatccaggcgtggttgtgcatacctgtagcccctgctactcaggaggctgaggtgggaggatggcttgagccggggaggtcaaggctgtccaatatcaaggattcctgatatttgcaagtgagcccaaaggtgtttaacccatgagtgagccatgatcgtgttactgtactccagcctgggcaacagagtaagaccctgtctc

SEQ ID NO: 214810 - DNA, 344 bp, Homo sapiens
tgccttgcatccagcccttcccggggagtgtgatgtgaactgccatccaaggtggctgtggtacaggggcagggtctgggggctgcttctgcagcttcagcgcagaaaacccagagctcagtcccagcaaaagcctaaaggagaaggaaacagaggccctaacacaacagaaaatgatgcaccccactttcctgtggttcatcagttcacatacttcccaggagaagtcaaatcacgccccagaataggatacctacttaggacttagtgatgttttatagtcatgtcgaagaaccttcacatccatggcctcatttgatctcacagcaagatgggcatgatta

SEQ ID NO: 214811 - DNA, 463 bp, Homo sapiens
taccagctaaatcctacctattacaagaaatgatactaagactatccatcaaatagtaagaaacttccatctaacagcttaaagttgtaatcatttaaaggaaaatttagaaagccatgtcatccgtatatgtatgtattcatttttttttgagacagggtctctgtcacccaggctggagtgcagtggcacaatctcagcccactgcagactcgacctcccagactcaggtcggtccctagtagctgggaccacgtgtgcatgccaccatgcccagctaattttttgtatttttggtagagagggggtttcgccatgttgcccaggctcatgtatttgttttagaacaaacacacacacacacaatgtgactggcctctgaaacagagcctccagtccctttgcagtcgagccaagtcagacatctgagagcgttctccatgtagggatgtaatgagaaccc

SEQ ID NO: 214812 - DNA, 930 bp, Homo sapiens
aatttcctcaaacaatgctttgctcctctgtgtttgccaaaagaatgcttcagtttagaaatttggtctgtgatctgtcagatgaggatacaaaaagtttaacttaaacacaaacactaggtcacacagggacaggatccagatggttttgtatttgattacaccaccctccatctccctggcatctatatcctttcttctattttccgccatctgtcaataaacctgaacaaagaacttaatcacatatgctatcaacaggtcagtttgattttttttctaccttctctgtcactgggtggttaaaaaagagtatattataaagcagtatctagttttacatcataatttatgtttttcccaaagctaagtaagccttaagattaaggctgggccatttgctcatgtaactccagtatttgagacaaatcaaatgttatatttgatctaatttaatgagttagaataaagtatgtttttcttccattatttgctgttaatatgaattatagattttgttatttattagtaataaaattgtagattttattattacttgattaacattggaaatttagaatcaaccataacaagaaattaacaatagtatttaaagtggtttcaatgatataccttgaagtcagaatcacctgatttactcctggctcagttatgtactagtcatgttgcctcaggcatgttacttagcctcatctataaaggaggtaaaggactatgtaacttgcaggattattgtaggattaatgagataattttgtacagcatttagcccagtgccaaatgaagccctgtgtcaacaaatagtgatcattttcattattaatatttgtgctactattaaaatatctttgaatactatttagatatttaacacaccgatgaataaagtagagtgaaaatggagttaat

SEQ ID NO: 214813 - DNA, 913 bp, Homo sapiens
aatttcctcaaacaatgctttgctcctctgtgtttgccaaaagaatgcttcagtttagaaatttggtctgtgatctgtcagatgaggatacaaaaagtttaacttaaacacaaacactaggtcacacagggacaggatccagatggttttgtatttgattacaccaccctccatctccctggcatctatatcctttcttctattttccgccatctgtcaataaacctgaacaaagaacttaatcacatatgctatcaacaggtcagtttgattttttttctaccttctctgtcactgggtggttaaaaaagagtatattataaagcagtatctagttttacatcataatttatgtttttcccaaagctaagtaagccttaagattaaggctgggccatttgctcatgtaactccagtatttgagacaaatcaaatgttatatttgatctaatttaatgagttagaataaagtatgtttttcttccattatttgctgttaatatgaattatagattttgttatttattagtaataaaattgtagattttattattacttgattaacattggaaatttagaatcaaccataacaagaaattaacaatagtatttaaagtggtttcaatgatataccttgaagtcagaatcacctgatttactcctggctcagttatgtactagtcatgttgcctcaggcatgttacttagcctcatctataaaggaggtaaaggactatgtaacttgcaggattattgtaggattaatgagataattttgtacagcatttagcccagtgccaaatgaagccctgtgtcaacaaatagtgatcattttcattattaatatttgtgctactattaaaatatctttgaatactaaagaaaagagataaagtaataaaatggagtttta

SEQ ID NO: 214814 - DNA, 590 bp, Homo sapiens
  misc_feature (557)..(557): n is a, c, g, or t
ccgttgttcaggcccttatcctgttttgtttggggttcctgtttcccttaatctatcctcatctaagctgttgccaaagtgatatttttactaagccccctggatcctatccctttccagttaaaactgtcagtggtccgcccctgccttcaggatgaaagtcaagctccttttcacagctttttttttttttttttggcatttaacaatcagatcccaaaatgtctttcctgactggctcccaccgcttctctggactgttccaggaccctgactagtgcatgcactctgtaaggtgcttgtgctggtccctcctcctgatagcccttctgcctctgttccaccagattcactcctgatccctcatctccctcctcaaaaagaagtctccctcaattatcaactctctgatggattttccctggtaggtaatcagttctgttcctgtaaccctctagtagcaactatatacaagattgtgatttctattattattttcccctaaatcaggaattatcttccttttgtatattcatatttgtggatcacgaggtcangacgtcaagaccagcctggccagaatgtgaaat

SEQ ID NO: 214815 - DNA, 449 bp, Homo sapiens
gattttccctggtaggtaatcagttctgttcctgtaaccctctagtagcaactatatacaagattgtgatttctattattattttcccctaaatcaggaattatcttccttttgtatattcatatttgtggatccccagcccttagtacaatatttgacacataataaatgctccagaatatctttttcttccttcctgccaggttgtttgtaagttcttttaccttcaatgtgttcttagttttagagttaaaaggaaatgtaatgtagtttaatcttcttcttctttttcttgttttttaatggttgacaaaaccaaagcccagaaaagaaaagaattcaccctgggatgatcagccagatataatggcagggctgtttagggctgatctccttaggtgacttaaaaagaaccttgaacaacagatgcatcagagagagctgcaggt

SEQ ID NO: 214816 - DNA, 412 bp, Homo sapiens
tttttttttaattgagacagagtctcactcgttcacccaggctggagtgcagtggcataatcttggctcactgcaacctccgcctcctgggttcaagtgatcctcccacctcagcctcccaagtagctgggactacaggtgcgcatcaccacgccccgctaatttttgtttgtttttttttttttggtagagacggggtttcaccacattagccaggctggtctcgaattcctgacctgaagttatccacttgccccagcctcccaaagtgctgggattatagtgagccactgcacctgaccaggattttattttgtaagttaacaaattcagtgtaccttagggatagtttttaatgatttacattagaacaatgactctaattcttttagtacccttctgtcgtcttctc

SEQ ID NO: 214817 - DNA, 285 bp, Homo sapiens
ttcggcctgcagactttgtgtttgcgactcttgtatttcagtgttaacagctgccttttttgtacttcctctttcccagatagagacagacacttgattattttcttggttatcacagatgagtggttctcagctttgctgccacctcaccccccagacatttgccaatgtctggaaacaatttgggttgtcacaactggagcagaggtgctactggcttctagagggtagaagccagggttgctgctcagaatcctgcaatgcgtgggacagcccctctccaca

SEQ ID NO: 214818 - DNA, 413 bp, Homo sapiens
agagctaagaacgtatgcaactatattatttaggacatggataaaactgctgtaatagagctcccaaaataaaagtgctctaaaaattactgataaagccgaacgtggtggctcatatctgtaatcccagcattttggaaggctgaggtgggtggatcacttgaggccaggagttcaagaccagcctgggcaacatggtgaaaccctgtctctactaaaaaatacaaaaatttgtcggaagtagtggctcatgcctgtaatccagcactttgggaggccgaggcaggtggatcctgaggtcaagagatcaagaccaccctggccaacacggtgaaaccccgtctctactaaaaatgcaaaaattagctgggtgtggtggtgcgcacctgtagtcccagctattcaggaggctg

SEQ ID NO: 214819 - DNA, 514 bp, Homo sapiens
tctcggaacctattccttccaccataatgtgagaaggcaggattcagctgttctgacgtctctgatgtttgaagaatccacacagtccttcaattaaacctctcctgaggcacttaaaatctccctcttctcgtgacttaggactttgtccttccaggtccctgatggcacagtgaactccatgaggccagggatcatggatttctcaccctgtgtaccttcaagcatcctgcctggtgccctgcacatactggcactcagagaactagatgaaatggaacttatttttacaggtggctatcaaatcccgggcaccctggctttcccgctgacatgatgacacctactggtcttagcaaaaacagcaacttcttgattccactacctaagagctagatggggattgaggagctgataaaaacagcatgtggtcttgtggtatatttaattaagggagtgtgtgcatgttggacacataatagattctcaataaatattttttgaatcagcaaaa

SEQ ID NO: 214820 - DNA, 350 bp, Homo sapiens
ccttgctatcaaggagatgataactccatacatgttactgcccctgcacaccttccagtgggacaagatgtggcggtagaagacagtgatattgatgatccttattgtgtgtaggtctaagctaatgtgtgtgtttctgtcttagttatcaacaaaacgtactaaaaagttataattactacaaatagaaaaaagcctatataaataaattaaatatttttggagagctgtacaatgtgcttgtgttttaagctgacattacaaaagagtccaaaaattgtaaaacatatataaaagtttataaagtaaaaatgttgctgttagctaagatgaatttattatagaagaaa

SEQ ID NO: 214821 - DNA, 446 bp, Homo sapiens
ctagaaacaatatttaaattcattcccctatgtcactagtaaaataccatgacaataaatcattttacatgttttaactatattcaaaaaatgggaaaatacatccctagttcactatcctacgcccagtcaaggacagataactcacatttagactataaagttagttttctcctttagtctcagtattatgatgggattctgttttgttttgttttgttgtattgttctttttgagacgctcactgtgttgcccaggctgcagtgcaatggtgtgaccacaactcactgggaccacaggtgcatgccatgtaaagatggggtctcaccacattgccagggctgatttcaaactcctggactcaagcaatcctcccaccttggcctctgaaaatgctgggtttatcaatatcagccacagtgtccagccacagattctgctttat

SEQ ID NO: 214822 - DNA, 435 bp, Homo sapiens
attgtagaaagccagaaggagaagaaattggtctatgtggtaatcaggaaaggctttaaggaagaattagggcagctggtatgttggttaattgcaggggatggcaagctagggcctacagtcacactaccttgttttataaataaagttttattgtaacacaaccatgcccattcatttacatcttattaaggctgccttctcggtacaacagcagagttgagtcattgcaatgaagacgtgaaccacaagactaaagtatttcctatctggcccttttaaaaaaatttgtcaaacactggttaagaatgtcagctctacagtcagacaaaactgagttcaaatttttgttccataatcattagctatatgatattcagtatgttacttaatctctctaaactttggttttgtgatatgtaactttactcaaag

SEQ ID NO: 214823 - DNA, 356 bp, Homo sapiens
tcctcaagcacatatggagcctttagagatattaaccaccttctaaagtttcaaacgaagtctcaaatacaggcctggcacagtggctcatgcctgtcatcacagcactttgggaggccgacgctggcagatcacttgagcccaggcatttgagaccagtctgggtaacatggcaaaaccccatctctacaaaaaaaatttaaaaatcagtcaggcctggtggcacatgcctgtagttccagctgcttgggagactgaggtgggaggatcgcttgggcccaggaggttgaggctgcagtgggccatcagcatgccactgcactccagcctgggcgacagagtgagactctgtctca

SEQ ID NO: 214824 - DNA, 434 bp, Homo sapiens
agtcaagagtaaatcatctcatttactagtgagaaaatgttggagctggagtccttcagagagtcctggccaggcaagagggccatcagctctcttctgctcaacaggggctctcagcctcaggacactctcaggcctggaatgtccccaacacactcaaggagaaacatgtcctgtgcagacccacaggaggcatctttgcccggcacaaggaagagctggggtcagtgggacctgtagatgtagacacatcatatggagggtgggtaggaccaatgtggcagcttcatggaggccaagtgtggctctgcaccaggaaggggctgtgatggctggaggtgcccagcagtgcaggcggggagtgactggcagtggcgtggccaggtggaggccacctgtcaagtttgcaataaagcagtttcctgaatttggtg

SEQ ID NO: 214825 - DNA, 286 bp, Homo sapiens
gaacatctttaacagtaatattaacactgttgagtccacagcactttaatctgaagttatctttgcattcctttctattactttaataagtattactaaaagctgatttccaccctattctccatatgtctactagaatccttaataaaataagactcttggtggggcatggtggctaacgcctgtaatcccaacactttgggaggccaaggcaagaggatcacttgaggccaggagtcagagaccagccctggcaacacagtcagaccttgtctctatttcattt

SEQ ID NO: 214826 - DNA, 185 bp, Homo sapiens
aacagtcactgttcttttcatcctgtcaattagtaggccacttccaggttaggcattcagtaaatctttcagcttatatggagagacagcctccatatgtacaaaactacttgagtattgctaaggtaacattttagagccctgtctttgtaccttaatagcctacaagccccttctgaccctag

SEQ ID NO: 214827 - DNA, 297 bp, Homo sapiens
gaacaagttcaacatcatcagtaagaagaactatcaatgccataactctgatggaatgcactgggaaggattccacatcatttttgtgctgtaattgccaaaagttcgtaacttcagtccaatcatggaaatacatcagacaatcccaaatcgaggaacatttcacaaatactgatcagtactggttcaagacgtcacggttatgaaagataaggaaagattgaggaactgttattgcagtcctacaaaatggcgagagactaagaaataactaaatgcagcgtgatcctgggtgga

SEQ ID NO: 214828 - DNA, 361 bp, Homo sapiens
cccaaaatgtaactgataacgaacagcccttcagctattaaagaaattaaatctgtaaagatatgaaaaggaagcatccggctggacgcggtggctcatgcctgtaatcccagcactgtgggaggccaaggcaggtggattacctgaggttgggagttcaagaccagcctgaccaacatggagaaccccatctctactaaaaatacaaaaattagccgggcatggtggcgtatgcctgtaattccagctactcgggaggctgaggcaggagaatcacttgaacctgggaggtggaggttgtggtgagcccagatcatgccattgcactccagcctaggcaacaagagcgaaactctgtctc

SEQ ID NO: 214829 - DNA, 363 bp, Homo sapiens
tgcaagtggctttctagggttgcattgacaccgtgcgctgcagcccacccctatctcgggctccctgctgccccaagatcagcgccaagggggctgcaccatggccatgagccttttgcaggactggtgccggagcctggacgtggacgcgcacagggccctgctggtcaccggcatcccggagggcctggagcaggcagacgtcgaagccgtcctgcagccgaccctcctgcccctgggcacgttcaggttgcgacacatgaaggctttgatgaacgagaaggcccaggccgccctggtggagtttgtggaggacgtcaatcacgctgccattcccagggagatcccaggcaaggatggggt

SEQ ID NO: 214830 - DNA, 708 bp, Homo sapiens
aactcagacacagtgacagaaagtagaccagcctgttacctggggtaggggatggcagaggagcgggggatggaggggttccacaagaaaacttctggggacaggggaataagggggatgttcactatcttgaaggtgggggtggtttcacgggtatatacacaggccacaacttattaaattgtgtgttttaaatatgctcagtttaccatacgtcattatatctcaataaaactgttatttaaaacaaacaaaaagaaacactgcatcttctagacgaagcacaaggtgggggctaatcccgggctcaggggccagagggaacagtctgacccttcctccctaacatctgccggggctccggggaggtgggcaccaggctccaaagggcctgaggtttctttactcacgacactgcaggggaagtcctggcccaccgcagacaccaagaaactgaaacctaaagacattatgttgcccaaggaagttacacagcttgtaagcgatataaccagatcaaaagcaatctgtgtgatgccaaggcctttctcccattcatctaccacaagttcaaaaacgccgacctgaaataagtaggtgaagattgtgtgtatgtgtttaaaacagaccgttctctccactgaagccagacagtgagagccactctggccattccagaagcgtcaggcaccgtgggcacagcagctg

SEQ ID NO: 214831 - DNA, 376 bp, Homo sapiens
tgtattctctcctcatccttcagtccccacactgttttaaccctccaacatcttagagtcatgtgaagtgacttatcaaaaccagagactcaggcagtcacagcccttcatcattttatcttatcctatatatccaagatcatcatgtgcttttaaaactctcccttgtccacaagccaggattctccagccttttcctatgcttctcttcttctctccccgttacaacaacttgaagttcctccaaggccccattggagccccatctccttcaccaagtctttcctctttactccaactcattccagctcatcgttgcattcctatggtgtttgccactgcacctatgtactgacttgtgccattccttagtggt

SEQ ID NO: 214832 - DNA, 448 bp, Homo sapiens
ggggaaaaaccccttgaaattgcaggtggggggccttggccatccagcaaaataaaggaaaaaaaaagccaaaagtcactgtggctttctggtctcagtgccactggcaaagggagagagagtggaaaggagggaagtgggagttttagtagaagtgggtgagggagagatgtgttcagtaacctctgctcagctagaccctgcaaatggatgggatcggtagttggtgatttttttgtttgtttgtttgtttaactcagtacatgcagattttactgccaatctatgacttgatcccaacccattcccaaaataaaagaatttaagcatcctgactgcagtgccagcttctcatctgctaccctacatgtcccactgcagatgtcttttgataataaaccaggtttatgatgctgtaataaaccatggctttaaagagggcaagaga

SEQ ID NO: 214833 - DNA, 543 bp, Homo sapiens
caggtcacacagctggaaagagacagagctgatattcaaacccaagtttgtccctcaaactaacaccccacactgctttgggagtggacatagtgtcttgaggcttgcagggtatgtcacagacaccagagcagtgtctttggtgctgggaatgaaatgtttgttggcatttagtgtgtttactgggtgccagtcccctcactaagcacctgcattatgtctcccacatgggattctgcaaagtagaaattttacgtctcacaggtgaaggatcaagctcagagaggttaacttgcccacagtctcatgactacaaagtggcagagcagccaggatttgaaccctggtagcctggtgccagagcccaccctgttaaccacaagcagagaggttcttgatattctgatcccattaattatgagggagaaaatgtttctctgctgacaaattgttaaggggaaatttaccctcatttctcctgagccttaggggtgtcactcttaaaatcgcatattcaacaaacaaatgccttctaagtactga

SEQ ID NO: 214834 - DNA, 497 bp, Homo sapiens
gccagtgcatcccagctccagagcaccatctcagcccataagaaaaacatgtcatgacagtaaatcaataaccccttggagatgattcgtttctgaaatatccctgattaattatgccagtccatgcttggcaagagtactttgctccagcattaacctaatgctttttgcatgaagcaggattataacgggttctcataagtcaaatttgacattttaaatcaggctttaaaggtttgggttatagattttataatgtctccatgtcaaacataattgctcttattgctgctagtagacgtttgccaatcaatcaaaataacatttattttcatcataaacaagggtaaattaaaaccatttgaaatcattgtatttgaaaacttagtgaagaagcatctttagtaccattgaaatttgcttcctcactgtgatacatgggagcgtgatgaaattataaaagtcgatggaaatgtgttactattttcaccttgaaa

SEQ ID NO: 214835 - DNA, 243 bp, Homo sapiens
  misc_feature (94)..(94): n is a, c, g, or t
tctatctcaatagatgcggaaaaaaccttggacaagatttaacaccctttcacgataaaaaacactcaacaaattaagagtagaagaaaactancctcaacataatgtaggccatatatggaaagccacaactaacatcttaatcaatggtggaaaactgtaaggttttgctctaagatccagggacaaggcaaggcacttatattcaccatcgtattggaagtcctagccacaacaattaga

SEQ ID NO: 214836 - DNA, 488 bp, Homo sapiens
aacttgtcagcttgttggttatttttttcattgtagtcacatcagatctaccccttggttcatgtgcatgcgtgcgcacacctccacacacacacacatatgtatatttagtcctaactttccattgtccgaattccagttcacactgtgctctttattgcagagtctctttgctagttgtggctggttaagtgcttgggctcccaggagaagatgatgtcacagtccttgtttcccacctctctcctgtgacttcctttgaagttggatgacatatatcccagattatttgggacagtcccaatttaggtcttctgttccagaataatatgaatggcatcccttttcactctcaagtgtcctggtttggacaacaaattacagtcagccctctgtatccatgggttccaaatccacagattcaaccaatcttggatggaaactacttgaagaagaaaacaacaacaacaacaacaaaatacaacaac

SEQ ID NO: 214837 - DNA, 695 bp, Homo sapiens
tttttaaaatactggcttcagaacttcaatacatacactgagcttgttaagcatattaatacacaggctcacggatttcctagtgaacaataatttgtaactcttcttcctaaatgtctggcctttgctaactttattttaatgattaaatcctattttgttaaatgaatgtacctggaaaatgttccacatataattccaatttgagtcccaatctcagcatttttggttagattattggtacgaaggctttctggatactccagtgtaaggaaatgataatgcctccctctcagcatttggtattgatccttcttccctaattagaaaagaatttggcatcttagagaaattattgattcaacgtatgataccaaaagatcaagtagtaaattgggaattgcaggattattcctagaggaaaaggagtatcccattatgtttttacagaaatcaattctttactttagacatcctgaaaactaacgctgctttttagccttctctagctgttttttcctgacaatattactgtgtgttttttgacattttagtttaatgttaaaaaattaatctattatatatgtttacatttattgaatatattattacttcttttttgagatcctgttccatttgtgatccttataggaataatcctgtattgtttttttgatgagagcagcatttggttt

SEQ ID NO: 214838 - DNA, 540 bp, Homo sapiens
gcatttgtattttgtctactatgtttttatgatattagtgttcagagcatttgtattttgtctaacatttactaccttaaatattttgtcagtataaaatatttaaggttttgctgcttttattactttatgaacacatttgtcaggaatctgattgttagaaagcacattaaatagaattctacttggatgtggaatctataaagagtataataaggttttgatattgaggatgtcagtgtatgaacagctataacaatccacattaatctattttctgtagttgtgttacttctaactttcagactttatcctttctttcatatcttgtgtcttccctaaagtggatccagtcagttttctggttataattacaattgaaaaaaaaaaaaaattcaaccatagttacttctttattcaattacgttgttattgagcgcttcctgtaacatttggtaatgatcataacaagtaacacccaggtacttacaattggccagacattgttttaaatgttttatgtgtatcaacttatttaaa

SEQ ID NO: 214839 - DNA, 467 bp, Homo sapiens
gggtagggaaatgtcaatcatagtttaaaaataaagatatctttgagaatacttccaaagataaaaatgaagtaaaattgtgacattttggtcctcccttgtcaaaatgtgtaatttgacaagtcaaataatgtagttagtaagtattgaccacagttgtcattgataatggtattgaggtatatggatgtctattttgtgcattatttggcaatgtttaagaagttaacagttgtcagtcattgtctgaaagtgagtctgtaagtgtattgttcagcattttatcacccatgaaaaccctttttttatttaaagcatcactctattgaatggtactaaaggtacaaatttgttggggctgagatttttttcttagtttgatttttttttttaagagcatttacttaggaatgttctgtgttctaatactacttatttcagccaccagagagaaccctatgccagtt

SEQ ID NO: 214840 - DNA, 516 bp, Homo sapiens
tgaagcaaaggatcatgttttacttgtcttgggaggctgtggttaagagctagctggagtggcagaattagacatagctgggtttgaatcctgggtctaccatttgctagctccctttgacaaggcagctttgtattgctaaactttagtttgctaatttgtaaaattcagacaaatctagttcataagactccttgtgaggatcaagtgcttgctgagcacagcattattagatatgcagcaactcccttttcaactagattgaagaagtcaggatagagttttatttttaattacaagcatgttcttaaatttgccaggagtagaatgatatgaattttaatgtctacgtgtgagataaattataaatttcaagggagatttaaaaggtgttgaggttttttcaacaatatgaaaattgagcagagtaaaacagttacaagtgacatgttaatgatatacaagtatgtcattaatgacataacataacttttctaactttgtactagactttat

SEQ ID NO: 214841 - DNA, 618 bp, Homo sapiens
taatctgtcctcagataatcagaagttaatagtattctccagccctattgtaatcaaaagactgttacaaaaattcaggccaaaagcttttgcaagctatttttgtgaaatacaaaaagactgtaaagtgttggtaatgattagaaagcccaaggctggaaagagtcaagggagagaatgtatatggcagaagagcagtccactggatgggtctgcagggcagacttgggagagggaatccaggaagctgcatggaagctcacacaaatctgcagctctcctccccaggcgggagatgaggctgacagcagggctgaggcactgcctcccaagtcctgcagctctgatccaggatgctggcctggggaaagcaacgcacatactcactgcatgatgcggggttaggggagcatggcaaccctgctgagcggtaaatgtgctcagtcgtttttttcccctctacctaaagcttttcctgtcaacagcatccgagttacttagtatctctggagcaactcagacagaggggcttaacagtttagaagaaacagcttatgattccccacctaagagaggaaataaaatgcatttaagtgaatgcctcccatttaattaaca

SEQ ID NO: 214842 - DNA, 390 bp, Homo sapiens
cgaaagcaatattccaatctattctattccccaaagtaaataaaatgttaaccccaaacaagaaataaacgtaggttgaaaaccaccaatgcccaccacaatggttttgcgtaatacccactcggacaagttgaagaagtttggtggcagggggcgggagtgaagatattttcactggattctttcttgtccttgggtcaagacatgaaaagtgctggtcagtgcgaccatagagactgggatggggcaggtctctgatggagacttcaggagtctgaacacaacactgtcccatttgtgacatttatgaatgccatgatgatgaaattcagagaaatgatgaagttggggatcataccccaactctgggtcctgaaacatttggaactc

SEQ ID NO: 214843 - DNA, 377 bp, Homo sapiens
gaattccacaaagactaaagaaatgagttttcatttgttggtcatttgtcagctacggaacttaattctttactaatctttagtatgtcaatatctgatccttaactcctccctaaaattttgaccccttcccaattaatccctctcctgttcagtataaacagagcaccatgaacacaaaccaagtagagactttaaatggaatggcccttaatcatagatcctccttcttttcctatgtaggggagtctatgaacactctaatgttaatcctagctctttatgcaaatgtatgtatgaaataacattaatgtcataatattgtttcatgggcaaaaactacaaaattcaaaacatatttgctgagcattaaccat

SEQ ID NO: 214844 - DNA, 470 bp, Homo sapiens
agttgggcttcggaatgactccccccccgccactttacagatggagaaaccgaggctcacagatggtaaggaactggaacgagatcacagagctgggaagtggcagaatttgatttgaacccaggcatcccggccccagagtgggaataaaacagttgcatgccagggattacccaccagatggatcataacagctgcaaatgtgctcggggcttcccgctcacacacaggatgaaacccacatttcttcctgtggccaactggatctggccctgccgcccctgctgcctcctctccctccatctccgctgaacactctgcctcctcagggactttgcacatgctagccttttgcctgaagcagtcttcccccagatgcatttgcctgaactcttcagtctcagctcaaacgtcactgagaggcatcccctgtgcccccagctgtgcccctgagaaggtactgactaaat

SEQ ID NO: 214845 - DNA, 526 bp, Homo sapiens
tgagaggtcaggtaaaatgagaagaaagaataattggatttgatagcatagatgttcttggtggtttcagtctctggaatggtgggttcctaagcctgattagattagactgagtagagaaaaggaggtaagaaaggatagacagcaacataggttcgatactttgaacaaatttactaccaaggagactggagatagggaacaggaattagagttacatgggatcacaagaagtgtttttgttttattttgaggtaggggattttaaggcatgtttttattttgagacttctaacagaaaaaaaagtacgaaaagaggagaaagaagatggggtccagagcacaagttgagtggttgtcctataatacgagaaaggatatttcctcttcagaaggctagtgttgatatgggtgttgatcagtttgttgctttgatgggaagatttatgactccctgtgttaattgcatctgttttcttagaggtaaggtctttagctgataaggagacaggttaggaggttttga

SEQ ID NO: 214846 - DNA, 267 bp, Homo sapiens
ggcccaagcaatccttccaccccagcctcctgaggagctgagaccacagttcttttatgcatggacaaccgtgctgatgatgcattcagtttaggagaattttccaattgaaaaagtgctctggagaagtttaagtgccatgaatcacccaaacctcatctaagtctcgtgaaggcaaaggctgtgaaaggcagtcacagagagaagacatattgtagttgtgctgcctgattcaactaaatagaaaaatattttgtaaagacatga

SEQ ID NO: 214847 - DNA, 442 bp, Homo sapiens
ctgcctacagtagtgagccagaataggagggaagttcccagttactgcagggaaggtgggtgaacttcctgtatgttttatatatatatatatatatatatattttatatatatatattttatatatatatattttatatatatatattttatatatatatatagtatgtatgcaatggatctgttgattgggtttaagttacttttatttaagctgtaattgtttcagttctgctgtttgtggaagttagtaagctaaagtatgtagggaacatgtttacttaaaaaaatctatgcacatttaagaacgattaattctgcagctacttgggaggctgaggcaggagaatcacttaaacccgggagatggaggttgcagtgagctgagatcgtgccactgcgctccagcctgggtgacaagagcgaaactgtcaaaaagaaa

SEQ ID NO: 214848 - DNA, 397 bp, Homo sapiens
gagatgaagtctcgctctgttgcccaggctgcagtgcagtggcgcaatctcgggtcactgcaacctccgcctcccaggttcaagcaattctcctgcctcagcctcccgagtagctgggactgcaggtgtgtgccactacgcccgtctaatttttatatttttagtagagctggagttttgcgatgttggccagactgctgtcttaacttctgacctggtgatccgtctgccttggcctcccaaagtgctgggattacaggtgtgagccactgcacctggccagggatgtaatttggaagtgaaaaagtatataggttgttgttattcctgagagtagaatataatgatagctatgtttattgagtgttgttatgttctaggctcttgttatatactg

SEQ ID NO: 214849 - DNA, 872 bp, Homo sapiens
agcacactgctgccttcacttgaccttcctttcatcccctcagacctggctgaggcctggagacaccttgctgcaccatcatttcacctgagcccagcccagctcaatgctcccccacacgctgtcctgcagtccgcatggacctgcctgagacctggagacaccttgttgcaccatcatttcacctgagcccagcccagttcaatgcttcccacacactgtcatgtcgtccacgtgggcctggctgaggcctggagacactttgctgtccccatcagttcacttgagcccagcccagttcagcgctccccacacgctgtcctgcagtccgcatggacctgcctgagacctagagacaccttgctgtccccatcatttcacctgagcccagcccagctcacagtgctccccacacgctgtcctgcagtccgcatgggcctggctgaggcctggagacaccttgctgtaccatcatttcacctgtgcccagcccagctcaatgctcccccacacgctgtcctgcagtccgcgtggacctgcctgaggcctggagacaccttgctgtaccatcatttcacctaagaccagcccagctcacagtgctcaccacacactgtcctgctggtccacctgtctggatgtgaaccctcctgcttgtgtctcctctctgtatccatgattagccaggcacctggcttggagtaagcatccagtaatagatttattcagttattagttgattagctaatgccttggtaagggttactcaagccatagatgataggtgaaaatgaacatcaataaaatacgaaatttacccttgggttttttatattaatagttattttcaacagaaagtcaaattgagtcaa

SEQ ID NO: 214850 - DNA, 642 bp, Homo sapiens
taaccaggtaacataaccattacctctacctaattccagcacagtttcatcactccaaaaagtaacccataaccattagcggtcactctccgtaccctgtcctcatccatccacttcccccacgctggcaacaggtagtctatttcttgtctgtatggatttgcttatgctggatgtttccatatccctggaatcctacagtatgtggccttttgtgtctggcttctttcacttagcataatgttttcgggttcattcccaggtgatttttaacaggttaccaaggttgaggaaccatagatctgcctctgcagacacccaccctgtccatgtgtgttagcttcccacacagagccatccgtggcctggctttgagcagccttctggccaatggcaggctgtacttcctggttcctgtgggaaggagcctgcaccccactccacccacaccagcagcccctgttttgagtgagtagcaggcacctgtgttctgctattaaagcacacgcttctcaaattattacctttaactttggccagccccaaaatttgtacctccattttctcaggattttaatgagaattaaacaatacatgtttaatttagaagaatgcctggtactcaataaacgcctattaaat

SEQ ID NO: 214851 - DNA, 177 bp, Homo sapiens
acataagtggccaaaatcacacgaaaagatgctcaatatttactaatcattagggaaatgcaaatcaaaaccacaatgagataatcctaatcacctaatcaccattagaatggctattaaaaaaaagacaacagaaagtggtgttgatgaggatgtggagaaattggaaaccttatg

SEQ ID NO: 214852 - DNA, 213 bp, Homo sapiens
gaagagggggctacagagccccctcttcaggactcatgatgcacattaacatgctaaaggctctgagaagtcctgaaaatgagacaccagcttgactttgtttcactgaatgttatcgctaattagccagttactcccttttttagatgaacacttattgttacccttttaggcatgctgccttcaaaaaaagcttcaactgctggcttagaa

SEQ ID NO: 214853 - DNA, 456 bp, Homo sapiens
aagaaggaaggaacatgactttgttgcacatagtcgtataagtaaatgacagaatgagaaagagaaaaaagatatatagatggaaaagaagtgatgagaatatagcaatgtttgaatttatcaatgcttgaatttatcttattctaaagaataagaataattttgatgggccaggcgcggtggctcatgcctgtaatcctagctctttgggaggccgaggcagctggattgcctgagctcaggagttcgagagcagcctgggcaaaatggtgaaatcccatctctatcaaaatacaaaaaattaggcaggcgtggtggcatgtgcctgtagtcccagctactcgggaggctgaggcaggagattgcttgaacctgggaggcagaggttgcagtgagccgagaccgcaccactgcactccagcctgggcgacagagcaacactccgtctaaaaaaaa

SEQ ID NO: 214854 - DNA, 428 bp, Homo sapiens
cctccgctgggacccaggcgtgcgaccggctctgcctcctccgcagttctgcctcaggacctttgcatttgccatctcctctgtcagcttcagttcccgatgccgaaatggatctccatcaccttcatattgaagctcaactgtaacatcagcaaggcttcctgcaatcccctactttactagttcagcacctcccaccaccacaccccctggaaaaatttcccctcacttccttaatttcttccatagcacaactcatcagcatctgaaattctacacgtatttatggtttataccctccgagtagaatgtgagctcattgaggtcagggaattctgttttcttcattatgatatcctcagcacctagcatatatttgaggttcacatactgaccaaacgaataaaggaatatgttaatttttaaaa

SEQ ID NO: 214855 - DNA, 451 bp, Homo sapiens
ttcctcaaatcatgggagagattttcaaagaagaaaaaatagaaaatattttaatgcactttaaaaatacaggtttgtctgcaccatctgtcaggtaaaaaaaaatgaattttagggaaagagcacagatgtttattaattcaatgtagaaagtatattactggctgggccaggtgtggtggctcacacctgtaatcccagcattttgggaggccaaggtggatggatcatgaggtcatgagttcaagaccagtctggccaggatggtgaaatcccatctctactaaaaatacaaaaattagctgggtgcggttgtgggtgcctgtaatcccagctactcgggaggctgagtcaggagaattgcttgaacctgggaagtggaagttgcagtgagccaagactgtgccattacactccagcctgagcgacagagcaagactccgtctcaaaa

SEQ ID NO: 214856 - DNA, 276 bp, Homo sapiens
tgtagctgagaaaggaggctgtatttgactgtttgtcttggggactcataggctaagtgcccctggttttttcaatgtggacctcactgtctgaactcttgtgtgggcacgtggattttttctttttaaattcacaaataacagtgagttgaaaagccctgtctctagcgtaggaatgctgaatttgtctcaaatcaggtaagtatgggactttgctcatacaagttaatcttgccattaatccttgatacaatttcagtagacttgggtacagca

SEQ ID NO: 214857 - DNA, 425 bp, Homo sapiens
taaactatgtttgggttagttgacctctgtagctattctaaagttttctatcccttatctgtattccgctgtcattcctgtgcctcaagcctctgccaggaatctgatggtactctggctgaacttaaaacataagaatctcaaaggtctcatttagtaaatgttagtgctaagttggtgacagcctgggttatatgctttctctttcagtcttcagtagatgcttgtgatagttttcaaagaactgtaaaatttccgggtctgtacagatttttagagatcatttaatccaaccctgttacagtatcatgtcagcatttaaatagcagtaaaggtcatgaaaagtgaagtgaaaggcagcaaactccatgaaaaactaaatacagtgacaactgagggaagtggtaaagtaaaaaaatattaat

SEQ ID NO: 214858 - DNA, 378 bp, Homo sapiens
cttaacatcatttttgactgctttaacaaggactgttgcaccgtaactttcaatgttagcatgtaatgcttcaagtcattttttaacaactgctgcaccatgttccatagtttcagtatatcatggtttagccatttcccaaattgatagcagtttaagttttaactttaaaacagcttttttgctggtggtggttctctgatgagatgaaatttcggtgataggagcacagatctacgctaattatcgagattcggcatttatgatgaagttctcttttggttaagaaattgatatgtggaagcagccacccctcccctatggtagttctgactctagcagttagaagttgtgtgaccttggggaggacattgaatc

SEQ ID NO: 214859 - DNA, 734 bp, Homo sapiens
agcacagttcaagagtctgaatcatttaattgtgttttattcatatctgaatttgcatctgtcacaaacccaatgtgtccaccgtgaaaaattgcatccttcaaatattactgaacaaaaaaccctattcaaataggtctgttctgtctagattgtctgtgaaatttctgaggaatgttgtgggctctgtttcctgtaccaaattgttgagttatcacacatcattggattctacccaaagtgtgctggataggcatattatattcagacaggataccagttgtctttaccattcataaaggaaaaagaaaagattactcctgctccctgccataagatataaactaagaagtgaaaatgtgtgtacccatagtttttttaatgtgtccttgatttcttttcttcaccaagatttgagttttattcagtcatagctttgttatgcactttcttgtcaccctgtacttgttcaaaactaaggactatagtcaagactcagatcctgccctgggattggtgccatcttagcttgtttggaaaaaaaaaaaaaaaaaaaaaaagatctttagagataccatcatatccatttgtatataaaaagagaaaagaatggaagtgatgctgtgtaatttattttcatctatttactctattttccaaattttccacaatgcgtatatattttataatcaagataatctgttactttttaaattttttatttttaatttttg

SEQ ID NO: 214860 - DNA, 458 bp, Homo sapiens
cacctgctctgaatgtgtggctaggaggctacccaccaataaattctgaactcctcctattacaaggatcagtaaggagagaggggacatgggtcacacaggtacagacattaatatgaccataaggaaatattatgaatagctttatgcccacaaattcaaaaacatggatgaaatgggcaaattccttaaagatgcaaactttcagaaacggaaaagaataaacagactatctgaacagctctatattaaagaaaactccagccccaggcagcttcactagtgaattctagcaaatatttcaggagaggtaatacaattttctacaaactcttgcagaaaattaaagggaagggccagcaaataactcagaaaaaagacattacaaggaaccaaaaacagactaacacacctcatgaacacagacagaaaaattgttaacagttttttttgttgtt

SEQ ID NO: 214861 - DNA, 585 bp, Homo sapiens
tgcggtggctcatgcctgtaatcccagcactttgggaggccgaggcgggtggatcacctgaggttgggagttcgagaccagcctggccagcatggtgaaaccccaactctactgaaaaatacagaaattagctgggcatggtggcaggcacgtgtaatcccagctacttgggaaactgaggcagaagaatcacttgaacccgggagatggagattgtagtgagccaagatggcgccattgctcttcagcctgggcaacagagtgagactccatctcaaataatggggaaatataacttaatgaataactaataagtaagtaaatgaccagagagtgctctttccattttctcacacaggaatggacagcaagactaccctttgaagccaattcagtttgtactctaagacacagattgatagaggggtgcttgtataaagaataaaacctcagctaattctgaactccaggaaatgctaatgttggccaggcacggtggctcatgcctgtaatcccagcactttgggaggttgaggtgggcagatcactggaggtcaggagtttgacaccggtctgaccaacatg

SEQ ID NO: 214862 - DNA, 518 bp, Homo sapiens
tgtctaaatgtatcccatgactcccattatcccctggaaaaagttaacaacttgcttggcccctcagaaccttcaagcgtgtgcttctggagctatgcctcatgcagggtccacatcattgcctgtgtgcaagccacatggacacctggagcacactgtgtgccctgtgctttccacaccctgtgcctgtacacctgcccctccctgtgctcagcatgtccgggcccggctagttcctcctagtcactcagtatgcagtgtagcagccacctactccaggaaggcttccctgcccctccagtaatacacattagaaaaccctctgtggggcttctggaaaacttggtgtcagcctgcatcatagcagcttcgacagtgtttctcaaactgtgctttgcagagtcttctatgttccaaggagacttctctgtggctaccgcaagttgtggtatctcttctgtgcttagcttcattatgagatttcctttgaagaaggatttccaagagcttgaaagaag

SEQ ID NO: 214863 - DNA, 470 bp, Homo sapiens
ttttcttttctgagacaggatcttgctatgttgcctagtctggagtgcagtggtgtaatgaaggctcactacatccttgacctcccaggctcaagtgatcttcccacctcagcctcccacctgtagctggaactacaggtgcatgccaccacatccagctaattaaaaaaaatttttttgtagagatgggatctcactatgttgctcaggctggtctcaaactggcctcagtgtcttgcagtgctgggattacaggcattgtttgttgtttcttaactttgtttatggtatctcttgccacagtaaaattttaaagttttatgtagtcaaatgtctctcttctcttttacagtttctgggtttccagtcttggttaagaaggtcacccgcaccctcagattgtatatgtagtctcctagattctctttcaggatttgtatgattttaaggttttcattttttttttaaag

SEQ ID NO: 214864 - DNA, 467 bp, Homo sapiens
ttttcttttctgagacaggatcttgctatgttgcctagtctggagtgcagtggtgtaatgaaggctcactacatccttgacctcccaggctcaagtgatcttcccacctcagcctcccacctgtagctggaactacaggtgcatgccaccacatccagctaattaaaaaaaatttttttgtagagatgggatctcactatgttgctcaggctggtctcaaactggcctcagtgtcttgcagtgctgggattacaggcattgtttgttgtttcttaactttgtttatggtatctcttgccacagtaaaattttaaagttttatgtagtcaaatgtctctcttctcttttacagtttctgggtttccagtcttggttaagaaggtcacttgagtccaggaggttgaggttgcagtgagccctgtttgcaccactgcactccagcctgggcaacagtgaggccctgtctc

SEQ ID NO: 214865 - DNA, 461 bp, Homo sapiens
ggtaggaggacgtccgctctaagaacagaagggaagtcaaggggctccctggacggcacggagcggttcttctcgtcactcacccatccccacctgggttcggtcatcgtccattgttggccccgcgcactaccattttcttcttagatttcttcccattcttactgtgccccgctcttaactcgtcagcctggctattgcagtagtctccaaatggactctacctctctctctcctctccgccccagcccatttgcacacacagtcggatgtatctttctgagacagcacctgcatcgtgaccccacaaccttcaatggctccacatcccatggatgggagggacacagcccagagccagcctaaaatccaattcctaccttcgtcccggccttcaggttgaattgtaatgtattatcttttagttgctactaaccctgagccattctgcaagactggaa

SEQ ID NO: 214866 - DNA, 819 bp, Homo sapiens
cgatcctcactgctgtgacactcccatgtgtcccctaccacctagccaaatgataagataaacagtttggcttgattcacaccttcatgctcccaacgaccatcctgtctgaaacatcctcatgacttttatctatctctctcctagcacctattcaattacaagtcaataattccaggaagcctttacagataaagccacttttgctctttcccatcccctctaacaatactgatgccttttttcctaaaccaaaaatctagatttgttgcttaacaatgttggttgtatttatggggacaatgggacagaatgcttgcagttgttgcagctgccatttatcctcatgattccttacaccctttactgtgaattgttttatagatgtgctttccagtataaatgtgctctccaattagattacaagcttcttgaaggcaaggattcagactcctactaattttgacttctctttagaccaggggtctaaagttggctcaattctccaattgtcatattaacctgaaaatcccttaggaaggcatgccagagtggatatcaacatactgttctctaagtgcaacacagctatttctttcaatagaattataatgaatatttctgttaagaatagataaaatacgccaggtgtggtggctcatgcctgtaatcccagcacttttgagaggtcaaggaaggaggatcagttgagtccgggagtttgagatgagcctgggcaacatggcaaaacctcgtctctacaaaaaatacaaaaaaagtaagccgggcatggtagtgcatgcctgtggtctcagctac

SEQ ID NO: 214867 - DNA, 409 bp, Homo sapiens
tgtctcccaggctggagtgcagtggcgcaatcttggctcgctgcaacctctgcttcgcgggttcaaacgattttcctgcctcagcctctcaagtagctgggattacaggcacacgccaccacccccagctaattttgtatttttggtagagacagggtttcactatgctggtctcaaactcctgacctcaggtgatcctcttgcctcagcctcccaaagtgctgggattacagacgtgagccaccgtgcctggcctcatttccagcatctctgttgcatttcatcccgtctcctgcaccacagcatcactccatttgtcctgcctttgggcgtccaagaggaagcctgccctttgtcacagcactttctgtttgggtagctttaagtgtctcaccccttcttttctctc

SEQ ID NO: 214868 - DNA, 306 bp, Homo sapiens
aacatgtttagattttcattcattgcaattaatatgcttaatgaagctcaaattgttgttacatctttgaccagtgggagcctgcccctcaccctctctctctttttttttttgtaaagataggttctttctctgtttccctttcctttccttacttttcaggcagagttttgctatgttgcccaagctggacttgaactcctgtgctcaagcaatcctccagcctcagcttcctgagtaactgggactacaggcacgtaccaccacacccgactctgctattgtttctttaaataaacattctgc

SEQ ID NO: 214869 - DNA, 733 bp, Homo sapiens
cagagcatttaagaaagcttaaaaattctagaagagcaaattagcaaaataaattgaagagagaggcaatcaacacaagaggagaaatctccaatgtctctatcgtctcatccccggggaatcacgccttcccagtgcctacttggtctcacccttggtgcatcatgcctctccagtgcctggactgactaatctctagggattcctgcctccccagtgccttcacagcctcatctctagggaatcctgcctccccagtgcctgcgcggtctcatacctagagcaatgaagaaggcacggaatgaaaggtgatgtggatgcggctgcagatcctcttcctgcctgcaggagccctggtccatgggcaggtcctctcagtctcaccttcctcgtgtggcaacagggataaccattcgtacttcatgcactggttttaagcatcagatttcctcatgtctatagagtgccacattaaaaatcacttaaatgccagtgggctgtcctttttgtgtgtaatttttttttcaagctattttcttaagacattttgccagaaatggaattactgagtcaaaggaggtagacattagccacaaatgtcaaacttacttatgggcaattttaaaatggcctttttagtttcaagtactagtatttgaaaaaagatattcatctataatggatccattatatgtagggcaagcagtcctatttcttttaaacaactttctaa

SEQ ID NO: 214870 - DNA, 397 bp, Homo sapiens
acaagagcacatagagaatagaactacaatgaagtgactatggcacaaaggcaaaaagctgggagcctttccaatgttgccaagcagcctggcttaaatgggggctaaagaactcagaaaaaggccaggcacgatggctcacgcctgtgatcccagtactttggaaggccgaggcgggtggatcatgaggtcaggagatcgagaccatcctggttaacatggtgaaaccccatctctactaaaaatacaaaaaattggccaggcgtggtggcgggtgcctgtggtcccagctgcttgggaggctgaggcaggagactggcgtgaacccggaaggcggagcttgcagtgagccgagatggcgccactgcacctggacgacagagagagactccgcctc

SEQ ID NO: 214871 - DNA, 583 bp, Homo sapiens
tattttgttgctcaaattgtcccaaatttgacctggggaacttttaaatttctcacaatttatcccatctcagaaaattctaatacctagaactagcttattatgagaattctgttttgtcaaggaatcttagaaggctaaggaatagctaaacttcagcaataagactaaattatttttctaattctttttcattccaaaatggactttattaaaatgaggatattgggggtctgcttgatttgccattgtctaaagctgagtttcattactaaatcttaattgatctgtttactctttgctctaaatgcttggaggggagcccaaagggccatcagtatttgtatgacaataatagcgtacatggctaaaacacaatctcttaaaatcatttctcattaagagagagggagagaaatctatagtgacatctgacaaagctgaatggtcaatctgaaaataaagaactgccaaaattaagaaagctgagaaacagctagagacaacagaacaggtcagtcgtaacagagttacggaagagatgattgtctccaattgccacagttgaaatggaatgctttgt

SEQ ID NO: 214872 - DNA, 909 bp, Homo sapiens
cacatgtgcagaatctcttttgccatataagtgacattcacaggttccagggattcatacgctggctatctttggaggccgttattcaacctgccaaagtgagatccattcttattgttgcatgtatttgtagttcattcattctcattgctgtatagtcttccgtttgtttatccatttttcattacatccaaaagttattcattctcccattaatagtcttttgagaatttttcaattctgagctattatgaatagtactgtgtagaacattcttatacatgtcttttggtgagtgtatacatttccattgagtataaacctaagaatggaattgccaggttgtagggtgtgtatattttcagttttagtatttactgtcaaacagttttccaaagtgactgtaagaaggcaccattttaatgtgtagcataaaaatgaattacgctaatgatcttagtgggttgaatttctcgaaacacctaaattgtaccaaatgagttatattgcagcaggtatgttgttaatttcatataacaggaaaataagagcaaaagtaattgcccttattaactgacacattagtattacatactcattaggttattgctccttagaaaaaatgcgaattttaagtaatcgtaagtagtatgttgaattagtatgttgtgggaaaatctgtgatttaattttttaattgaattttaaattttgggttataacctcattaaaatgcatgatatttccttatataggtttctaaattatgtctgtccaactcatctatatccaaatggccattaggaagaattatccaattcagatggcataggcactgccttccaatttcttcatttgtatttttttgttgctgttttcttttttgcctctgtccccaacaatttgacc

SEQ ID NO: 214873 - DNA, 726 bp, Homo sapiens
agcatttaagagtcactattatgttttgccagttaaaattttttaaatcttttgaagagagaaacaaaatcttcagcgttcttgagaaataaaattattgttcagtaagtaattttccatccccttgaatatatgttatatattctttttcggcagattatcagattagtaagtgtttaaaaggcatcagtttttaaaactgcatataccacacacacacaaaacagtacacaaataaaggttttcacaaattaaacaaactcacatactagtcttcagatcaaaacacagagcattatgtgtaccccagaagccctcctctttccccatcttaacactgtcttctttcttgctgaaagttactatcctgacttctaaaatcatagattagttttgcctgttttttattttatgtaaatgtaatcatacataatacactttttttcattcatcatttttgtgaatattttagtttcttgttgccactgtaacaaattaccacaaacttagtgacttaaaacaacacagatttattcttttatagtcctggagatcagaagtccagaggttgtgagggagaatgttttcttcccttttttggcttccagtgacggcctgtatttatgggcttgtgaccccttcctctctatgatcaaagcttgcttttgtcattatatcatcttctcttctgtagtcagatctttccctgcctctaagtttagggct

SEQ ID NO: 214874 - DNA, 521 bp, Homo sapiens
  misc_feature (476)..(476): n is a, c, g, or t
agcatttaagagtcactattatgttttgccagttaaaattttttaaatcttttgaagagagaaacaaaatcttcagcgttcttgagaaataaaattattgttcagtaagtaattttccatccccttgaatatatgttatatattctttttcggcagattatcagattagtaagtgtttaaaaggcatcagtttttaaaactgcatataccacacacacacaaaacagtacacaaataaaggttttcacaaattaaacaaactcacatactagtcttcagatcaaaacacagagcattatgtgtaccccagaagccctcctctttccccatcttaacactgtcttctttcttgctgaaagttactatcctgacttctaaaatcatagattagttttgcctgttttttattttatgtaaatgtaatcatacataatacactttttcaatccaccaatttgggggaaaaatttaggttncctggtggccacggtaaccattacccacccttagggggccttacc

SEQ ID NO: 214875 - DNA, 701 bp, Homo sapiens
tatcctgacttctaaaatcatagattagttttgcctgttttttattttatgtaaatgtaatcatacataatacactttttttcattcatcatttttgtgaatattttagtttcttgttgccactgtaacaaattaccacaaacttagtgacttaaaacaacacagatttattcttttatagtcctggagatcagaagtccaaaaatcagtttcattaggcctaaatcaaagtatcagcagggttggctctttattgaggttgtgagggagaatgttttcttcccttttttggcttccagtgacggcctgtatttatgggcttgtgaccccttcctctctatgatcaaagcttgcttttgtcattatatcatcttctcttctgtagtcagatctttccctgcctctaagtttagggctcacctgcataaagcagggataatccccctatctcaagatccttaatttaatcacatgtgcagaatctcttttgccatataagtgacattcacaggttccagggattcatacgctggctatctttggaggccgttattcaacctgccaaagtgagatccattcttattgttgcatgtatttgtagttcattcattctcattgctgtatagtcttccgtttgtttatccatttttcattacatccaaaagttattcattctcccattaatagtcttttgagaattt

SEQ ID NO: 214876 - DNA, 413 bp, Homo sapiens
gcctgggttccaggagtgcttcctttggtggtgcccactactgcactctgtcctgtcttaggtgaccctcacggtctctgcaggcaggtgccgttaatagccccactgcacaatgaggaaacggcagcacagaaaggcgcggtggctcacgcctggaatcccagcactttgggaggccaaggcagagggattacttgaggtcaggagtttgaaactagcctggccaacatggcgaaaccccatgtctattaaaaatacaaaattagctgggcgtggtggcacatgcctgtagtcccagctactggggaggctgatgcaggaaaattgcttgaactggggaagcagaggttgcggtgagccgagatggcaccactgcactccagcctggttgacagagcaaggctccgtctcac

SEQ ID NO: 214877 - DNA, 351 bp, Homo sapiens
cgatctgctccgtgagaaagctgccgtgtagagctggagttgagagtcgtgggtttatcccatcatttacaactactgattgccttttaaaatatgaacacatttattaagaaccacaacaaaacccattcctgattaaaggatatctttttcttatcactggccctagccagtgattgttcttcaaccaagagctgggaggagtgctcctaagcaaagattttggatgcaggaaaggaacactccaatcccacagggaagaccaacagatgtgtattccagacagacagagcctcactggcagagcagctgggaagacgctgctgactgacaggtggagactgttctcac

SEQ ID NO: 214878 - DNA, 409 bp, Homo sapiens
agtaggtattattgtaggacaaaatatcccaggctcccaagctgtgttctgtgatacatcagccctataaaatgggtttaaaaaaagaagaagaagaaaaagaaagttttccctgttgagtgatctgagaagccctgtacactgactcctcttggttgatctcagggccactagcacactaaaggctctgagaaggcctgcagtaagggtgctagcctcatgtttcccaaacttatttgccccagaatcccttttgcgtgtttattcaaacccctctgttcttcagttcatcctagagaatggcctgaaggctaggttagagctctaaggaaggagagaggatggggcttccccgaaaagggacattttgtgtgcattgcacaaggcccagtccaagcctagcacagtc

SEQ ID NO: 214879 - DNA, 312 bp, Homo sapiens
agcgtgactccgcctcaaaaaaaaaaaaaaaaaaaaaaatacgacctatatgttaatctcaataaatgaaaagtatatcacaaatttcaacatccattcatgatttaaaatgatcagaaaacaaagattagaaagaaatttataatttataactatacaaagggcatataccaagaaacttaatctaacatcatagtggcaaaagaatatgtccctccctaagatgaggggcaaagcaagaacgtccactatcaccacttctatccagcattgtattggaggacctgccagtgtaagatggaactgggcaat

SEQ ID NO: 214880 - DNA, 626 bp, Homo sapiens
cgtggtggctcacacctgtaattccagcactttgggaggccgaggtgggcagatcacctgaggtcagaagttccagacaagcctggccaacatggcaaaaccccatctccactaaaaaaaaaaaaaagccgggtgtggtggcacacacctgtagtcccagctacttggaaggctgaggcacgagaattgcttgaacccgggaggcagaggttgcagtgagctgagatggtgccactgcactccagcctgggcaacagagcaagactctttctcaaaagaaagaaaagaaagaaaaaaaaaagaaaaggaaaggaaagaaagaaagagagagagaaagttagtttataattagaagaaattctttaacatggtcttaagggctagtcctatcacctacaatgaaaggataattcccagtcatcttaactgtcccaaggcatagaaaacagtgggaagcttccaaattcattaaatactataatataacactgattccaaagccagataaggatgatcccccacaaagagatacataggccaggagttagcaaactatggcgtgtggccacatccagtctgccatctgtttttatttgacccacgaactaagaatagtttacattttt

SEQ ID NO: 214881 - DNA, 394 bp, Homo sapiens
tttttttactaactcagagatgcttctttgtgaaaatggaattgttagtatagagtaacatctgtcagttcttttagatcttatcatagggaataatagtttgatttttcacaaaaaggatctggaataaaggatttgcagggtgtatgttgagaagaggcagttgatgtatgcaccagctagaaatctgagacttaactatgtggtcttgaatcttttcccatgctattcttcctgctacaagtgacttttttcaagtacagttgacccttcaatagtgcagcggttagactcactgacccctgcacagtcagaaatttttgtataatttttgacttcccaaaaacttaactagtaacccttctgtcgtgactggaagccttactggtaacac

SEQ ID NO: 214882 - DNA, 598 bp, Homo sapiens
attaacaggacaactcttgtctggacttcaaaaacacacccctggttctggaaatgggcctagaaacagaaatagcctctcctactgggtgggcacctgacatctgacatggaggagaggggcgtgggcaggccaagtgtcagcatctccttggttcaaggacaacccaggacctgtgctaagcatgaaacccctgctcaatagtgtcactacaacaaagaggactgtcatgtctagaagctcttcctatccttttttgacaattaccactagcaatcaatggattctgatgtttctgcttacagtgactgaataagcataattattctattgaaggaaattttttcttgccatcctcatgttagtaaacataattcagactcccaatgtttttaccttttcaagtgtagcaagaatgttttttctgttaacagagatcatcaacttgcaattacattaagcctttatgatggttaatgatagttcatttgttgtgcctgggctgaatgataagtgtagaactctccacgtgcaacttgctgaatctccaaatctgattgctaccttttgagattcagaattactgttaggaaggtgc

SEQ ID NO: 214883 - DNA, 582 bp, Homo sapiens
ggactacaggcgcacaccaccacaccagctaaaagatggggtttcaccatgttggtcaggctggtttcaaactcctgacctcaagtgatacacctgcctcggcctcccaaagtgctgggattacaggcgtgaaccaccgagcccagcctgaaatttaatgtcataggaaatcgaagagttgattaaaattattagctaccaggcaataatatgaaaatcagtgtattgtcataaagatatctaagctattactttttgaagttgtataaaaaggtgaagttaaaatgtttttaagaagtcaatgtgtctgttttacatagggttgccatttctgtttttaaactttagttgggttttaaattcctgaattttcacatggctcatgtgggggacattgggatagaatggtgtttggggtatatgcataaaaaaagggagtctgtcttaaattaaaggcatatatcccccaaaagaatggaatctgttagtagtaggataaagtaattttttgcaaaatgataaccagagaagatgtttcattgtttgatcatgaatggaattgtctgtgaatgccatcatgga

SEQ ID NO: 214884 - DNA, 224 bp, Homo sapiens
ggttcatactcctctgagaatctaatgccacccactgatctgacaggagacagagcacaggcagtagtgctcgctcacctgccagcccctcacctcctgctgtgcagcccagttcctaataggccacagactggtaccagtccatggcccaggggtccctgatatacacaataatctaaaagttttatgaattttttaataaaacttaaaaataataaaatact

SEQ ID NO: 214885 - DNA, 235 bp, Homo sapiens
gccagcagggcccagaccagaatgggagccctgtttgtgatgtctgcggtccctccctggggtcgataagcccagggcttgtcggggcaaatacagaagtatgagcagcatcttttcctctcggtccctcggggagatgagagacgtgttggctaaccagctgcagatattcacctcacatctcttgctctcccccaggtctccctacaccaccacccgctatggaagccccatc

SEQ ID NO: 214886 - DNA, 493 bp, Homo sapiens
agttcccttctgcttccagtcttcctgcctttgcttcaagttgtcctgcctttccagacggaaccaatgtacttcttacatatactgattgatgtctcatgtctccctaaagtatataaaaccaagctgcgccctgaccaccttgggctgtcttcaagatcattctgaggctctcaccggtacgtccttaaccttggcaaaataaacattctaaattaactgagacctgtctcagattttctgggttcaccgtatatagtaacatgtagaaagtaatcaaaatttatttttctgtgtattatgtcactcattctatactattactaaatcaatctatttttatctttgttttgtgtttaattatatgttaggtttacaaatttccatttgtacagatttgtcttttagttctgtgtattttatcacagttaatttgttttttcttgctctgaatctatatttgaaatacaataatttgttctatattttaata

SEQ ID NO: 214887 - DNA, 882 bp, Homo sapiens
ttaaatactgtctctgccatcatgaatcttgctgtcaggtatcaccgccactgaacaggttggagaagaagaacctagtgctgaatccagggtttgtgacaaggctggaagaacatttggtctggctagttaaagtgtggaaagagattcacgctcgtgccaagtatcaagagggatactctgatggactgttcagagccccaatttctgtaactatcacttctcagtgtattgaaagatgctaaacattagaatcaactgaactgactttatcattttattacactatatcaaatcgggttctttgagattcttattctccaaacaatgaaaggaataaatataaactgtgcctgacaaatgaagaaaagatggagatcaatagcttgttaaaataattttgatgtatgctattattataaaatacaacttttgtagaataatgtaggtatgtcactgtcactaaagagtattttatgtattctcatcatttaaggcaaatataacaatatgtattaatttaaattcaataaattttactattaaagttatatctagatagaaatttatgatattcaaaactggctaataaacaggttaagaaaatgatctaatttaagaaaaaattatagttactagcttgttcttttgaatggctagttcaaattattaacaacttcaggaaaaaatttaaattaatgatacaaagcataatattttgcaatgtccttaggtatttgtcctaaatttgatatcatacggtttcatgtttatgaagaactgtttcaactatgtcctaagttggtttgctacagttttgcatatgacatcagttgaacagactcgtaagactagcatttgaataaaatgttaataaatgat

SEQ ID NO: 214888 - DNA, 396 bp, Homo sapiens
cctgggacgtgccaggtggattttaaggaatgataaaggtactaaccactaaactaaccaatccaggccaaccttccagcagatattataagccttagaaatcaaaccatgtagatttcaatgctagaatagaaattataaaatgtaaactgactagtaaattcaatttttttaaagtaaggaattagcaaaaaatgtacagccatctaaagtaattaatataaactaacatgcaggagagaagggatttactacttgtatttcaaaaatacttccagaggtaagatcagaggtgtttggcttggcaagcctgggtgtttgctgctttctcatgccaactgtggtgatgtagactgtgtatcaaagaatcataaatgccaacaatccctaaaaatt

SEQ ID NO: 214889 - DNA, 539 bp, Homo sapiens
tgtgcgatgggcttgtttaattcccaccgttctgtccgcagagttaactacaagtggtttaggctctgggacagaacatttggggaagctttgtaaaggaccccaaactgttaaattcccagctgagctgtgagagctaataaaagacttgagatacctccttgggcattagaagaagcttttctttctttcttcttcttcttcttttttttttttttttcttttttatgggctgagacaagcgacatctaggcccctcgcaatactagctgctttgccacttcgcagagacaaaatgaaaggctctactgcaggaacatttgaaggaactttctttggggggcggtgggggctatcagcgaagggaggggaatgtgcgtggagctgaggaggagcctcccggctctccgagggccttggggttgggatccctaggtgcagcccgttgacagtcggccccacggccatggacgtcctttccccaagttagctgagcgcctgccaccgagatcccccgagcctgggcttcgcgcggccgc

SEQ ID NO: 214890 - DNA, 412 bp, Homo sapiens
aagcgataaactccctgtggcgctgaagtaatttgttttaaagccaaatggtgcccttcagctaagtaaccgacccaaggaggaacagttgggaggggtgtgtgcacgtgtgtgtgtgtgtgtgtaagtgtgtgcgtgtgtgtgtgtacctggagccttcgacagccggctgggactctaaaaagatcgcgctggtccaccacttgttaaccctttcttcccgccaactcaaaagtttctgagctgacgtcaagtgtcaaagcctttctcataaagaggtttctgccgtgggtgggcggaaaacatagaaaagtaattatatgtatatttttgctcaatctggtcccctaacgtaaacatactcaaacagcgcgcattaaaaataaaataataaaaattgttttctggagga

SEQ ID NO: 214891 - DNA, 991 bp, Homo sapiens
atttccagagtttaggccttaagaagctttgaatcccccattatcactctcctataaccgtgagaatacctgctgtgcagaagcccagtctagcctgctggaggacaaaaggccacgtagagatggaccaaggtgccttggccaacagccagcacccactgccagatatgagagagaggccatcttggacatcctagtcctgttgaactcagatgactgcagccacaggagtgatcccagtgcctcactgcttccagttgctggaggatatgtggtgctgcactgacaaatgcctccaccactgtggcagacgtgtgacccttgacgttcttcctaagtcagaatctgtattctgtgtgtgcctagtgtggagaacatggatctgcccagccacactggctcagattctctgagaggaccagggcagtaatggtgcccaggagtactctatgatgttgccaccggaggaaggtgccaaggatatcggcttcagagccagctaccatgtgaaaagtccagcttgatgacctagaaggacctttacctgcagaaggacaaggcttcaactctgttctgcagattctccttcagtaaattgggagtgcccttccacactggtcaacaggcccctccctgctgctttggatcaccaccttaagtcaaacacaattcaagtgccttcaaaagagcagcacatggactggcaaatcgtgactggtgaaaatgggcacaatcaagtagttaacctgcacctattctcactttttgcagacttccaaactcgctgaatgcacagaggccttggcctggcttatctcctcctcgctcacttatcctgaagaattgctttccctttagacaaacattctgtaaaggatcagatggtaggtctgtggcagctaatttcccatcttagtccttatgcctgactaagcagtcaatgaaagaaaaataaacctgaaacactcacacgaggcataatcaaaaaaaa

SEQ ID NO: 214892 - DNA, 980 bp, Homo sapiens
gtacccacccacctctgttcctggctgtcaagatgataataataattaccatcctttcactcacaaatgaagcccagtctagcctgctggaggacaaaaggccacgtagagatggaccaaggtgccttggccaacagccagcacccactgccagatatgagagagaggccatcttggacatcctagtcctgttgaactcagatgactgcagccacaggagtgatcccagtgcctcactgcttccagttgctggaggatatgtggtgctgcactgacaaatgcctccaccactgtggcagacgtgtgacccttgacgttcttcctaagtcagaatctgtattctgtgtgtgcctagtgtggagaacatggatctgcccagccacactggctcagattctctgagaggaccagggcagtaatggtgcccaggagtactctatgatgttgccaccggaggaaggtgccaaggatatcggcttcagagccagctaccatgtgaaaagtccagcttgatgacctagaaggacctttacctgcagaaggacaaggcttcaactctgttctgcagattctccttcagtaaattgggagtgcccttccacactggtcaacaggcccctccctgctgctttggatcaccaccttaagtcaaacacaattcaagtgccttcaaaagagcagcacatggactggcaaatcgtgactggtgaaaatgggcacaatcaagtagttaacctgcacctattctcactttttgcagacttccaaactcgctgaatgcacagaggccttggcctggcttatctcctcctcgctcacttatcctgaagaattgctttccctttagacaaacattctgtaaaggatcagatggtaggtctgtggcagctaatttcccatcttagtccttatgcctgactaagcagtcaatgaaagaaaaataaacctgaaacactcacacgaggcataatcaaaaaaaa

SEQ ID NO: 214893 - DNA, 845 bp, Homo sapiens
caaaccttgattatgtaccatgcacgattttagtcattttacactttacatgtattaattgtttaaatattcataacaattctattaggtagatattattattgcattcttcttctttttcttttttaagagacaggtattgctatgttgcccaggctgctgctggcctcaaagccctggactcatgtgatcctcccaccttggccttctgagtagctgggactatagtcatgtgccatggtgcccagcaggtagatactattatattcattttataagtgatgaagttgaaacccagtctagttataaatatgcccagtgtcacgaagctaataaataacaggattaggattgaaatccaggtcagtctgaccttgaaccaccaaatacactgccttcttataactcagctctttggagttctacatttgatttacttttgtgtttcaaccccagatgtatagttcaaaaataatacataactttaaaaataaagataatttttaatgaaaagaaccagaattaattgtataatctgttgttagaaaaatcttttggccaggtgcgatggctcacagcggtaatcccaacactttgggaggccaaggcgggcagatcacgaggtcaggaaattgagaccatcctggccaacatggtgaaaccccgtctctactaaaatacaaaaaattagccgggcatggtggtgcacacctgtagtcccagctactcaggaggctgagacaggggaatcacttaaacccgggaggcagaggttgcagtaagccaagatggcaccactgcactccagcctggtgacagagcaagactccgtcaaaaaaaaaaaa

SEQ ID NO: 214894 - DNA, 410 bp, Homo sapiens
gctaattttgtatttttagtagagatggggtttctctgttttgatcagggtgtctcgaactcccgacctcaggtgatccactcgcctcggcctcccaaagtgctgggattacaggcgtgagccaccgtgcctggcctgcttgttgttttcatctcatcctgatttccaaatacaggagagaagctgaattggtgttcactaacaagcacaggagctttgttatatttacagtgtcattcttggcaaaacctgaagggtgtgttcgtggggtgatgaggttcagtcacctgtgatctgtgcatctggccagcactgtggtgacatccttaggaatccatggggagagagaaagcattcaggagttagtgggtcacgtttgacaagggccaataaagaaatatgcaaagaca

SEQ ID NO: 214895 - DNA, 535 bp, Homo sapiens
gggaatcttccctaccattcatcccttctttatcatcctgccaaaataatttcttcactgggactttttgctataattacctcaattttgttgttttaacttaaaagtaataaactcatatgctacatctagattacaaattccggaaatagagattgaactctttcctgcatttcctgtttttcctgaggatccagtaatgtgctcttgaatgcaataaatgcttactcaccctctccagtaggctatttccatctgattctgtcattcatcccttcagtgattatttgttaagtacctagtgcattttgagcacactgtgtggttctagatacacaccacatagtgaaacagacttggtccctgccctcgtggaccttacaaccccatgatgaaggccacataacaagaaacttctctggacacacattttatccagtgaagatgtttttaaaatgtgattaattaacattttttcaggtggactttagcctgacttacagccaactagctacaaaccaagatttctttcttg

SEQ ID NO: 214896 - DNA, 527 bp, Homo sapiens
gtttgttttcctgttttctgtagtagaattgcattttctcaaataacatagaaaactcatattagtgatatgaaggcaaaaaggaagaggattgatataaactataacttaatatttatcaagttccaaacactgttaaaaggcacattgtgtctgctagctcagttctgtcttgccagtagggacataggggtattcccattgtagggatgaagcttaatgatcagagaaggtaggtaatttgttcaatgtcatgcagctatgctgttgtggaacctggatgagatccaaatctctctgcatcatagtctcaacaagctgctgcttgaaacactacttactggagaggaatttgtgtgtgtctgtgttttgtttttgttttgcctagaatagcaaacagtgattaagtaagggtaaaaacatctcagaataatacaatgtttctctaggtccttcaaagaacatttaatgtataaatgttttattgtatcccatgaaaagtaaaataaacaattctctttctcact

SEQ ID NO: 214897 - DNA, 482 bp, Homo sapiens
ccctgcacttgaaccgcactctgttcatctaagaattctgtgtatgttgtattacattggaactatctggattacagcacagactaatagtcaaccagccaaaataaaatcagccaaagattcattgctgtcgttaaaaacctcactttagaaaggaaggacctaagtagatactttagtaatcaaatctgaggaagttcaattttacttggttgtgagaaacatggagcatgcaaatacctaaaattaagcaatactaaagaaaaaaataaatttacttatcaaaaatgattaaagtgtagaagtgaatctgctatcacagtaatttaataaactgaagcatgagttattttggattgaatttgttacatagctcatgcatgaaatgatctgttgcttgttcttgtgactatgaaacagcaaagggaaaaaatgtattctgtccgaggcattgtaaaaatattgaaagctttgagcctttt

SEQ ID NO: 214898 - DNA, 324 bp, Homo sapiens
gagggcctgtggcgcgggggctgggcagtcaccctcacacctgaggcagcagctctggacagggacaagccctagaaactccagcctccagtgagcgggagccactgcttgagggggcttgggaagagggatcctctcctcactggctacggcgggaagagggcttagtcttcgtgtgctcagctgtgagaagcctagaagtgctttgctgtcgtttcctcacttaataaagacagcaaatcagcctcacactgcagcctcctggattcttcccatttctcatttcctcacttaataaagacagcaaatcagcctcacactgca

SEQ ID NO: 214899 - DNA, 487 bp, Homo sapiens
tgaaagaatacaaaagaaaaaaaaaagaaaacaaatctttcagaattgtttgaagtaagaacaagacaagaggaggtgattggtgtgttactgttctacgaaaaaggagaaaaagcttcatgaaatcgccattcagcaaggacagaactggagatggcttctcttttacaaagaaatctctgtcccaggctttcagtctgtttggtgttcatacaagtgtttgtgtgttgtgtggaaggcgggtgaaggcgggtgaaggcggtcctgttcagggccccctttggtgaacacagcaggcaaaatactctcgtcatccccagccaaactggcctgcaagcacactgacttccacatccctagcatttaggcctttgaatagaagctgacacgtagcagccagctgaacaagtatttaatgaggagcaacacaactccaagaagggctccttagtgtattgtcaagttgctgcagccttgtgagatgaaa

SEQ ID NO: 214900 - DNA, 559 bp, Homo sapiens
gttttacacccagagagaagcacagggccgaagctagaaccagaatgcagggatcccaagggtcagcccagagtacttccactggaagacaccacccacccacctccttcttagttctgaacctagaatttacccagctaaattacagtcacttcagctaaattacaatcaagtttgaaggcagcataaaaacattttcagacataaaaggtccagaaggcttttcttcctatatcctctcctaggaagatatttgaagatgtaattcagctaagtgagggggcaaaaaagaaaaacaacaggaagccatggaatctagagaccagcactccatcctagcagagcaaggaagggaagtcccagaatgatgtggtatagaccagttgagccagatcagagcaggaaaatggaaggaaggctccgaggaagtgttcccaggaatagaagagagaattgtagtaaatttcatgattagtagagttgaaaagcctgaggatatggtgagggcacactgtccttttatcaacaagaaaaagaaaggcaattgaaaactcccgga

SEQ ID NO: 214901 - DNA, 397 bp, Homo sapiens
attcccaacttatgtaattgtatgtctataaatattattttaataatcattttgcttatattgccagttgtgttgaaccaaagctcagaaatagaaaagtcactcaataagagtgacatcatggggcttccatattctccctcaatgacttccagatcaaattttctcagtgtataaatgaaaagatgatgtttctaacagccagccctgcagactcgacctgggatctgaagatccagctgtgttcactttgcttcttctaccgtcactgtaatgaacatgctacatggctgacaactgtgttgatggtgcgtgaggttgaatataatctagcttgtctcttctgtgaaggattttctgactctgctagcctaagaagaataaagaaaaatgagta

SEQ ID NO: 214902 - DNA, 496 bp, Homo sapiens
atcatttttgacagtttcataatatttcattgatcaatatagtttaagtcatattaatgaacacattgttttttcatctttggctataatgaagacattgcagttattatacagatgtcattcaaaatattacttagttgaagtgtatgtacatttacaaataacccactagcgatatttgtttccccacatcctcattccattgtaatccaagtttttcaaccattatggtgttaacaaactttttcatggctaccatatatgtaaaaactatttgtttccttttctgtaaagtgtttaatccctttccaatttctcctgtgggttattcatcttttttttattcatcttttttttttaactgggttcctgatgatctttagtaagtacatttttcacttgtccttgataaaaattgcaaattttttttcaattagctgtcatttgactttgtttatggtttagcttttctgtgaagaattttttatttgtaatt

SEQ ID NO: 214903 - DNA, 317 bp, Homo sapiens
tctctacatctggaggttatctggaaaaatggggataagatcacccacatcatactgttgtcttgaaaactgagggacctaatatagctaaagtacagtatagctagctattagatatttgaactaattttactctcccacacaatttctactgtcctgtccctttctctgttggcttctctccaatgtgaagtcctgcattagtgaatgaatatctgaattaaactaaaagattccaaagtcctaaatagcaatgatctgattttttaaaaaataaaggatgctgaagtgttgtgatgcctactacttcgaaatga

SEQ ID NO: 214904 - DNA, 512 bp, Homo sapiens
cctccttcctctttctccagttgctcgcttcaacctttgaagattacactgtttattaagaatgctttctaatgagtgtgtatttccctagtaaaaaaaaaaatggggtttggtggagcttaaccatagctcataaatattcgtatgatattctcattattattttggagttatgcttttcatcattaagtagttaaaaatttttgtttcacttttagctttgtttgtgtaaatggtataagtatattgatatttgggtgaaatttgaaaatgttccaaaaccagttcatgctgcttgaagtttgatgtgccacatagttgaccaaacatatcaaatgtgtaaagcattgactgttgtctttgaaatagaacatcaaaatgatgattagccatggacctgggtaggatatagtttgtctggaaagagggtcacagaataagccctgagagtcttctttgctgctgagtcccagaatttggcacgatgtttggctccatacagacgtgttgaa

SEQ ID NO: 214905 - DNA, 103 bp, Homo sapiens
ggagtcttctttttattgttgctatcattattgttatttgaggtatcctagagggacacagagaatttgtggggaggggccagatctctccaacaactggtta

SEQ ID NO: 214906 - DNA, 455 bp, Homo sapiens
aggatcaagctaaattttaatcttctagatgaccgcccccaaggggtaaaaatgctagatgaaaaacacataggaatttatggaattgaaatcattgccaatatatctttaaaatacgccccaatcgactaagccattacaaaattagagtttttaattaatgaaataagtgctgttaaaaggtacataattttaaagcaatctttacttgcacagtaattgctatgacaagcatgtcacctgtgaaaactggatgggtaaaacagcaaccttctgacaaaatgtggcaaagtatcctaagtattttaagctcctggaatgaattaagaatgaaattttacttttttaaaaaagattttactcacgaaaatgtgttctaaaactactaccataaagcaagatattggcagtccctataatgcctatattaccataatctaattttgccttcttaa

SEQ ID NO: 214907 - DNA, 515 bp, Homo sapiens
ttgaaatcctagtacatgatttttttttttatcctatgtgcagaaatcaggaaaaaacaaattctacaaagaatttgaaagatattatttcaggccaggtgtggtggctcatgcctgtaatcccagcactttgggaggctgaggcaggtggatcacttgaacctgggaggcggaggttgcagtgagccaagatcacgtcattgcactccagcctgggtgacacagcgagactccatctcagaaaaacaaaaacagaaacaaaaaaaactgtacagtctgatccaaactgttgctgtattgattcctcctcttgcttactgcctgctgacttctgagatgatagtttgcttccccattctcagtacatccctaattcatccttcattgagcatcttttatcataaagctgtcttctctggggattaatatccttaccgtgtttcacagggcagaaacagcttggcttattaacaagcatagtccttttgaaggatggcgtttgatctacaacgtcc

SEQ ID NO: 214908 - DNA, 608 bp, Homo sapiens
ctccatcttctgtccccagcaagcactggctcctctttatggttcatcttgtcccttttccaccaggatctctgtccaaattccaaacaccctgcaacatctatggtcccaccaggcactgactaaggcattaagagggagtgtcccagcccaccagggttgtagagaaggtgcgtagagaaagtgctcaagccccacctgagtcatgactaaggtgtgcagaggagataccctagcaccccagttatcagcatcaagaactatatcatcagacaatccagggttgacccaggatgtggcacggaggaagaaacctcagaatgtccagtggtagacccgtcagtcaggaattccccactgcatccttgcagatgcagtcagagctggttgactaagccctcgccaacgtgtggccattctggaactatctagcctccaaggatcagaagcaaggctcagtgtgtggccatggcaggggacatcagggagattggaccctgagggaagcatctgtacctgggctggcaggccctcttctcctcaaagggactctatatctgccctcctcacctggccaccatgagtacactgagggctagggatgatct

SEQ ID NO: 214909 - DNA, 337 bp, Homo sapiens
gagcgccgaagcgcccaggcgcaggccgaagctgccgcgctttctgggcacggcgggagtgctgagcagaaaggggagcgccgggggcccgcagccggctccggaggcgcgggccgggtttttgtttggctacgctgagcgccagtcagccccagcgaacaactccagttacgacaacaacccaccttccttccagacaagcgagacttgggctgctgcgtccgtcctattgtttagacacttgccaggggctccggagtcggcagagccaccgagtccccgctctgagtcgtcgccctccctctcccccacctcgctccctggagcgggaggccag

SEQ ID NO: 214910 - DNA, 405 bp, Homo sapiens
taaatctttacctgtaggctgcagtgcatgaacatggttcatctctattttttatggcttctttgatttttttatttgtgttttgtagtttttagtgtaaggatcctatacatatttgataggcttattcctaagtagtttatattttttggtgctattgtaagtaattgtgttgtttttgtttcactttccaattgcttattactaatgcaaatacagcttatttttgcatattgagcttgtatcttgcaacgttactaagctcagttattagttcttaaattctttgggtttttctacatagacaattatgtcttctccaaacagagacagttttatttcttcctttccaatgagtatgcttttaatttattttctctcacctattgcactgcagctaggacc

SEQ ID NO: 214911 - DNA, 254 bp, Homo sapiens
agacgggccgggcgccggagaggaacccggactctgcccaaagtctcgccgcccgccggctgttttctggcggagggtgtgtcccggagggcggcgagcgcgggtgaaggctggggccaggcgcgggtggaggcgtcaccggggtcgggctagcaggccctggaatcaggcttttgggacatcccgaaagtgagtccaacttggggagaaactgagggcacctcgggcggtctggcagcggagaaggtgggcgg

SEQ ID NO: 214912 - DNA, 483 bp, Homo sapiens
ctagacccaccctgggccagaagggaacccactgccctgaagggaaagacgcaagcctggcaggattcatcacctcttgactaatgagcccttaggccttgagtaaacataagcaatagccaggcaataattgacacaggccttgggcgagacccagtactttactggctttaggtgtgatccagcacagtcccagcaatggtggccacaagagtgcttgtgtcacccctcccccaactccaggcagctcagaatggagagagagattctatttgagggaaagtagggaagagaatagaagactgcctggtaatccagggaatcctcccagttcttatctaagactaccaaggcagtacttctacaagtctgcaagagtcatggcattactgggattggggtgcctcctaatgcatatatggcttcagtgaccaaagacttagatcacaacactcaatttcctttgagtacttggaaaacatt

SEQ ID NO: 214913 - DNA, 414 bp, Homo sapiens
gtcgtccaagctgatggactgaggggggtcattccagtggacacgggggagctgagctgtgagggtcctggattgcgtggggccatgtctgacctgcagatgctgcagagtttgggtcgagttacacgtggaattggggaatccccactgaagggcgctctctggccttttagtggccacggtttgcaatttcttgagccagggtcaccctgaacattcatttcaagaaacaggagatgcccaaggacagggcttcatgcctcacacaactttctgattaaaaggcaatcaattaaaataaatcccttcgtttctagggaagtcccatcacacaggcatcatctgggcttgcgttctgacatcaggggaagctgtgaaatcacacagcaataaataataaaggcttgagattaa

SEQ ID NO: 214914 - DNA, 345 bp, Homo sapiens
caccctggcccgccatgccccatcctgtacctgtgaaaaccccgagaccttagtgggcacagacacaagcagctggacattgacaggaacacaccggcggaagaagacacaagcggctggatgtcgagaggaacgtaccggcgtaagagcacattgacagccccagcagactggcaggccatcaactggcagaacgacactaagtttggccagggtggtcggaggagagcctggccctgagtggaccgactcgaggggaaaaccaccttcccactccatctcccttctggctcccccatgggctgagggctacttccactgaataaaaccttgcactcattctcc

SEQ ID NO: 214915 - DNA, 638 bp, Homo sapiens
ccattcaccaagagaaattccagattgtgaactaaaaaagaaaaaaatgttgtaaaaactagaaagtagtattttttcttgggattggagaagttttttctaagaatacaagcaatgaaaccgaaaaccctattaaactcactcacctgcctttaatgccgtagtgtgcacaccccagcgtgtgtgtgtgtgtgtgtgtgtgtgtacatagacatatatattttaaaatgtttaaatttgaacatatgttaccaatacatataaagcaaaagtagaaaatcaaaaagatgaagtaaaaatgttttaaaatattgtttgtggtatttgtggttaataaacctttgctctttctaaaaaaatgttcttttagagagagtcatgattaaaaatgcttgtcatttttgaaactcctagttttaacactttataaaaacaacttaatgttcttaaggtaagtttattttcatgcttggttttaatgactattgtagctgaataagtcacttcattaattaagatctgtggatccaaatatggctgtgcttactgaaaatatttttgagttccatccaccaattttgcaaaagtgtgttgttgaaatttttataataaattttcatcttttccaatgtcagtaa

SEQ ID NO: 214916 - DNA, 471 bp, Homo sapiens
tactattggcaaacagaggaaaaagaacttggaagacactgcttcattatgataccttggtaataaatgcagaggatctaaaaaggtgatgaatttcaagagaaagagtatttacattctcaaagtagttctggaacaaaagctaaataaacctcacatagccatatcctaggatcacagctgaaataaaagggccagatgtggtggctcacacctgcaatcacagcactttgggagactgaggcaggaggatcacttgaggccagtagtttgaaacaagccttggcagcatggtgagaccccagctctatcaaaaaattaaaaaaattagccaggtgtggtggccaatctggaggccaacgcaggaggatcacttgagcccaggagttggaggctgtagtgagctatgattgtgccactgccctgggcaacagagggagactcggtctctaaaaataatgatagtaataa

SEQ ID NO: 214917 - DNA, 385 bp, Homo sapiens
tctgattaatcctgaaatgaagcctttcacaaatggataataacttgttggtttggaggaagcatgggtgttcataaacaaaggcatggcagtaatacagctgagggagatggagcggagggcgacggaacagatcgagagagcaacctcagagtatgcacccagcacacaagaacggcaaaataaatgcttgaagttttattaatgaagcaaacatggcattggccaccctgatttttgccacgctgtgttcctaaaagccacactataaagtggatcctattttcccttaggaacaatgttgtaattacgggttctgttccaagacctcatgttggtttcctataaattcaagacataatcaataaaatcttgtaaaaacaga

SEQ ID NO: 214918 - DNA, 447 bp, Homo sapiens
cagcaggaaaccacagaaaatggctgattgcaagggaaaactctagacagtagatctgtagaaagcattcgcgacctcaggaagcataagatacagccttttaacaaaataacagccttgcagatcaagagttatgcaaaataatttacagtcataatgatacatcaatgatcaagaaaaaaataaggacattttcttgtggaaagtgttgacatgttaaaagcattttggtcaaaaagaaccaacacttcagtttggtcctttaaaggaatccaaccaaattgaggggttggatagctgtttgggcagcccttataaggagttttgtttatattgtgtcaagatagaggtttccacaggtgtcttatataagtggcaaatataaattgatcccattcttgctgaagtagacagtgccctcaagtggaattaaaacaaacacaccac

SEQ ID NO: 214919 - DNA, 438 bp, Homo sapiens
agattgcgccactgcactccaagaagaagaatttactacacagaatcttgattggtaaaaagtaaatatggaaaacagattttagcattcacatggtatgtagcatttattgaaacctcataggtcggggcatccttttatgaacgtagttgtattaattggtttgaataaatgagaaagtaagtctgcatgtttcaattataaaagtgtagtatatgcttataagaaactgaaaaatgtgttaacaagagaaaataggctggccatggtggcttacacctgtaatcccagcacttcagaaggccaaggcgggcggatgacctgaggtcgggagttcaagaccagcctgcctaacgtggcaaaaccccatctctattaaaaatacaaaaatggccaggcgtggtggctcaacacctgtaatcccaacactttgagagg

SEQ ID NO: 214920 - DNA, 350 bp, Homo sapiens
tcctgctggagacctcacttgagagctcagggttggggcccagcagtctgtgtctagcagccctccgcccgttctccagcacactgcaggccacttctgctcccacgcccatctcttcctgtgttttgttttgtttgacaccttctgtgtgcagggctctatgggttcctgcaggctaatctctaggcatgggaaacaccgatgattacctggggcaggggaggaggttgggagtgactgataattcaaggtttcttctgaggatgacgaaaacattctgaaactagatatggtgatggttgcacagctctgtaaatacgcgaaaacccttgaattgtacactttaaatg

SEQ ID NO: 214921 - DNA, 433 bp, Homo sapiens
caggtgctcctggttagccccctatgattggaaagtcgattttaagccattttaacttatgcagactctttcttggtcaagatactgtgaaccagtttggagggggcgccacttagcatctgagttgcatctctttcaggaaggattctaaccctccgattttgcttcagaatttttgccaaaccgggtccagcctctctgttgaagctgatctgcccacaccagttctgaaacaggagtcaatgttacttacctttcttgcttctaccaagcagtgatttctaacaccttctagtgtgaagacacctttatgatgtctgttttagaacggcacgtagtcattgtacttggtatagtgacagactatgagaaagctaccaggaatttaatatgaaaatgaatacattcataaataaattgcttatgtattcac

SEQ ID NO: 214922 - DNA, 326 bp, Homo sapiens
tattttcagatttgctgctgtttaaatcacttctggcttaattttaaatttataaaacatcttgtggtctgacaaagaattgtatctacttgtctgaggaaataacaagggcaggtaaaactattttgaggaactttatgaaatagaaaaagatgccaggagaatattaaaaatggccatgatgttaattctcctcatatgaattttttaggcttaacagagtttcaaagagaaatcctattgtaatttttttaaattggccagatgtttctaaaacttatccctggaagaagaaacaagtgagaataaatgagaaaatgttttta

SEQ ID NO: 214923 - DNA, 117 bp, Homo sapiens
gcttcgtataatacagaaagatttaaatacagaaaaaggaaaaatttcttctaccccccatgtcaactcctaggccttctttgcaaaagtagccagtgttaacactttcttatagat

SEQ ID NO: 214924 - DNA, 816 bp, Homo sapiens
gtgatctacccacctcgggctcccaaagtgctgggattacaggtgtgagccgctgtgccctggctgtttcttttcaaatagtagcatgatcacatttgcattttagctagtacactgtaccagcagttaggaaacagtgagggaaaagattagacccagttaagtcacaaaggtgactagggtttactattgcaatggtagagggatgggggagtacatttaggagggttgaatctacaggaaacctggtgatcaattggttgtgggaggtgagatagaaggaagcagcaaggaaagatgtccatgtttctgatttaggtggatggctgtgaaatttattgagaaggggaaagaggaagaagagaagatcggggaaggggagagtatgaatttagtatagaaacatgttgaggttaaggtgcctaggagataagtagaggtgtctgttagtctgaagctcagaggagaggcttggtctagagagctgaagatgattcatttattcagaaatatttattaattgcttcctgtggggctgttctaggtgttagagaaccagatgaagtcagtgctgctatggagcttttattctggtggtagagacaaacagtaagctagtaaataatgtaatttccgctggtaaggaccatgacgaataataaagttaggggatagtgagtgactgaggatatgggctagactgatacgaaatggaatttaacatcctgtcctttgtaagaagttgagggcggcctgtcagcagataataggtagtttaaacagtgagtttggtatccaaataattatacaaaaaaa

SEQ ID NO: 214925 - DNA, 671 bp, Homo sapiens
tggagtgcagtggcatgatctcggctctctgcaacctccatctcctgggctcaggtgactctcccacctcagcctcctgagtagctgggaccacaggcacaccaccacacctggcaaattttttgtaattttagtagagacgggatcttgctatgttgcccaggctggtctcaaactcctgggctcaagtgatccacctgcctcggcctcccaaagtgctaggattacaggtgtgagccaccacgttcagccccttctgcatttttccacggagctgcctcttataaaggttagcattggcactgatgaccacattccacaacttttaacttctgattccccttgcctttttctgaacccttgatatagatgactacccttctttttcttcctttaacttttgagaggttatgttctcttttataactcttcttctgttccctggtttgtcttctatacatgtaggcattctccaagttgttctcaaaattcatttcccctgtcttggatgcacaatctcattattttactgtgttaaagtcatatcatatgttcatttaaattacacaaatttatccagacattcagtcaaataaaagagagaaagaatatttagcaatagcaagtgcagtagtgctggcaattctgcttacactccgtttattgaatgt

SEQ ID NO: 214926 - DNA, 366 bp, Homo sapiens
tccaagtgtgctttcttttaaaaaagttatttaggcccatcctttataaacacccaagtagatggtctgatggggtcatggtaacaaagattcagcttctatctaggtggatggtaagacccgctaacatcttggcaaaccgtgttattgggccattaaggaccagtgcttgaattctggggctgaaaattcaacgtattcccttataagaaaatgtctgctcatgataagaagtcacacaaagtacaacctcactatagtacaggatttagaatctttatttctccatctcatcttaaacccattggaagttagcatggattagagggtcggttgactcttctcaatgacggggctggcatataa

SEQ ID NO: 214927 - DNA, 152 bp, Homo sapiens
tgaatgctgatgctttcctagggttctggggacatgaataaagtgacatttccttgatttttcccgctgcagtctcaggccgtaggattttctgttttgtgaaatgagttataacttgttcatattaaagtgagatagaaggatatccctct

SEQ ID NO: 214928 - DNA, 598 bp, Homo sapiens
atatacgtgcggtgtctctccaacactgaaccttcccgtgggccctcttacctccatctcacaggatcttggttaaattacttccaccaaagccttctctaagcttatccatctttccccacaactgggttaggtatccccagagtgattggatagtatcttctgcttactccaactgaggtacttattaccagcttgcttatctatctccctactcaatactaagagtatatgccttgttcacctaaattctactgtctagctcaacattttattgaatcaactaatcatcaaaaggcctaacaaattatttcacattcattaaaatacagctgtgcagtaaatacaagttatcagtgaaattttacctaccattaatgagtaataataggttctgttcaacaagttttccatttgacctgccatgttataaactagaaatattttaggatccttctgctacaaagtttttcaagaaactatttacaaatccattttatcttattacaacaggaatgagttactttccaaatttgttttaaacatgtagaagacacttagcacagggcagatgctcagtgaatgtcagttgtctcta

SEQ ID NO: 214929 - DNA, 568 bp, Homo sapiens
tcggcacgagggggtctcagtgttacccagactgaaatgcagtgtcttagtcacaggtgcaatcatagcacactgcagcctcaaactcctgccctcagacaattctcctgtctcagtctcttgagtagctgtgcctatgggcatgtaccaccatacttggcaacatacacttcttgacttcaaaactttctacaaagcaacagtaatcaagacagtgtggtactggcaaaatgatagacatacgaatcagtggcacagaattaagagttcataaataacctgtgtctatggtcaactgattttcaacaaaggtgttgagacaattcaatggagaaataatagtcttttcaacaaacggtggtgggataactggaaagccacatgtaaaagaatgatgttgaacacccagctcattaacatacacaaaaattaactaaaaaactgaccacagaacccaaaagtaagagctaaaactataaaactcttagaggagaacttaggggtaaatctttgtcaccttggattaggcaatggtttcttagatatgacaccaaaagcagaagtgatg

SEQ ID NO: 214930 - DNA, 525 bp, Homo sapiens
agttgcccaggctggtctcgaactcttgggctccagtgatatgcccacctcagcttcccaaagtgtggggattagaggcgtgagccaccacacctggcccatagcccttttttattgaagacaagtgcactctggcctgtagctgatttgcaagtgctttcagggaagcattagagtaaaacagaaaactatctgtagatgacaaaatacttaaaacggtgatgattaacctattactgataatcttaaaagtgaaagatctcctattgcaaggacgaaaaaccaaacaccgcatgtctcactcataggtggaaattaaacagtgagaacacttggacacaggaaggggaacatcacacaccaggtcctgttgtggggtggggggaggggggaggggtagcattaggagatacacctaatgtaaatgaccagttaatgggtgcagcacaccaacatggcacatgtatacatatgtaacaaacctgcacgttgtgcacatgtaccctagaacttaaagtataataa

SEQ ID NO: 214931 - DNA, 996 bp, Homo sapiens
taacagctgttctgtattcagagccgcacaatcaaggaaaaacacgatcggaggcgggccctggacaggaacaagaagggtgggcttgactgggcggcccgcggtcttggctcccctttcttccttctggctggccggccgcagggtagggggtccgtggacctcccggcctgtagggggcgtcgggcgcagcggaagggcctgctccggagcctggccagggctgcgcagtcatgatcaccgagaccgcggcggagcctacggtccctgcagtgcctgctgctgaggaggccaccgaagctcggggacgcgaggagccggcgtggccctggaaagacgccccgatccggacgctggtgcagcgcatccaccagctgcaggctgagcgcgcgcagggcttccgccgactggaggagtggttggcgccggtgcagggcctgagagcctgggggcgcggcctcagggtccccacatgccgcagaggccaccgccagtacctgcgcagcggccctgactacgacttcgcgcgctaccggagcacagtgcacggggtgacccaggccttcgccgccgcctcgcgggaggtgctggcggtggaagcagagctgggcgggcctcgcaggcagccgctgctcgccggccacgtgcgcagcctgcaggagctggagcagacgcggctgggcacggtggccctgctgcagttgatggagacgccagagctggcggggcaggaggacgctgtacggatgcagcagctgaaaatgaaggtaattaaaaccatggaggcgatcagcgaggttctccaggaccttaggtttgatgcggaatctgccgagtgatggcggctccccagggatgcgccgagggagatgggaaacggggcggatggcgcccagcccagccctaactgccagctggctggggttgcgccccactgcgctgctgaccttcctgcagttccagacacctcccacaataaagagctcctcctctgta

SEQ ID NO: 214932 - DNA, 930 bp, Homo sapiens
taacagctgttctgtattcagagccgcacaatcaaggaaaaacacgatcggaggcgggccctggacaggaacaagaagggtgggcttgactgggcggcccgcggtcttggctcccctttcttccttctggctggccggccgcagggtagggggtccgtggacctcccggcctgtagggggcgtcgggcgcagcggaagggcctgctccggagcctggccagggctgcgcagtcatgatcaccgagaccgcggcggagcctacggtccctgcagtgcctgctgctgaggaggccaccgaagctcggggacgcgaggagccggcgtggccctggaaagacgccccgatccggacgctggtgcagcgcatccaccagctgcaggctgagcgcgcgcagggcttccgccgactggaggaaggccaccgccagtacctgcgcagcggccctgactacgacttcgcgcgctaccggagcacagtgcacggggtgacccaggccttcgccgccgcctcgcgggaggtgctggcggtggaagcagagctgggcgggcctcgcaggcagccgctgctcgccggccacgtgcgcagcctgcaggagctggagcagacgcggctgggcacggtggccctgctgcagttgatggagacgccagagctggcggggcaggaggacgctgtacggatgcagcagctgaaaatgaaggtaattaaaaccatggaggcgatcagcgaggttctccaggaccttaggtttgatgcggaatctgccgagtgatggcggctccccagggatgcgccgagggagatgggaaacggggcggatggcgcccagcccagccctaactgccagctggctggggttgcgccccactgcgctgctgaccttcctgcagttccagacacctcccacaataaagagctcctcctctgta

SEQ ID NO: 214933 - DNA, 1505 bp, Homo sapiens
taacagctgttctgtattcagagccgcacaatcaaggaaaaacacgatcggaggcgggccctggacaggaacaagaagggtgggcttgactgggcggcccgcggtcttggctcccctttcttccttctggctggccggccgcagggtagggggtccgtggacctcccggcctgtagggggcgtcgggcgcagcggaagggcctgctccggagcctggccagggctgcgcagtcatgatcaccgagaccgcggcggagcctacggtccctgcagtgcctgctgctgaggaggccaccgaagctcggggacgcgaggagccggcgtggccctggaaagacgccccgatccggacgctggtgcagcgcatccaccagctgcaggctgagcgcgcgcagggcttccgccgactggaggaaggccaccgccagtacctgcgcagcggccctgactacgacttcgcgcgctaccggagcacagtgcacggggtgacccaggccttcgccgccgcctcgcgggaggtgctggcggtggaagcagagctgggcgggcctcgcaggcagccgctgctcgccggccacgtgcgcagcctgcaggagctggagcagacgcggctgggcacggtggccctgctgcagttgatggagacgccagagctggcggggcaggaggacgctgtacggatgcagcagctgaaaatgaaggtaattaaaaccatggaggcgatcagcgaggttctccaggaccttaggtttgatgcggaatctgccgagtgatggcggctccccagggatgcgccgagggagatgggaaacggggcggatggcgcccagcccagccctaactgccagctggctggggttgcgccccactgcgctgctgaccttcctgcagttccagacacctcccacaataaagagctcctcctctgtaaaaaaaaaaaaaaaaaaaaaaaaaaaaaaaaaaaaaaaaaaaaaacaaaaaaaaagaaaaaaaacacaaaagcaaaaatagaaaacaaaaaaaggggggggggcgctatgattggataatctttccctgcgcgggggcgacactatatcgtacatcaccagcagtttttatgccaggaggggtgtccacaattagggagggcatcattgtaagacccgcggggagagcgggcgcgcctttatatacaaccgtgtcagaatgggggaaaacgacggccataccgcacgcgtcctgtcggagaagaaggaaaactcacatatggggggaggtggtcgacacattattcgagggagccgcgcaccaccagctaaacaacaaaactaacaccacataccccgcgcgacgacgacacacatcaacaatcaagctacccaaaacaacaatacttactagatcactcctacaaccacaccaagccctattcctcctccaccacctataacacaaaaacatactaaaatatcaaaaaaatcaacaaataattctatccctaacaaaaaaattataacaatacg

SEQ ID NO: 214934 - DNA, 1047 bp, Homo sapiens
taacagctgttctgtattcagagccgcacaatcaaggaaaaacacgatcggaggcgggccctggacaggaacaagaagggtgggcttgactgggcggcccgcggtcttggctcccctttcttccttctggctggccggccgcagggtagggggtccgtggacctcccggcctgtagggggcgtcgggcgcagcggaagggcctgctccggagcctggccagggctgcgcagtcatgatcaccgagaccgcggcggagcctacggtccctgcagtgcctgctgctgaggaggccaccgaagctcggggacgcgaggagccggcgtggccctggaaagacgccccgatccggacgctggtgcagcgcatccaccagctgcaggctgagcgcgcgcagggcttccgccgactggaggagtggttggcgccggtgcagggcctgagagcctgggggcgcggcctcagggtccccacatgccgcagaggccaccgccagtacctgcgcagcggccctgactacgacttcgcgcgctaccggagcacagtgcacggggtgacccaggccttcgccgccgcctcgcgggaggtgctggcggtggaagcagagctgggcgggcctcgcaggcagccgctgctcgccggccacgtgcgcagcctgcaggagctggagcagacgcggctgggcacggtggccctgctgcagttgatggagacgccagagctggcggggcaggaggacgctgtacggatgcagcagctgaaaatgaaggtaattaaaaccatggaggcgatcagcgaggttctccaggaccttaggtttgatgcggaatctgccgagtgatggcggctccccagggatgcgccgagggagatgggaaacggggcggatggcgcccagcccagccctaactgccagctggctggggttgcgccccactgcgctgctgaccttcctgcagttccagacacctcccacaataaagagctcctcctctgtaaaaaaaaaagggggcgtaaattcccaggccaatccgtccagtctgacaggc

SEQ ID NO: 214935 - DNA, 725 bp, Homo sapiens
taacagctgttctgtattcagagccgcacaatcaaggaaaaacacgatcggaggcgggccctggacaggaacaagaagggtgggcttgactgggcggcccgcggtcttggctcccctttcttccttctggctggccggccgcagggtagggggtccgtggacctcccggcctgtagggggcgtcgggcgcagcggaagggcctgctccggagcctggccagggctgcgcagtcatgatcaccgagaccgcggcggagcctacggtccctgcagtgcctgctgctgaggaggccaccgaagctcggggacgcgaggagccggcgtggccctggaaagacgccccgatccggacgctggtgcagcgcatccaccagctgcaggctgagcgcgcgcagggcttccgccgactggaggagtggccctgctgcagttgatggagacgccagagctggcggggcaggaggacgctgtacggatgcagcagctgaaaatgaaggtaattaaaaccatggaggcgatcagcgaggttctccaggaccttaggtttgatgcggaatctgccgagtgatggcggctccccagggatgcgccgagggagatgggaaacggggcggatggcgcccagcccagccctaactgccagctggctggggttgcgccccactgcgctgctgaccttcctgcagttccagacacctcccacaataaagagctcctcctctgta

SEQ ID NO: 214936 - DNA, 1331 bp, Homo sapiens
taacagctgttctgtattcagagccgcacaatcaaggaaaaacacgatcggaggcgggccctggacaggaacaagaagggtgggcttgactgggcggcccgcggtcttggctcccctttcttccttctggctggccggccgcagggtagggggtccgtggacctcccggcctgtagggggcgtcgggcgcagcggaagggcctgctccggagcctggccagggctgcgcagtcatgatcaccgagaccgcggcggagcctacggtccctgcagtgcctgctgctgaggaggccaccgaagctcggggacgcgaggagccggcgtggccctggaaagacgccccgatccggacgctggtgcagcgcatccaccagctgcaggctgagcgcgcgcagggcttccgccgactggaggagtgagtgggggcgcggaggggctcagggttcggtcccccgcccgctccgggcgtgggcgtgttctcggcgggcgtgcctggaggaggagctgggtccttgtgtggctgcagagtcagatggggcggggatttcggggcaccgggtcctcaccttcacgaaaaaggccccacagcacgtccccactacccgacgactcactcttcgtggcttctctctcctccccaagagcaggggtgggcctgtctcgcgttcccctgcgggagtcaggaagcgtccttcctacctaccagtcctcccctctggtgtctggggacacttcctgggggcctttcaggtggttggcgccggtgcagggcctgagagcctgggggcgcggcctcagggtccccacatgccgcagaggccaccgccagtacctgcgcagcggccctgactacgacttcgcgcgctaccggagcacagtgcacggggtgacccaggccttcgccgccgcctcgcgggaggtgctggcggtggaagcagagctgggcgggcctcgcaggcagccgctgctcgccggccacgtgcgcagcctgcaggagctggagcagacgcggctgggcacggtggccctgctgcagttgatggagacgccagagctggcggggcaggaggacgctgtacggatgcagcagctgaaaatgaaggtaattaaaaccatggaggcgatcagcgaggttctccaggaccttaggtttgatgcggaatctgccgagtgatggcggctccccagggatgcgccgagggagatgggaaacggggcggatggcgcccagcccagccctaactgccagctggctggggttgcgccccactgcgctgctgaccttcctgcagttccagacacctcccacaataaagagctcctcctctgta

SEQ ID NO: 214937 - DNA, 1425 bp, Homo sapiens
taacagctgttctgtattcagagccgcacaatcaaggaaaaacacgatcggaggcgggccctggacaggaacaagaagggtgggcttgactgggcggcccgcggtcttggctcccctttcttccttctggctggccggccgcagggtagggggtccgtggacctcccggcctgtagggggcgtcgggcgcagcggaagggcctgctccggagcctggccagggctgcgcagtcatgatcaccgagaccgcggcggagcctacggtccctgcagtgcctgctgctgaggaggccaccgaagctcggggacgcgaggagccggcgtggccctgggtgagcccaggcccaagcgggaacgggcgcggggcgggcggcgcagacccaggggcgcgggcttcatgccccagccgtgccccctgtcccgcagaaagacgccccgatccggacgctggtgcagcgcatccaccagctgcaggctgagcgcgcgcagggcttccgccgactggaggagtgagtgggggcgcggaggggctcagggttcggtcccccgcccgctccgggcgtgggcgtgttctcggcgggcgtgcctggaggaggagctgggtccttgtgtggctgcagagtcagatggggcggggatttcggggcaccgggtcctcaccttcacgaaaaaggccccacagcacgtccccactacccgacgactcactcttcgtggcttctctctcctccccaagagcaggggtgggcctgtctcgcgttcccctgcgggagtcaggaagcgtccttcctacctaccagtcctcccctctggtgtctggggacacttcctgggggcctttcaggtggttggcgccggtgcagggcctgagagcctgggggcgcggcctcagggtccccacatgccgcagaggccaccgccagtacctgcgcagcggccctgactacgacttcgcgcgctaccggagcacagtgcacggggtgacccaggccttcgccgccgcctcgcgggaggtgctggcggtggaagcagagctgggcgggcctcgcaggcagccgctgctcgccggccacgtgcgcagcctgcaggagctggagcagacgcggctgggcacggtggccctgctgcagttgatggagacgccagagctggcggggcaggaggacgctgtacggatgcagcagctgaaaatgaaggtaattaaaaccatggaggcgatcagcgaggttctccaggaccttaggtttgatgcggaatctgccgagtgatggcggctccccagggatgcgccgagggagatgggaaacggggcggatggcgcccagcccagccctaactgccagctggctggggttgcgccccactgcgctgctgaccttcctgcagttccagacacctcccacaataaagagctcctcctctgta

SEQ ID NO: 214938 - DNA, 1906 bp, Homo sapiens
taacagctgttctgtattcagagccgcacaatcaaggaaaaacacgatcggaggcgggccctggacaggaacaagaagggtgggcttgactgggcggcccgcggtcttggctcccctttcttccttctggctggccggccgcagggtagggggtccgtggacctcccggcctgtagggggcgtcgggcgcagcggaagggcctgctccggagcctggccagggctgcgcagtcatgatcaccgagaccgcggcggagcctacggtccctgcagtgcctgctgctgaggaggccaccgaagctcggggacgcgaggagccggcgtggccctggaaagacgccccgatccggacgctggtgcagcgcatccaccagctgcaggctgagcgcgcgcagggcttccgccgactggaggagtgagtgggggcgcggaggggctcagggttcggtcccccgcccgctccgggcgtgggcgtgttctcggcgggcgtgcctggaggaggagctgggtccttgtgtggctgcagagtcagatggggcggggatttcggggcaccgggtcctcaccttcacgaaaaaggccccacagcacgtccccactacccgacgactcactcttcgtggcttctctctcctccccaagagcaggggtgggcctgtctcgcgttcccctgcgggagtcaggaagcgtccttcctacctaccagtcctcccctctggtgtctggggacacttcctgggggcctttcaggtggttggcgccggtgcagggcctgagagcctgggggcgcggcctcagggtccccacatgccgcagaggccaccgccagtacctgcgcagcggccctgactacgacttcgcgcgctaccggagcacagtgcacggggtgacccaggccttcgccgccgcctcgcgggaggtgctggcggtggaagcagagctgggcgggcctcgcaggcagccgctgctcgccggccacgtgcgcagcctgcaggagctggagcagacgcggctgggcacggtggccctgctgcagttgatggagacgccagagctggcggggcaggaggacgctgtacggatgcagcagctgaaaatgaaggtaattaaaaccatggaggcgatcagcgaggttctccaggaccttaggtttgatgcggaatctgccgagtgatggcggctccccagggatgcgccgagggagatgggaaacggggcggatggcgcccagcccagccctaactgccagctggctggggttgcgccccactgcgctgctgaccttcctgcagttccagacacctcccacaataaagagctcctcctctgtaaaaaaaaaaaaaaaaaaaaaaaaaaaaaaaaaaaaaaaaaaaaaacaaaaaaaaagaaaaaaaacacaaaagcaaaaatagaaaacaaaaaaaggggggggggcgctatgattggataatctttccctgcgcgggggcgacactatatcgtacatcaccagcagtttttatgccaggaggggtgtccacaattagggagggcatcattgtaagacccgcggggagagcgggcgcgcctttatatacaaccgtgtcagaatgggggaaaacgacggccataccgcacgcgtcctgtcggagaagaaggaaaactcacatatggggggaggtggtcgacacattattcgagggagccgcgcaccaccagctaaacaacaaaactaacaccacataccccgcgcgacgacgacacacatcaacaatcaagctacccaaaacaacaatacttactagatcactcctacaaccacaccaagccctattcctcctccaccacctataacacaaaaacatactaaaatatcaaaaaaatcaacaaataattctatccctaacaaaaaaattataacaatacg

SEQ ID NO: 214939 - DNA, 1277 bp, Homo sapiens
taacagctgttctgtattcagagccgcacaatcaaggaaaaacacgatcggaggcgggccctggacaggaacaagaagggtgggcttgactgggcggcccgcggtcttggctcccctttcttccttctggctggccggccgcagggtagggggtccgtggacctcccggcctgtagggggcgtcgggcgcagcggaagggcctgctccggagcctggccagggctgcgcagtcatgatcaccgagaccgcggcggagcctacggtccctgcagtgcctgctgctgaggaggccaccgaagctcggggacgcgaggagccggcgtggccctggaaagacgccccgatccggacgctggtgcagcgcatccaccagctgcaggctgagcgcgcgcagggcttccgccgactggaggagtgagtgggggcgcggaggggctcagggttcggtcccccgcccgctccgggcgtgggcgtgttctcggcgggcgtgcctggaggaggagctgggtccttgtgtggctgcagagtcagatggggcggggatttcggggcaccgggtcctcaccttcacgactctcctccccaagagcaggggtgggcctgtctcgcgttcccctgcgggagtcaggaagcgtccttcctacctaccagtcctcccctctggtgtctggggacacttcctgggggcctttcaggtggttggcgccggtgcagggcctgagagcctgggggcgcggcctcagggtccccacatgccgcagaggccaccgccagtacctgcgcagcggccctgactacgacttcgcgcgctaccggagcacagtgcacggggtgacccaggccttcgccgccgcctcgcgggaggtgctggcggtggaagcagagctgggcgggcctcgcaggcagccgctgctcgccggccacgtgcgcagcctgcaggagctggagcagacgcggctgggcacggtggccctgctgcagttgatggagacgccagagctggcggggcaggaggacgctgtacggatgcagcagctgaaaatgaaggtaattaaaaccatggaggcgatcagcgaggttctccaggaccttaggtttgatgcggaatctgccgagtgatggcggctccccagggatgcgccgagggagatgggaaacggggcggatggcgcccagcccagccctaactgccagctggctggggttgcgccccactgcgctgctgaccttcctgcagttccagacacctcccacaataaagagctcctcctctgta

SEQ ID NO: 214940 - DNA, 1761 bp, Homo sapiens
taacagctgttctgtattcagagccgcacaatcaaggaaaaacacgatcggaggcgggccctggacaggaacaagaagggtgggcttgactgggcggcccgcggtcttggctcccctttcttccttctggctggccggccgcagggtagggggtccgtggacctcccggcctgtagggggcgtcgggcgcagcggaagggcctgctccggagcctggccagggctgcgcagtcatgatcaccgagaccgcggcggagcctacggtccctgcagtgcctgctgctgaggaggccaccgaagctcggggacgcgaggagccggcgtggccctggaaagacgccccgatccggacgctggtgcagcgcatccaccagctgcaggctgagcgcgcgcagggcttccgccgactggaggagtgagtgggggcgcggaggggctcagggttcggtcccccgcccgctccgggcgtgggcgtgttctcggcgggcgtgcctggaggaggagctgggtccttgtgtggctgcagagtcagatggggcggggatttcggggcaccgggtcctcaccttcacgaaaaaggccccacagcacgtccccactacccgacgactcactcttcgtggcttctctctcctccccaagagcaggggtgggcctgtctcgcgttcccctgcgggagtcaggaagcgtccttcctacctaccagtcctcccctctggtgtctggggacacttcctgggggcctttcaggtggttggcgccggtgcagggcctgagagcctgggggcgcggcctcagggtccccacatgccgcagaggccaccgccagtacctgcgcagcggccctgactacgacttcgcgcgctaccggagcacagtgcacggggtgacccaggccttcgccgccgcctcgcgggaggtgctggcggtggaagcagagctgggcgggcctcgcaggcagccgctgctcgccggccacgtgcgcagcctgcaggagctggagcagacgcggctgggcacggtggccctgctgcagttgatggagacgccagagctggcggggcaggaggacgctgtacggatgcagcagctgaaaatgaaggtaattaaaaccatggaggcgatcagcgaggttctccaggaccttaggtttgatgcggaatctgccgagtgatggcggctccccagggatgcgccgagggagatgggaaacggggcggatggcgcccagcccagccctaactgccagctggctggggttgcgccccactgcgctgctgaccttcctgcagttccagacacctcccacaataaagagctcctcctctgtagccgctctgccatctctgtgtacaagggtgctgcagccagtgtgcctagggagggggcccccacagggccagggattgtgggtagaagactcccaccctccctagaaactgaggtttttttgcttgagacagggtcttgctgtgtcacccagactggagtgcagtggcgagatcgtggctcactgcagccttgacttccccaggctcaagcagtcctcctgcctcagcctcccaagtagctgggactacaggcacatgccaccacaagcccagttaattttttttttttttgagatagagttttgctctttttgcccaggctggagtacaatggtacgatctcggctcactgcaatctgcacctcctgggttcaagtgattcgcctgcctcagcctcctgagtagttgggatcacaggcatgcaccacca

SEQ ID NO: 214941 - DNA, 1350 bp, Homo sapiens
taacagctgttctgtattcagagccgcacaatcaaggaaaaacacgatcggaggcgggccctggacaggaacaagaagggtgggcttgactgggcggcccgcggtcttggctcccctttcttccttctggctggccggccgcagggtagggggtccgtggacctcccggcctgtagggggcgtcgggcgcagcggaagggcctgctccggagcctggccagggctgcgcagtcatgatcaccgagaccgcggcggagcctacggtccctgcagtgcctgctgctgaggaggccaccgaagctcggggacgcgaggagccggcgtggccctggaaagacgccccgatccggacgctggtgcagcgcatccaccagctgcaggctgagcgcgcgcagggcttccgccgactggaggagtgagtgggggcgcggaggggctcagggttcggtcccccgcccgctccgggcgtgggcgtgttctcggcgggcgtgcctggaggaggagctgggtccttgtgtggctgcagagtcagatggggcggggatttcggggcaccgggtcctcaccttcacgaaaaaggccccacagcacgtccccactacccgacgactcactcttcgtggcttctctctcctccccaagagcaggggtgggcctgtctcgcgttcccctgcgggagtcaggaagcgtccttcctacctaccagtcctcccctctggtgtctggggacacttcctgggggcctttcaggtggttggcgccggtgcagggcctgagagcctgggggcgcggcctcagggtccccacatgccgcagaggccaccgccagtacctgcgcagcggccctgactacgacttcgcgcgctaccggagcacagtgcacggggtgacccaggccttcgccgccgcctcgcgggaggtgctggcggtggaagcagagctgggcgggcctcgcaggcagccgctgctcgccggccacgtgcgcagcctgcaggagctggagcagacgcggctgggcacggtggccctgctgcagttgatggagacgccagagctggcggggcaggaggacgctgtacggatgcagcagctgaaaatgaattcccatccgctcttgtagggtaattaaaaccatggaggcgatcagcgaggttctccaggaccttaggtttgatgcggaatctgccgagtgatggcggctccccagggatgcgccgagggagatgggaaacggggcggatggcgcccagcccagccctaactgccagctggctggggttgcgccccactgcgctgctgaccttcctgcagttccagacacctcccacaataaagagctcctcctctgta

SEQ ID NO: 214942 - DNA, 382 bp, Homo sapiens
agtgttccctcttgctgctagtgctgcctggaggtttggcggcgggcaggagggcctggggctcaccacagccacagccctcttgcagcttcgcggcagcagctaattcaccccatctgggttttatttatagttcccatccgctcttgtagggtaattaaaaccatggaggcgatcagcgaggttctccaggaccttaggtttgatgcggaatctgccgagtgatggcggctccccagggatgcgccgagggagatgggaaacggggcggatggcgcccagcccagccctaactgccagctggctggggttgcgccccactgcgctgctgaccttcctgcagttccagacacctcccacaataaagagctcctcctctgta

SEQ ID NO: 214943 - DNA, 348 bp, Homo sapiens
gatcggactcttgaggatcccccgtccttcatcatacctacccagcacggggagagcacagatgaagaactcagcaaatacacagaaagcacatatcacatgcaaaggccctggggctagagtgaatttgatgatcaagagacagtgagtagaggatgggtcagtaggtgtgcagcaaaccaccatggcacatgtatacctgtgtaacaaaacctacacgttctgcacatgtatcccagaacttaaagtggaaaaaaaaaaaggggaaagaaggaaggaaggaaggagaaagaaagaaggaaggaaggaaaaaaaggtaggtataatgacacggccgggggaaccctc

SEQ ID NO: 214944 - DNA, 464 bp, Homo sapiens
  misc_feature (431)..(431): n is a, c, g, or t
  misc_feature (464)..(464): n is a, c, g, or t
gatcggactcttgaggatcccccgtccttcatcatacctacccagcacggggagagcacagatgaagaactcagcaaatacacagaaagcacatatcacatgcaaaggccctggggctagagtgaatttgatgatcaagagacagtgagtagaggatgggtcagtaggtgtgcagcaaaccaccatggcacatgtatacctgtgtaacaaaacctacacgttctgcacatgtatcccagaacttaaagtggaaaaaaaaaaaggggaaagaaggaaggaaggaaggagaaagaaagaaggaaggaaggaaaaaaaggtaggaaagaaggaaggagaaagaaagagagagagaaagaaagaaagaaaagaaagaaaaagaagaaagaaagaaagaaaagaaaagaaggaaagaaaaaagaaaggatgagagnatatcttctcgagaccggggtgtattaagctcn

SEQ ID NO: 214945 - DNA, 289 bp, Homo sapiens
ggtaacaagatacctatgcaagctgaaaaactcttggctttttagtttgtatcacttccagaaacttttagatgctacgtatagaagtggctttcttttagggttaggtaagatacttccttttttggaaatagttttgccatttggtctcgctgcctgatttgtgctttttcttcttcagcaggtagtgggaggctgtgtattgtattgccttttaccagacacccagaggggtcatgttggaaaatagcatcctcttagcaaaaacacaatcccttctctgagaata

SEQ ID NO: 214946 - DNA, 421 bp, Homo sapiens
tctcaaaataaggagcaataattcaaagaggcagaaatcatgagcaaaaagatagcagacttggaagaaagatccaggagacctacatgcaaatatcagaaaaacataagagcacagatcaaggagaggcaaagttagttaaaattagatttattcaagtcagcagatggaaatgtattaccaaggtccacacacttagacatattctggtaagatttctgaactccaaggattaagacaaatcttataaatacagagacagaaagatcaactatgcaaatatctatctatagacacatacatatacatatagaagaggaagaagaagaagaggaagaagaggaagaagaagaagaagaaaagaagaagaaggagaagaagaagaagaaagaagcagcagcagaagaagaagaagaagagg

SEQ ID NO: 214947 - DNA, 357 bp, Homo sapiens
ttatatagtttctcaagcttaggtctttttaaaaataattgttgaaagggaagaggcacattgttttaaaaaatctgaatgtagaatctttgttttaacaagacctggaaagtagatagagtagggttgtaaggtaaaagaaaagttaacttaaaacacattgaatttttaacttttccccacgaggaagcaacggttataacattgttcttgatacaggtagagacagatagatttagattttctttaaggcactcactagtcagagagagaaataagatatgtaatttccaattaagtgaagatttctagaaaggaatgaagaaaacttcatttggtaaaacaaaacataacaaa

SEQ ID NO: 214948 - DNA, 755 bp, Homo sapiens
aatgggaaatgcaggtcaaagaattcaaaacagcagatgtgtatgatgaacaagtttagacatctatcgtacaacatgagaactaaagttaataaaattatattgtatgtcagggttttttgttaaataagtggattttagctgctgtcttatcaccaaaaattaactatctgagatgatagatatgttaatatccttcactactgtaacttttctattaatatatgtatcctacaacatgttgtaaacctcaaatatatacaataaaatttattttaaaataataaaaatattgacagtacaacagagtgactatagtcaataataacttaactgtacattttaaaataactaaaagagggtaattgggccgggcacggtggctcaagcctgtaatcccagcactttgggaggctgaggcgggtggatcacctgagatcaggagtttgagaccagcctggccaatatggtgaaactctgtctctactaaaaatacaaaaattagctgggccatggtggtggatgcctgcaatcccagctactccggaggctgaggcaggtcggttgtacctcagcagccgatgctgaaccgagctgagatcaagccactgcacttcattcaggctgggcagacagtgagattccgctcaaagcctcacccatctccctcacaccacaacatgtccgcctgcttggtccacccgattctgcatcggacaagcttatcattgcgcccgctcgcgctacttggcccc

SEQ ID NO: 214949 - DNA, 661 bp, Homo sapiens
aatgggaaatgcaggtcaaagaattcaaaacagcagatgtgtatgatgaacaagtttagacatctatcgtacaacatgagaactaaagttaataaaattatattgtatgtcagggttttttgttaaataagtggattttagctgctgtcttatcaccaaaaattaactatctgagatgatagatatgttaatatccttcactactgtaacttttctattaatatatgtatcctacaacatgttgtaaacctcaaatatatacaataaaatttattttaaaataataaaaatattgacagtacaacagagtgactatagtcaataataacttaactgtacattttaaaataactaaaagagggtaattgggccgggcacggtggctcaagcctgtaatcccagcactttgggaggctgaggcgggtggatcacctgagatcaggagtttgagaccagcctggccaatatggtgaaactctgtctctactaaaaatacaaaaattagctgggccatggtggtggatgcctgcaatcccagctactccggaggctgaggcagaagaatcacttgaacccaggaggcggggttgcagtgagccgagatcatgccactgcactccagcctgggcaacagagcgagactccttctcaaaaaaaaaaa

SEQ ID NO: 214950 - DNA, 675 bp, Homo sapiens
gttgcattcttttgagtctttgatcagcttttcacttaatacacaatttacatgtgagagagggatagaagaatagtcacttatgccttagtcggctaaatgaatctgcgattttacatacacagtagggcagaggaagcagtcagttacgcatttgtctcaggtgggtagaggggtgactttgagttctgtcctttgtcccatacctgtgaagataagctatcaatttacattgccagggtgaaatacaacagaactgttttagagtgaaggtcttgaggcccacaaggaatttccttgggggcaaattgtcagggaggtatgtagctttttttttttttttttttaatctttgtagctatcttattcaggaataaaatgagaggcagttttgctcgatgcaattcccagcttgacttttctttttggcttagtgattttggggtcctgagatttatttttcctttcacaaactcatgggtagtgcagtcctgtaatttgcttaaattcctgtaaaccaagaaagtacctgagacaggtctcaatcagtttagaagtttattttgccaaggttaaggatatgcctgtgacagcctcaggaagtcctgatgacatgtgcccgaggtggtcaggctacagcttggttttatacattttagggagacagaagacatc

SEQ ID NO: 214951 - DNA, 360 bp, Homo sapiens
cacagtggctcacacatgtaatccatttagccaaaaaattagccagatgtggtggcgcatgcctatagtcccagctactcaggaggctgaggcgtgagagttgctccacccgggaggtggaggttgcagtgaggcgagatcacaccactgcactctagcctgggcaacaacacaagactctgtctcaagacataagactttccatatcttaacatggcagaagagctgaaaagtttggttacttgaagttcttctatatgctttccttgttactttaagcaaacaccacaaagggtttcacatgtctgcttccccgcccaggaactgtgtgtgtgtctttctttcccccattcctgttcc

SEQ ID NO: 214952 - DNA, 857 bp, Homo sapiens
atcctaggtagtgggctctattgatgttgatcattttacccagataagaaaactgagacacaggtgcccacagccagccacagagctaggattcaagccaggtcatctgactctagattccagcctccccacagtctcccaggggcacgtagcctcagaggagcttcctgtctgttaccagagagaagccctgtgcctaagaaactgaagcagcaggtaaagggacaggtgacctaaaagaagacaaaattgctgggagatccccggagatcccaggcaccactgatggtgccttcaaaagcttggctcagagatctcttggagcagcctggagtcaggggcctagcttaaattccagttcagccacttgctagcaggctgtgggaccttgagcaagccacagaatgttcctgggtctctttcttcttctgaaaatggaaactttgcaaactataaagactcaagcaaatgaaagccagaggatagtaaatccaagatctggttctttgaaaggtccaaaaaataataataataacctcctcatgaggctgatggaaaaaaagagatagaaaaaaaaaatgcaagattcggaataaaaaaggaatcataaaaagagtaattatagccaggcaccatggtggtacacaactgtagtcccagctacttgagaggctgaggcaggaggctcacttgaggctgtagtgtgctatgatcacacctgtgaatagccacagcagtctagcctgagcaacatatcaagaccccgtctcttaaaaaaaaaaaagaacagtaattatgattacatattttttaaatgagagtaatatggcaaaaatttgaaaaattagagaaatgga

SEQ ID NO: 214953 - DNA, 726 bp, Homo sapiens
atcctaggtagtgggctctattgatgttgatcattttacccagataagaaaactgagacacaggtgcccacagccagccacagagctaggattcaagccaggtcatctgactctagattccagcctccccacagtctcccaggggcacgtagcctcagaggagcttcctgtctgttaccagagagaagccctgtgcctaagaaactgaagcagcaggtaaagggacaggtgacctaaaagaagacaaaattgctgggagatccccggagatcccaggcaccactgatggtgccttcaaaagcttggctcagagatctcttggagcagcctggagtcaggggcctagcttaaattccagttcagccacttgctagcaggctgtgggaccttgagcaagccacagaatgttcctgggtctctttcttcttctgaaaatggaaactttgcaaactataaagactcaagcaaatgaaagccagaggatagtaaatccaagatctggttctttgaaaggtccaaaaaataataataatatagtccaacgtctagtagttgcaaactaccatgtctgagaggaaaaaagcactggatattataaacagcagattacatattgtagaaaaaaccgtgaactttagacatagcaacagcaattactttacaaacacatagggcaaatactgtacttaaaagaataacacagcatctacagccttgggacacttc

SEQ ID NO: 214954 - DNA, 340 bp, Homo sapiens
acgtacatatgtgaaaactaatgaaattgtactcttaagatgtgtgcatatttactgtgtgccaattatacttcatttagaaatatctggagagagagacatagaaatttctgaattctttcctaaatagaaaagaattccatgcagcttaaatatcgttgcaagtattgatgcttatacctttagaaagcccattatgcttctgaaaaatgcacttactacttaatatcatacataatagaaagctaacattttgtattaacggaatctggaaaacatattgtactacacatttgaaattacagatttactaactagtaaagataactatttaagaact

SEQ ID NO: 214955 - DNA, 182 bp, Homo sapiens
ctgaaccgaccattaggcagaaaatcctttgagtcaatgcctctcactgaatccacttctcatcctgtccacctgcctgctttgcagtgcagagtaaagtgggccttccttgactctcttcagggaccaatgtgcttgaggccatcatgaggactttctttttttttttttttttttttttt

SEQ ID NO: 214956 - DNA, 279 bp, Homo sapiens
ttcttgtggaagccaaaacaattccatcttggatgctaatccttcatgttgacttctgattaacccttgttcctagaaggcctctaagatttccagtttatctatagtttcttgggtaacagcacgtacttaccataaatcctaccccttaggtcaaagcaatcttgattgtatcatacttcagttgtcctacatgtcctttctgaatcacatataccccttccttatgatataaacgtattacttgatggtctacccgtagtagtattaatcatttta

SEQ ID NO: 214957 - DNA, 416 bp, Homo sapiens
ggttggaggagacatgggactctggtcccagtaatgaggacaagaaaagaaaggggaaaccggagaagtggacatttctggtcgagcaggaaaagtgagtggcagggcaaccactaagacaaagtgatggaaggaagtggggagggcgggagagtctggagggaaagattcgctcaggaggctgagagaagaggaggaagaaagacccagactgcagtgagtttgcagtcagtccctatcacgtccagaaaagcccagagataagggatggaaaagaattgggttggaggaagagaggagaagatttatgactgtcaagaccagagaaatcagcaggagaaaaactaccaacaagagtaattcctaagaaggccgggcgcattgactcacgcctgtaatcccaacgctttgggagg

SEQ ID NO: 214958 - DNA, 563 bp, Homo sapiens
cagacgtggttctggccctcatcatttgcaatgcagttggagagatggggctgggtagcacctgaccagcgatatgtggttaataagacatagaagagggaaaataccacgtggtctggggtgatcaggcattgaaggagatttgacttagctctttgcagaggagggtagcctcacagacaggcaggaatgaataggcagatctagctggggctgcggattttggtaggaaagatttggaggccccaaaacaccttgcctagatgtttcaatgagatgagttatagccaaaggtacttcagcttggaaattgtgtttttgttttttttttttgataaaaatatattcatttatcgacagtgtgtggtatctgttggcatgagaaaagatttaagagacgatatattgattagttgtgtatctttagaatcaaatgagaaaatgtgaaagtgcttggaaaatagtaaattgatgtataaatgaaagttttacattatcatgtgtaacagtttgttatataatagagttgtgtgatgtcaggaataaaagaagctggtgaaatt

SEQ ID NO: 214959 - DNA, 234 bp, Homo sapiens
gtgaaaacatggatgaaaacacaaaaatttatttgtactttaaaggctagttattaacagctgtaatattttaagttgagtctaatggaattgtaatagtacaagttctaatgaaagaacaaaatgttctttatccctttagaaaagaagattccttagatgtatttaggaaaagaggaaaagaaagctgtactttcaagtcctataagtacagttttcaactagaagattaaa

SEQ ID NO: 214960 - DNA, 407 bp, Homo sapiens
ttacagtcattctgtatttttgccatttggtattttttcctgaaacattacataataagaatgcagcatgctttctttatgtaggtgatctgtgaaactttttgacaattaaaaattggtttttggccaggcacagtggctcacacctgtaatcccagcacttcgggaggccgaggagggcagatcacccaaggtcaggagttagagactagcctggccaacatggcgaaaccctgcctctactaaaaatacaaaattagccgggcgtagtggtgcacacctgtaatcccagctacttgggaaggtgaggcaggagaattgcttgaacctgggaggtgcaggctgcagtgagccgagatcttgccgttgcactccagcctgggcaacaagagcgaaactccatctca

SEQ ID NO: 214961 - DNA, 529 bp, Homo sapiens
tccacattctcctaatattaactttttaccatatttggtttcatattttcatgagacagtatttgtttctgaaccatttgggagtaatttgtagacattatgccccttagcccctaaatacttatgtccctttattcctaagtatgtctccctaaataaggatttttaaaaaatatataaccacaatataatcgtcagtatcaggaagttaacattgatgcagtactctatagactttatttaaattttgcagtatttcctaatttccttttaagtgaaagagaaactgtttcccctggtttaggttccagttcaggattatatgtgttacttttggtttttcatgtctctttaggttccttaatacagaacacttcctcagtcttcctttgtgtttcataatatgactttttttttttttttttaaagagatgagatctcactatgttgcccaggctggccttgaactcctggcctcaagcaatcctcccacctcagccttccaaagtactgggattacagacaaaag

SEQ ID NO: 214962 - DNA, 410 bp, Homo sapiens
tcaactttcctagtatcccaacttgctttcaagagaaaactaaaaactcattcacatgaataaagtataaatgacagtcaagagcttaaagtgttagctgtcctaggtggggaataagctcacaaggaacatcggtaaagaggaacatgtcaggagtgggagcccactttgccttataccctgaccaggtatgtagtcctcaatgtaaaactctcccactgggtgggaattcctcccaccccaacaacgccagcctccctgtggctttgcatcaggctccatctcctcatcgcagcgtggaactctattcctgtctctccaatgtcctcacaccccagtgactccaacgtcctctaggactagggaagtctgcacggaacctaccaaaatccctggcactctgacagccc

SEQ ID NO: 214963 - DNA, 286 bp, Homo sapiens
acgcataattgcctcttcgatgacggtagggtggggggcatccatatagtcacttcaggtttatggagggttcttctactattaggactttcgcttcgaagcgaaggcttctcaaatcatgaaaattatcaatattactgccgttagagaaatgaatgagcctacagatgataggatgtttcatgtggtgtatgcatcggggtagtccgagtaacgtcggggcatacaccacatgaaacatcctatcatctgtaggctcattcatttctctaacagcagtagtatt

SEQ ID NO: 214964 - DNA, 349 bp, Homo sapiens
agtctgttcgcttcatcattgcccccacaatcctaggcctacccgccgcagtactgatcattctatttccccctctattgatccccacctccaaatatctcatcaacaaccgactaatcaccacccaacaatgactaatcaaactaacctcaaaacaaatgataaccatacacaacataaaggacgaacctgatctcttatactagcatccttaatcatttttcttcccacaacactttctcggcctatccggaatgccccgacgctactcggactaccccgatgcatacaccacatgaaacatcctatcatctgtaggctcattcatttctctaacagcagtagtatt

SEQ ID NO: 214965 - DNA, 985 bp, Homo sapiens
gagtggagggaatgagcaaggaaggaggaggcggaaagagggtcagggaggtgacagggcagattgtgcagggcttggtgggccactttgcctataactctgggtgagaattggtgccactggaaggttcctagcagaggagtggcgtgatccttctggcagctgcattgaggagagtttgcagggtgtcagggtggaagtgggagaccagttgggatgccatggccgtaaaccaggtgagaactggcagagcttggaccgtgatggtaggaatgggcagtgtgatacatggcttgataaactgcctagaccctcacataaatggtaaatgtatttttcatctcacttacgtctcctttaattacagaagtagaaaatggttactgtagaaaattggctagctagaacaaatcccaaaagaaaataacagcctctcctaagtggaccacccaatgttagagttatcgaagcaattatattttaatcattttcttttaataattacatttgaaagtactgtgttaaaatcgcttaaactggcagaagcggacttttaggtcatatgcacagtggggtgcagactctgcattttaagattcagtggagtgtttgaccgttctgctgtacactggaggggaaagagaagggtaagaagatgaagcctttactttgcttctcgtagcttgcagagaaggatgggggcaggtgagcagagacagctattcccagattacagccaaatacatattttgaaaatgatgaatggaatttcagggaatggggccctgtaagttccctgaggtcaggtactgtgtcttattctttactgttttcctaacatgtgatttagtgcctggcacatagtaggtgcccagcaaaaatatttgttgcgtacatatgtgaattaataagtaggtaatgcatggaatgaaacatgtctttttggaaagatcaagaaggactacctgtcatgtgagaccatcac

SEQ ID NO: 214966 - DNA, 285 bp, Homo sapiens
ggctcctccctcccccctgaggagctctttctaagcagcatcttccagttctgaaacttgaaatatcgtctgcgtgctggtgactgtgagttccagatctgaacatccagctggcatcttggcatctgtttgtgaagatctcacaactacttcaataaaacctttccccaaacagggtgcttgcacccccaatccttattctgtacccctctgtattcctcttcacaggaaatggaactcatatgactcaactttcagccagaaagttcggtcgtctttgactgt

SEQ ID NO: 214967 - DNA, 388 bp, Homo sapiens
tgtgtgaattactgagtgtgattaaagtatttttaggtttcttagggagaagtgattctactatacactcactttaatgttaatgtgtgtattcaacttttgccattaggaaaaagtttagttttgtcaacaacctcatagtaattggtttttatttataacatccttattttattcaagcagctaaatgccttttttttcaatagagactcggtttcactatgttgcccaggctggtctcgaactcctggtctcaagcaatcctctcactgtggaaaactgcggctggaggatggcttgagtccaggagtttgaggttacagtgaggtatgattatgccaccacactccagcctgggcacctaagcaagaccctgtttcaaagaaaa

SEQ ID NO: 214968 - DNA, 665 bp, Homo sapiens
agttccaaaacaaccctttaacatttatgttttctgcactttgtctcattattgaaaataacaagcgctatgtaaaagcgtaaagaatatactgaggtttacagcaaggataaccaccaaagaccgggagttagaaagctatggcctgtgggccaaatcttgctcaccacgtgcttttgtaaataaagttttattggaacatagctatgcccatttgctatgtattgtctatgtctgctttcacactgcaacatcagagttgagtaattatgatagagaccatatggcttaagatatttgctatctggtttttcactggaaatgttttccaacccatgctatagatattttcatggtatttatttactgactcgtttgttcattctttcagtggacaccaaccctgttaatgacgctggggaatgtaaagataagtacatcagtctctaatttccaagagcttataatgtaacagagacaagttatgtactcaaataacagagacaagtcatgtattcatctttacctctgaccaggcagaatgcagcacgtactacagacaagaaatagctaaattgctgtggtagtttagagatgatgagagcctccgacaaaggcagggaattgggaaatgcacaaagatattgcttccataactgtggcac

SEQ ID NO: 214969 - DNA, 468 bp, Homo sapiens
gggtcggagctcggtgcaccacgccccccctctgcgcccggggcctctgcggggacagaggtctcaggaaagtagcctttatttatgtggcaccgatcggaacccgcggccggccaggcggacctggacggagcgtccctgctcggaacctggcgcggggcgccgcgcgctcgtgtggcgcctcggcctccccaccgttcagtccccggaggcacggagctcgcggcgggacgatgacggttgggccgggccaggcgtgggagactcccagactccggcccgccgggacggccagctgcgtcaccttggacgtgggcaatacttcggagcctcggttatgtcgcctgtaacctgaggacaacggcctggaaggggctcaggtgacacggcggccctcactggggccgatttagccggtctgccgcccctccgcgccggaccgccaggcggggtaccagggaaactgcg

SEQ ID NO: 214970 - DNA, 463 bp, Homo sapiens
cagaaacttgtgttgatgctccagttatatattcctatgcattatattacagggactagtgaatgatggcccaaatgccaatctgaggcttgcatcttgtacttctttgatatttttaatatatttaggctttgagtatgtagcacacaatgaattggaaacttatgtttatgatctagttatgtattcctatgtattacagggaccattgactgatgtcctaaacaccattctgaagctctaatagtgtctagtgtaaactgtgaaatattgatacacttcctcttacaatgagtgacattatttgatccctaaccatggacatcattgtggaaattcacctccaccccatcctcacctcatcaagtccctagcattccaacactataatgtctacttctgcagctgatattctgatttctagaatgtgtttgtcaaatattatatctgttgtcagctttcc

SEQ ID NO: 214971 - DNA, 566 bp, Homo sapiens
atgcttggtaccagcttggcctatctttattgctcaaaccaataatacaatttgctgaggtctgggaggtcccttcagagaatcattgctctccccaaatttggttgaggtctaaggttcattttgctttataactcctttcctggagttttactcacttccaacaaggaagattagttttcctgtttccatgatgatggagggccagcaagtcctttctggagtttctgctcccttccaacagagaaagtgagtttgagttttttcctgcttcatagatggtagacagcagtgttcagcgtgagcctcattcctaggtaagtagctcaattagagttttgtcttgaaaattccccttagtgactaaaagttaagattgacaagtaactggtcttaacttctccttaccattaaaagtcctcagtaatcatatttgttttgttattttggttttcttccatcagatttgattaactctacctgagttggtcaaattcgaaggagaactccaaattacggggaacaaggcctctggattcactaaaattccatgcagctgcaaaaaa

SEQ ID NO: 214972 - DNA, 636 bp, Homo sapiens
aaattagctgggtgtgggtggtggtgcgcgcctgtggtcccagctactccggaggctgagatgagaggctccctttagctcaggagttggaggccgcaacgaactatgattgtactactgcactccagcctgggcagcagggcaagaccctatctctaaaatttaaaaaataaaatatataaattagataggtcaagttcaaaaagacacgcaactactatgtgccaaaacttgggctgagcacattgagtgctcaccaccgccctgtgccaccaagtctgataccatccaccctgtgtcctagatgaggaaacaggtgcacagagaggttaaaatgttggctggaggccaggtgcggtggctcacgcctctaatcccaacactctgagaggccgacgtggatcacctgaggtcaggaatcggagaccagcctggccagcgtggtgaaaccctgtctctactaagaataccttaaaaaaaaaaaaaaattagctgggcatggtggtgctcacctgtaatcccagctacctgggagtctgagggaggagaaacgcttgaacacaggaggccgaggttgcagtgagcccagatcgtgccactgcactccagcctgggtgacagagcgagactctaact

SEQ ID NO: 214973 - DNA, 619 bp, Homo sapiens
ccaggggtcagcaaattatgatccagaggccaagcccagcccgtctgcttttgtgtataaagttctcatggaacagagctgtgagcctgccgtgtgtggtctacggctccccctggacacagctgcagagctgattcccgcacagacctcggggcccgcagagggaggcgccttccctccatcatccccactgagcaccagccgccgcagccgctaaaacctgcggaactcactccatgccccttgttggctttcttcacataaagtggataaaactgggtgtttacagcctaaagcagcccatgccaaggcactcctcagggactgagccttagtcacagtccttgtgactacagcacgtccatagatgagagctggccgagggatccgtgtgcctccagcttctcggagctggaaagaatccatactggaaaagtgttccttcagtgctcctccttctgggaaaaaaagacggggagctacatcaaccttaagggttaatgttgcttgaattatcttaaatagtgaagatggagaaatagtcaataatgaagagcatgaatatgcatccaaaaaaaggaaaaaggaccattttagaaatgacacaaatactcaaagt

SEQ ID NO: 214974 - DNA, 1656 bp, Homo sapiens
ccaggggtcagcaaattatgatccagaggccaagcccagcccgtctgcttttgtgtataaagttctcatggaacagagctgtgagcctgccgtgtgtggtctacggctccccctggacacagctgcagagctgattcccgcacagacctcggggcccgcagagggaggcgccttccctccatcatccccactgagcaccagccgccgcagccgctaaaacctgcggaactcactccatgccccttgttggctttcttcacataaagtggataaaactgggtgtttacagcctaaagcagcccatgccaaggcactcctcagggactgagccttagtcacagtccttgtgactacagcacgtccatagatgagagctggccgagggatccgtgtgcctccagcttctcggagctggaaagaatccatactggaaaagtgttccttcagtgctcctccttctgggaaaaaaagacggggagctacatcaaccttaagggttaatgttgcttgaatgtaagcataataaatattcagcatgtctcctaagacctggagtatcatcagagaccaagcttggaaaaccacaaagaatgacgcccagtttctaagagtcattccgtgctttacaatcagcccacaaccaccgagtcccaggaagcccagccgagaccgcggcaggtcctgacgcggcatcagcctgagtctgagcccagaggaagcttctgctgccacaattgctgcgtgtgctcatggcttgggtgcaggcccaaccacagcggaccaagggcaggctgagatttggcctggactggagggctgtctcaaggagggtgacgtgtctttgacttttgcattcttcccctttcctttctattctcttggtgacgtgaacacagacagaaagtgaacgttttttgcataaattccctgtagattctggatattaggcctttgtcagatgcatagtttgcaaatagtttctctcattcagtaggttgtctgtattctctgtcaaatgtttctcttgctgtgcagaagctctttcatttagttaaattctacttgccaattttgttttgttgcaatcgtttttgggaacttagccaaaaattctttgccaaggccaacgtcaagaagagtatttcctaggttatcttccaggatcttacagtttgaggtcttacattgaaatctttaatatattttgagttaatttttgtatatggtgaaaggtaggggtctggcttcagtcttctgtatgtggctagccagttattccaacaccatatattgaatagtatggtctttttccactgctgcttttgctggccttgtcaaagattggatggttgtaggtgtgtggctttatttctgagttttctgttctgttcattggtctatgagtctgtttttgtaccagtacagaagctgttttggttactggggctgtatagtatagtttgaagttgagtagtgtgatgcctctggctttgttctttttgcttaggattgctttggctatttgggctctcttttcattccatatgaattttaggatagtttcttcttgttcttaaatgcattttataattaacttgtttagctctaagaaaaaaacttgattttgtattggaatagcattaaatttaatatttt

SEQ ID NO: 214975 - DNA, 936 bp, Homo sapiens
ccaggggtcagcaaattatgatccagaggccaagcccagcccgtctgcttttgtgtataaagttctcatggaacagagctgtgagcctgccgtgtgtggtctacggctccccctggacacagctgcagagctgattcccgcacagacctcggggcccgcagagggaggcgccttccctccatcatccccactgagcaccagccgccgcagccgctaaaacctgcggaactcactccatgccccttgttggctttcttcacataaagtggataaaactgggtgtttacagcctaaagcagcccatgccaaggcactcctcagggactgagccttagtcacagtccttgtgactacagcacgtccatagatgagagctggccgagggatccgtgtgcctccagcttctcggagctggaaagaatccatactggaaaagtgttccttcagtgctcctccttctgggaaaaaaagacggggagctacatcaaccttaagggttaatgttgcttgaatgtaagcataataaatattcagcatgtctcctaagacctggagtatcatcagagaccaagcttggaaaaccacaaagaatgacgcccagtttctaagagtcattccgtgctttacaatcagcccacaaccaccgagtcccaggaagcccagccgagaccgcggcaggtcctgacgcggcatcagcctgagtctgagcccagaggaagcttctgctgccacaattgctgcgtgtgctcatggcttgggtgcaggcccaaccacagcggaccaagggcaggctgagatttggcctggactggagggctgtctcaaggaggtatcttaaatagtgaagatggagaaatagtcaataatgaagagcatgaatatgcatccaaaaaaaggaaaaaggaccattttagaaatgacacaaatactcaaagt

SEQ ID NO: 214976 - DNA, 888 bp, Homo sapiens
acctataatcccaccactgtgggaggctgaggtgggaggatcacttgagctcaggagttcaagaccagcctggacaacatagtgagtccctatctctagaaaaaaataacaacaacaacaaaaagctagccaggtatggtggtgcatgcctgtagtcccagctactttggggggctgaggtgggaggattgcttgagcccaggtaaggctgcagtgagtcatgattgtgccatcacactccagcctgggtaacacagtgagattctgtctcaaaaaaaaaccaaaacaaaacaatacaaaaaaacccacatgattttgtgtacatgctctatcataggacacccccagcaggtccaaggcagtacctagtaatcacaagcacatacacggccatttctgcagcaaaacctccagacatgccactggagagtaatcaagaccatcagcagcttcttagtagttcaggtcaggttttgccactgaacgagctgcccaaacttaccagaacaactgttcttcagaactgcttgggttttaaaactaagggtgagggattatagagcagcatcaagatcccacatggagtggacccacagtacaaggtgtaacagggcattctgaatatctccaacatgcagacaatgagcagcagcccagaagggagccgtgcctgcctgaggcatgcaggcagctgggggaagtcaggtttccagggcaggaaatgccgctgctagtgacagcctgaagcctgacataagggtttttaccctagtgggttagtttctggtgaatgagtttggcaagtcatacccagcattctctgtataataagtcagagagaccaccaaggtgcactgcctgagctaagggtgagtgctgtgccgagaa

SEQ ID NO: 214977 - DNA, 389 bp, Homo sapiens
ccagctgttgaaaagaacaaagaggaagacagagaccaggactccgcccgggaggggcagtgcagggtggctctcgtttctggtccagcctgcattcagcatttatctgttcagcacgattaactgaatacctggtcgctactaggaggaaaagggccttccctggcagcagcctgaagcacgaacgaactcacggcatgccaggctgtgttctagaaccaggagatggaggggcatatggagattagtccatttaatactcaaaataatccaattaggttggaaatttataaaccccatttaatatatgaagatgatggggcacagggaggttaagtaatttgcctaaaagcacacagctagtaaagtggtagacctgagattccaat

SEQ ID NO: 214978 - DNA, 692 bp, Homo sapiens
ggggagccaaacaattcagagacaactatctttagcattttggtatattctttccagatacattttttagatagtattgaatatgcctaatgtacagtttttcatcttgcttttctcctttaacattcttgttataaactgttagcctttttagtgattgcccaacattttgagttgtattaccttaatttacttgactttgtattttaaaaactaatttctgaacaagtacatatacatattcctttaaagggtgcttggattatactatgaattagttttttagaactagcaagctgatgaaagagcaccattttcctacagttagaaaaaaatgcattatcttaccttgtgtggttatgcgtatctgaatcactgcaaaactgcatttgaaagtcatccttaatattgccaggattctgattgggttagataggatctttggacttttttacaattttcaggtcaaaaccaatagaaaaaaatagcaacagaaattttctgtggaataatgatgtcactagctcccctataaacgttctcaaagtaagtaatttccaggctgtaccgtttggcacatgcacagagaagaaacttaactgtttataatagtgcgtggtttgtttttagagttttaagaaaaaatctggagtatattttaatgtaatattattatattatttatgtacgct

SEQ ID NO: 214979 - DNA, 360 bp, Homo sapiens
tctgctggggccattccagctttggctgataatgcgtttattgcgttactttagtacagtcggcctgcctcgccccacctccagcagcccagcctgttcacagctttctgctcactgctcactacccaaggaggtggggtctgtctcccagggtgggcactccaggcacctcctctgccctggatgttgccttgtatgccttgggtgaagggcttctcttgcctcagctgaaaccaagttttatagaatatggatatggatcatcaaatgagatttttacagtacagtaaagtgtgaatctaattgcagccagagccaaaaaaaaaacaaacaaacaacaacaacaaaaaaaacaaactg

SEQ ID NO: 214980 - DNA, 447 bp, Homo sapiens
tcctttccggcagtacccggaacacttgtagcttggcgtatttctctctatagtttacatgctatggagaaccttaattgcaggagaatgaatgaattcacaaaaactcgattatagcagtatagcatatgtaagttctctcacattggcaactgcctaccttgaattacttcattaataaaacaaaacaaacaaaaaccaaagcagtttttaatcttcaaaacctcgtggtggggaaaaaaatcttaaatgatgtttattgctgtgggtttttattttcccctttctggttttgaaagagacaaaaatttaaaatccagcaagtgtattacattgctttaaagactacaaaatttattttgcttgttaaaggacataaaaaggtaatacatcaagctgttaaagatggctacctttgaggaggggagggaaattaggaggtgtggt

SEQ ID NO: 214981 - DNA, 438 bp, Homo sapiens
ccactggccaaatctgatccaagggctgtttttgcacagctctcaagctaacaatagttttcacatttttaaagtgttgttaaaacaaaacaaaacaaaacaaaaagaagcatatgtaacagcgaccacaggggcctgcaaaatctaaaatatatttgctatccagacaaaaatgtatttactttcaaacaaaaaaaggttgccaactccttatctaccctaagacccagctactccactcctagatatttacccaaaaaaaatcaaaattatgttcacaaaaagacatgcaaaagttatacttataaaaatcttgttcatggtatctaaaaattggggaaggggggtaattggccagctcatcctaaaattcacatggaagagcgaaggaccaagaatactgaagacaattttgaagaacatgttggagggaaggga

SEQ ID NO: 214982 - DNA, 458 bp, Homo sapiens
tgtggaggaggagcaagatgtgacagtttcatttccagaggatcactctagctgtggaatggaggatggaatgcaggaaggcacacatagaagtggggggacagttcagaggctacagcagtagtccaggaaagaaatgttggtggctcagaacttgggtgatggcaaataaggggaagattttaaggaagatggagtgctgttatagactggaggccgagagctaagacggcattatcaagattgatttccaggtttatgcgtgagcaacaaggcaacaaaagtgggtatgagatggggctgaagagtaaatgcaaggtggagaaaccagagaagaaacagaagtttagaagagggctctgtaagatgggaaatcttacacattacctacatgaaccttaagatgtgggaaagggggatggcagtggtgagaaatgctagattaagaaaagcagaca

SEQ ID NO: 214983 - DNA, 219 bp, Homo sapiens
tactgggcggagctgggctggccaggccagagctggctggagccttccagtctctggtctgtggccaggttcacagccttgagagggcaggaggtatgaggcctggagatgtggggccctcagggtggggtggatgaagagaaatggagattcagtgacagaaagatccagagagacaaggagtggggaaagagatgggaggcccaaagacagatttta

SEQ ID NO: 214984 - DNA, 628 bp, Homo sapiens
ttgacttagttcacagtggaatactcttcactgcatctttctaaatggagaactgcccatttctttggattcagcccaagtacagtgctatctagatggagggggctgggctgaaactttttaaaagggctcttctaagcccaggattctgtaattcccagtttttcatcctactcttcgtgtttttccagcaccttcagaaacttagaaaatttaaaagagagagctagaaaaagaggaaaatgaaaaggaaaagaaggaaagaaagttctggctttcctacctgcctattgcttgaaacttcctggcccctttattaaaaagtaataagtgaagctgttaaatccagggtacccctagcaacaagatgagaaccactgttttcattgttaggaggctagattctattcaacttgcccttagctttttaaaacataatggataagccacagcaattttatctgtttccccaactataaaatgggataataatctctctaacctttttcttccatcctggaattgtccccaagatgaaatttgatcctgtaaacttgcttcagtgaaaggcactacacaaacaaaagtggtaattatagagttgcttggtaaagcagctttgcattgt

SEQ ID NO: 214985 - DNA, 419 bp, Homo sapiens
cgtggtgggagagaggcccttccacccagtctcgcgggaagcggcttgttcacgtccccatttgggtaggagccctgggtctgtgttcactgttggggaagctcccgggccgctcctggatgcagccggaatggctgagatcttcagcccggaagagggaggctccgttctgcactgtggcgtcgttgtctcggcttcctctcctgagtctccgtccagaatctgcggatcatggtgggcaggcatccgttccaacaggatggtgacaggaactgagcaaaggaaggaataattcactgagaattcgggggaaacctcaaacagttctcaggaatgggagatttttgtattctgtaaaaattccatttgcatggagactcagattttaaatctctaattaaaaacaaaagtagctgaat

SEQ ID NO: 214986 - DNA, 316 bp, Homo sapiens
tgtggtttagtggaagaagagggaaaagggagagatcaggagctaattgtgacccatttccaagtgtccaagtttaggagttgattcttgtcatgattagtcattttggaagcacgcatgtgcatttaaaccacactactttcattctgagtaatgtaagaggatttttaacttccaaaaatgtctagaattcaggttaacgtctcctagtcatgtgtgcataaagggcacggtatgcagggccttacttcttttcaggctatttgggccattgcattatgagaccttgtaaccaaaattatcaccctaacatcat

SEQ ID NO: 214987 - DNA, 412 bp, Homo sapiens
tgctgccccgtcccggcggtaatgcgctcccggccgtgacccccgctgggggcgggggccgggatccatgcgcggagcccccacccggcccggcgcctgcggctgacggcggcgggggttggggggcgcgcgtctggcctcctgcccaccccctggcgtcgacatcacgggccgtcgggggctgcgccctaccccgcggccaggctctggagggaccctggaggtgccgccggcctcagcccatggcccaaaggtacgatgagctgccgcactacccaggcatcgcggatggccccgcagccctggctggcttcccagaggcagtgcccgcggcaccagggccctatggccctcaccggcctccccagcccctacccccaggcttggacagcgacggcctgaagagggacaa

SEQ ID NO: 214988 - DNA, 466 bp, Homo sapiens
cagtaaaatgtgagtgagaattcatttctgaccatgttaaatgtacagattttatagcataaaggtagagcagcacatctcccagccacgttttcttttagacactgattgctgcattcctaggatgtgatcttgctgaatgttaatcatgaggggcccagggtgtggtgggagtgggctgtgggtgcaagaaatatcctcccctcatcctgtggagcttaagactgaccctagaaaatacaactcaaggattcccactgtatttcccgttacttctataaaaatgttcatctgggggcttttggagggtggagggcgagaggagagagaggatcagaaaaagtaactaatgggtagaaggcttaatacctgggtgatgaaataatctgtacaacaaacccatatgacacaagtttacctacataacaaatctgcactaataccccctgaacttatgataaaagtt

SEQ ID NO: 214989 - DNA, 633 bp, Homo sapiens
aagatatcaaagtcagggtagcctagagtatgctgggtaaaaaacagtctccatatctcagtagcttgaaacaattagtttcctttccactgtcactacatgtccatcaaagataggctaaagacttttagttgtacaaggacaaagaccaacggcagcctgcgcaaccaccgttgggaatattgccagttgctctgctgaaggcaaaagaaagctctggaggccttgccccgttaactaaatgttctgcgcagaagtaatgagaatagaggagaggaatcagagctgaaaagagcagatgaatgtgagatggttccagaatttggagattgtttaaatgtgggaagaggggaggaattgtggatggatgacgctcaggtttgtgtcttgggcaaactgggtggtgttgcttactgagataagaaaagggtaggtttgggattagaggaaatgttggtagagagttcacttttggaaatgtctagcagctagttgtctaaatggatctggagtgctagagagaggcaggggtatttagatttggaagtagtctccacaagaaggtttaatctgtgatagggaacagggttactcagggcaaacttaagaaagtgataggagagttgacatcga

SEQ ID NO: 214990 - DNA, 227 bp, Homo sapiens
atcagccggactgacacatctaggggcgtttgggattagaggaaatgttggtagagagttcacttttggaaatgtctagcagctagttgtctaaatggatctggagtgctagagagaggcaggggtatttagatttggaagtagtctccacaagaaggtttaatctgtgatagggaacagggttactcagggcaaacttaagaaagtgataggagagttgacatcga

SEQ ID NO: 214991 - DNA, 641 bp, Homo sapiens
ccaggcacaatggctcatgcctgtaatcccagcactttggaaggctgaggcaggaggattgcttgacccaggagttggagaccagtctgggcaacatagcaagaccctatctctacaaaaaataagttagctgggcatggtggcacacgcctgtagtcccagctaattggaaggctgagacaagagggctgcttgaaccccagaggttgaagctacagtgaactgtgatcacaccactgcactccagcttgggagacagagtaatataataccctgtctctctaaaaaatgaaacttttttttaaattaatttgggatttatgtagacacatcaccaccattcttatactggtcttaattttcagattcatgtgaggtgccatttttttctgaagtagatgcataattgatttcaagttgctggcctcatatcaaagtatcagacagaacaaagatattcagtgttgctgggcgtggtggcttacgcctgtaatcccagcactttgggaggccaggagttcaagaccagtctggccaacatggtgaaaccctgtctctactccactagactcccccacacaaccatgtcgccggcttgggccagccgacttttagactgagccagtttatcgtgcgcccgc

SEQ ID NO: 214992 - DNA, 520 bp, Homo sapiens
tgtcacacttgacatttagttcatcattaaatcccatcggtgctagcttcaagatatccagattttgatatttctcaaaatctttccaccttccattttgatctatgccaccactatctcatgcctggatgattgctatagtgctggtctttgctaatcctgcctattctttctccttttgtccttgcctccctttgtttggtttgttctctcagcaaccagaataatactttaaaaacattaggccaggtgcagtggctcacacctgtaatcccagcattttgggattacattaagtggaaggattgcttgagcccaggagtttgagaccatcctgagcaacatagcaagactccatctctacaaaaatgaaaaataaaaagaaataaataggtgggcatagtggcacacgcttttatgcttttggtcccagctacttgggaggctgaggtgggaagatgcttgaggccgggaggttaagacaatcctgagcaacatagtgagacaccatctctaccca

SEQ ID NO: 214993 - DNA, 496 bp, Homo sapiens
gaaggtttacagcaaaaaaaaaaaaaaaaaaagagagagagaaagactgattacttgtcacagaatcgctgagtgaatcactaagtgaagacctgcctatcacagttttctgttcctgaaatgttgactgcacattttgcttctgcttgacatatcaagctaagtaactaaatgctgatatttgatattatttgatgtcataatcagatgctcattcaatacaagtcactgccaaattttacaaagacttgcagaaattgaaattctagttaatgttatccttcacttgctgctttggttccagagtttaagttaattcttttctaggcttttaattaagcagatgatgagagtgggatgggacaggggtcaacattaagtttggagtattgttttctcatcattcaccacagcctgcttcaaatctgttttatttttatttttgagtttattttttcagcactgaggaaagctgataacatcatatatatttggt

SEQ ID NO: 214994 - DNA, 217 bp, Homo sapiens
cagctcagaggttgcctatgagtcaatacaaatttctaataacaaagaaaacaccacggacttggaaagagagaaggggtcttgtggcgagtcaggagtccactgtttgctgggctctgccagacaccgtgcacgacccattccctgactggctcccagtggggatggcttcaaaagcctcttgaggaacctctcatccactgctggcacttggaga

SEQ ID NO: 214995 - DNA, 204 bp, Homo sapiens
acagttacgaggatggtgaccctggttctgggactgatgctggcaacattcaggagagaaatgttgtggctggcgttctcaagtacacgccagtaaaagaaggtcatgtgccacactggtcttctttgtgtgcccttgaagctgggagcttcatttgtgggcatggagggaataacagtagtgaaggtaggtaggtaagtgtcc

SEQ ID NO: 214996 - DNA, 2888 bp, Homo sapiens
cccagagttccttcgagctccccgagtccccgcggagcagcggcggtcgaggggcggggacgggggcggagcccaggaacgccggcccccagggctggaggctggggcggccctgaggacgcgtgcggggcaggtcacgcttgggcctggctgcctcaggagccaccctgcacggcgccgggcgaggctgtgcgcgccctcccggaccctccactttggggctttgcggtgtagcggcgcgccccactcccttacgtgttcagtcccgaatcacgtacgggccgctgcagctccaggacggcggacgccagcgctctcggatccccaggcccctccgtgctcatcccggaccgctccgtccctgaggaaaaaccgccccgtgcccggaaccgcggcttctcccacgcggggcaggccggggctgtgagggggcagcccgcctgcggactaggccgggggtttgaggaggcggctctgccggggacaaagccgggggcgtgaggggcggttctgccgggttcggggcgcgcggggcaggttgcgtgaagaggcggaaagtcccactcgccctcggcttctccctgcccggccgccggtgtcccgcccgccgcctccccgcgcagcccggcccgacccgcggcgatggcccagcccggggacccgcggcgcctctgcaggctggtgcaggagggccggctgcgcgccctgaaggaggagctgcaggcggccgggggctgcccggggccggccggggataccctcctgcactgcgccgcgcgccacgggcatcgggacgtgctggcctatctggccgaggcctggggcatggacatcgaggccaccaaccgagactacaagcggcctctgcacgaggcggcctccatgggccaccgagactgcgtgcgctacctgctgggccggggggcagcggtcgactgcctgaagaaggccgactgggtcctcacagaaggcacagaggttgccggtcaaagctgttttcctgcctgccagacccctgaatcctctaggttttccatctgtgccaaggatgtgtgtgttttgaagacctggcccctggcttctaatgtctcagctgcctccatctgacagcttctcctggttggccttaggactcctctgatgatggcctgcacaaggaagaacctgggggtgatccaggagctggtggaacatggcgccaatccactcctgaagaacaaagatggctggaacagtttccacattgccagtcgagaaggcgaccctctgatcctccagtacctgctcactgtttgcccaggtgcctggaagacagagagcaaaattagaaggactcctctgcatactgcagcaatgcatggccatttggaggcagtcaaggtgcttcttaagaggtgccaatatgaaccagactacagagacaactgtggcgtcaccgccttgatggacgcaatccagtgtggtcacatcgacgtcgctaggctgctcctcgatgaacatggggcttgcctttcagcagaagacagcctgggtgcccaggctctgcacagggcagctgtcacagggcaggacgaagccatccgattcttggtctctgaacttggcgtcgatgtagatgtgagagccacatcaacccacctcacagcacttcattatgcagctaaggaaggacatacaagtacaattcagactctcttatccttgggagctgacatcaattctaaagatgaaaaaaatcgatcagccctgcatctggcctgtgcaggtcagcacttggcctgtgccaagtttctcctgcagtcgggactgaaggattctgaagacatcacgggcaccctggctcagcagctcccaaggagagcagatgtccttcggggctctggccatagcgcaatgacataaggatgtttccaagaggaggcaataaagtgcatgagttgctgggagcctgagcacctttcgtttttcggctcagagaaagccaagtgcaacttgcttcagtcatcctgaacctgagttcaaccaaccgcagccacctacgtttgaccccagcgagatcaaagttgtatatctgaggtgtaccagtggtgaagtcagtgccacatctgcactggcccccaaggtcagctccctgggtctgtctccaaaaatggttgctgatgacatcaccaaccattgactggaagagtctgaggatgatagtgaaactgaccagccacagcagacaggcccagattgaggtggtgccttctgcctctgccctgatcgtcacaaccctcaggaaccaccgacagaaagaaagaaacacaaaaacatgaaacacagtggtagcaccacttctgatgagattgtcaacattgcctaacagatgcagcagcagtctttagccagagaactctctggaaccattaaagaattcctgggggccggttgcggtggctcatgcctgtaatcccagcactttgggaggccgaggcgggaggatcatgaggtcaggagatcgagaccatcctggctaacgtggtgaaaccccgtctcttactaaaaatacaaaaaaattagccaggcatggtggtgggcgcctgtagtcccagctactcaggaggctgaggcaggagaatgctgtgaaccctggaggcagagcttgcagtgagccgaatatgcgccactgcactccagcctgggcaacagagcaagactccgtctccaaaaaaaaaagaattcctggggcctgcccagtctgtgagctgccatgttgatagtatcacagatgataccaacagtgaagctgtggaatgcccagctagttaaagaatgcaaaggaaaatattttcacaaagggttatctgataaccaaaaaataaaaagacatttcatctaagccactt

SEQ ID NO: 214997 - DNA, 1782 bp, Homo sapiens
cccagagttccttcgagctccccgagtccccgcggagcagcggcggtcgaggggcggggacgggggcggagcccaggaacgccggcccccagggctggaggctggggcggccctgaggacgcgtgcggggcaggtcacgcttgggcctggctgcctcaggagccaccctgcacggcgccgggcgaggctgtgcgcgccctcccggaccctccactttggggctttgcggtgtagcggcgcgccccactcccttacgtgttcagtcccgaatcacgtacgggccgctgcagctccaggacggcggacgccagcgctctcggatccccaggcccctccgtgctcatcccggaccgctccgtccctgaggaaaaaccgccccgtgcccggaaccgcggcttctcccacgcggggcaggccggggctgtgagggggcagcccgcctgcggactaggccgggggtttgaggaggcggctctgccggggacaaagccgggggcgtgaggggcggttctgccgggttcggggcgcgcggggcaggttgcgtgaagaggcggaaagtcccactcgccctcggcttctccctgcccggccgccggtgtcccgcccgccgcctccccgcgcagcccggcccgacccgcggcgatggcccagcccggggacccgcggcgcctctgcaggctggtgcaggagggccggctgcgcgccctgaaggaggagctgcaggcggccgggggctgcccggggccggccggggataccctcctgcactgcgccgcgcgccacgggcatcgggacgtgctggcctatctggccgaggcctggggcatggacatcgaggccaccaaccgagactacaagcggcctctgcacgaggcggcctccatgggccaccgagactgcgtgcgctacctgctgggccggggggcagcggtcgactgcctgaagaaggccgactggactcctctgatgatggcctgcacaaggaagaacctgggggtgatccaggagctggtggaacatggcgccaatccactcctgaagaacaaagatggctggaacagtttccacattgccagtcgagaaggcgaccctctgatcctccagtacctgctcactgtttgcccaggtgcctggaagacagagagcaaaattagaaggactcctctgcatactgcagcaatgcatggccatttggaggcagtcaaggtgcttcttaagaggtgccaatatgaaccagactacagagacaactgtggcgtcaccgccttgatggacgcaatccagtgtggtcacatcgacgtcgctaggctgctcctcgatgaacatggggcttgcctttcagcagaagacagcctgggtgcccaggctctgcacagggcagctgtcacagggcaggacgaagccatccgattcttggtctctgaacttggcgtcgatgtagatgtgagagccacatcaacccacctcacagcacttcattatgcagctaaggaaggacatacaagtacaattcagactctcttatccttgggagctgacatcaattctaaagatgaaaaaaatcgatcagccctgcatctggcctgtgcaggtcagcacttggcctgtgccaagtttctcctgcagtcgggactgaaggattctgaagacatcacgggcaccctggctcagcagctcccaaggagagcagatgtccttcggggctctggccatagcgcaatgacataaggatgtttccaagaggaggcaataaagtgcatggtaattcataaaaaaaaaaaa

SEQ ID NO: 214998 - DNA, 2309 bp, Homo sapiens
  misc_feature (2199)..(2199): n is a, c, g, or t
  misc_feature (2205)..(2205): n is a, c, g, or t
  misc_feature (2247)..(2247): n is a, c, g, or t
  misc_feature (2304)..(2304): n is a, c, g, or t
cccagagttccttcgagctccccgagtccccgcggagcagcggcggtcgaggggcggggacgggggcggagcccaggaacgccggcccccagggctggaggctggggcggccctgaggacgcgtgcggggcaggtcacgcttgggcctggctgcctcaggagccaccctgcacggcgccgggcgaggctgtgcgcgccctcccggaccctccactttggggctttgcggtgtagcggcgcgccccactcccttacgtgttcagtcccgaatcacgtacgggccgctgcagctccaggacggcggacgccagcgctctcggatccccaggcccctccgtgctcatcccggaccgctccgtccctgaggaaaaaccgccccgtgcccggaaccgcggcttctcccacgcggggcaggccggggctgtgagggggcagcccgcctgcggactaggccgggggtttgaggaggcggctctgccggggacaaagccgggggcgtgaggggcggttctgccgggttcggggcgcgcggggcaggttgcgtgaagaggcggaaagtcccactcgccctcggcttctccctgcccggccgccggtgtcccgcccgccgcctccccgcgcagcccggcccgacccgcggcgatggcccagcccggggacccgcggcgcctctgcaggctggtgcaggagggccggctgcgcgccctgaaggaggagctgcaggcggccgggggctgcccggggccggccggggataccctcctgcactgcgccgcgcgccacgggcatcgggacgtgctggcctatctggccgaggcctggggcatggacatcgaggccaccaaccgagactacaagcggcctctgcacgaggcggcctccatgggccaccgagactgcgtgcgctacctgctgggccggggggcagcggtcgactgcctgaagaaggccgactggactcctctgatgatggcctgcacaaggaagaacctgggggtgatccaggagctggtggaacatggcgccaatccactcctgaagaacaaagatggctggaacagtttccacattgccagtcgagaaggcgaccctctgatcctccagtacctgctcactgtttgcccaggtgcctggaagacagagagcaaaattagaaggactcctctgcatactgcagcaatgcatggccatttggaggcagtcaaggtgcttcttaagaggtgccaatatgaaccagactacagagacaactgtggcgtcaccgccttgatggacgcaatccagtgtggtcacatcgacgtcgctaggctgctcctcgatgaacatggggcttgcctttcagcagaagacagcctgggtgcccaggctctgcacagggcagctgtcacagggcaggacgaagccatccgattcttggtctctgaacttggcgtcgatgtagatgtgagagccacatcaacccacctcacagcacttcattatgcagctaaggaaggacatacaagtacaattcagactctcttatccttgggagctgacatcaattctaaagatgaaaaaaatcgatcagccctgcatctggcctgtgcaggtcagcacttggcctgtgccaagtttctcctgcagtcgggactgaaggattctgaagacatcacgggcaccctggctcagcagctcccaaggagagcagatgtccttcggggctctggccatagcgcaatgacataaggatgtttccaagaggaggcaataaagtgcatgagttgctgggagcctgagcacctttcgtttttcggctcagagaaagccaagtgcaacttgcttcagtcatcctgaacctgagttcaaccaaccgcagccacctacgtttgaccccagcgagatcaaagttgtatatctgaggtgtaccagtggtgaagtcagtgccacatctgcactggcccccaaggtcagctccctgggtctgtctccaaaaatggttgctgatgacatcaccaaccattgactggaagagtctgaggatgatagtgaaactgaccagccacagcagacaggcccagattgaggtggtgccttctgcctctgccctgatcgtcacaaccctcaggaaccaccccaccccccctggaacagtaactgtatctaacgcacctaacaaaccccagaaggctgcacacagcccctgcacatggtatgccnccaagnaattacccatggatttgaaaaaggtaatatatgatgtaacanacatgcgcaaaagaggaggtataaggagtttatagggaaaaatattagcatctgggnaaaaa

SEQ ID NO: 214999 - DNA, 2635 bp, Homo sapiens
cccagagttccttcgagctccccgagtccccgcggagcagcggcggtcgaggggcggggacgggggcggagcccaggaacgccggcccccagggctggaggctggggcggccctgaggacgcgtgcggggcaggtcacgcttgggcctggctgcctcaggagccaccctgcacggcgccgggcgaggctgtgcgcgccctcccggaccctccactttggggctttgcggtgtagcggcgcgccccactcccttacgtgttcagtcccgaatcacgtacgggccgctgcagctccaggacggcggacgccagcgctctcggatccccaggcccctccgtgctcatcccggaccgctccgtccctgaggaaaaaccgccccgtgcccggaaccgcggcttctcccacgcggggcaggccggggctgtgagggggcagcccgcctgcggactaggccgggggtttgaggaggcggctctgccggggacaaagccgggggcgtgaggggcggttctgccgggttcggggcgcgcggggcaggttgcgtgaagaggcggaaagtcccactcgccctcggcttctccctgcccggccgccggtgtcccgcccgccgcctccccgcgcagcccggcccgacccgcggcgatggcccagcccggggacccgcggcgcctctgcaggctggtgcaggagggccggctgcgcgccctgaaggaggagctgcaggcggccgggggctgcccggggccggccggggataccctcctgcactgcgccgcgcgccacgggcatcgggacgtgctggcctatctggccgaggcctggggcatggacatcgaggccaccaaccgagactacaagcggcctctgcacgaggcggcctccatgggccaccgagactgcgtgcgctacctgctgggccggggggcagcggtcgactgcctgaagaaggccgactggactcctctgatgatggcctgcacaaggaagaacctgggggtgatccaggagctggtggaacatggcgccaatccactcctgaagaacaaagatggctggaacagtttccacattgccagtcgagaaggcgaccctctgatcctccagtacctgctcactgtttgcccaggtgcctggaagacagagagcaaaattagaaggactcctctgcatactgcagcaatgcatggccatttggaggcagtcaaggtgcttcttaagaggtgccaatatgaaccagactacagagacaactgtggcgtcaccgccttgatggacgcaatccagtgtggtcacatcgacgtcgctaggctgctcctcgatgaacatggggcttgcctttcagcagaagacagcctgggtgcccaggctctgcacagggcagctgtcacagggcaggacgaagccatccgattcttggtctctgaacttggcgtcgatgtagatgtgagagccacatcaacccacctcacagcacttcattatgcagctaagccctgcatctggcctgtgcaggtcagcacttggcctgtgccaagtttctcctgcagtcgggactgaaggattctgaagacatcacgggcaccctggctcagcagctcccaaggagagcagatgtccttcggggctctggccatagcgcaatgacataaggatgtttccaagaggaggcaataaagtgcatgagttgctgggagcctgagcacctttcgtttttcggctcagagaaagccaagtgcaacttgcttcagtcatcctgaacctgagttcaaccaaccgcagccacctacgtttgaccccagcgagatcaaagttgtatatctgaggtgtaccagtggtgaagtcagtgccacatctgcactggcccccaaggtcagctccctgggtctgtctccaaaaatggttgctgatgacatcaccaaccattgactggaagagtctgaggatgatagtgaaactgaccagccacagcagacaggcccagattgaggtggtgccttctgcctctgccctgatcgtcacaaccctcaggaaccaccgacagaaagaaagaaacacaaaaacatgaaacacagtggtagcaccacttctgatgagattgtcaacattgcctaacagatgcagcagcagtctttagccagagaactctctggaaccattaaagaattcctgggggccggttgcggtggctcatgcctgtaatcccagcactttgggaggccgaggcgggaggatcatgaggtcaggagatcgagaccatcctggctaacgtggtgaaaccccgtctcttactaaaaatacaaaaaaattagccaggcatggtggtgggcgcctgtagtcccagctactcaggaggctgaggcaggagaatgctgtgaaccctggaggcagagcttgcagtgagccgaatatgcgccactgcactccagcctgggcaacagagcaagactccgtctccaaaaaaaaaagaattcctggggcctgcccagtctgtgagctgccatgttgatagtatcacagatgataccaacagtgaagctgtggaatgcccagctagttaaagaatgcaaaggaaaatattttcacaaagggttatctgataaccaaaaaataaaaagacatttcatctaagccactt

SEQ ID NO: 215000 - DNA, 2714 bp, Homo sapiens
cccagagttccttcgagctccccgagtccccgcggagcagcggcggtcgaggggcggggacgggggcggagcccaggaacgccggcccccagggctggaggctggggcggccctgaggacgcgtgcggggcaggtcacgcttgggcctggctgcctcaggagccaccctgcacggcgccgggcgaggctgtgcgcgccctcccggaccctccactttggggctttgcggtgtagcggcgcgccccactcccttacgtgttcagtcccgaatcacgtacgggccgctgcagctccaggacggcggacgccagcgctctcggatccccaggcccctccgtgctcatcccggaccgctccgtccctgaggaaaaaccgccccgtgcccggaaccgcggcttctcccacgcggggcaggccggggctgtgagggggcagcccgcctgcggactaggccgggggtttgaggaggcggctctgccggggacaaagccgggggcgtgaggggcggttctgccgggttcggggcgcgcggggcaggttgcgtgaagaggcggaaagtcccactcgccctcggcttctccctgcccggccgccggtgtcccgcccgccgcctccccgcgcagcccggcccgacccgcggcgatggcccagcccggggacccgcggcgcctctgcaggctggtgcaggagggccggctgcgcgccctgaaggaggagctgcaggcggccgggggctgcccggggccggccggggataccctcctgcactgcgccgcgcgccacgggcatcgggacgtgctggcctatctggccgaggcctggggcatggacatcgaggccaccaaccgagactacaagcggcctctgcacgaggcggcctccatgggccaccgagactgcgtgcgctacctgctgggccggggggcagcggtcgactgcctgaagaaggccgactggactcctctgatgatggcctgcacaaggaagaacctgggggtgatccaggagctggtggaacatggcgccaatccactcctgaagaacaaagatggctggaacagtttccacattgccagtcgagaaggcgaccctctgatcctccagtacctgctcactgtttgcccaggtgcctggaagacagagagcaaaattagaaggactcctctgcatactgcagcaatgcatggccatttggaggcagtcaaggtgcttcttaagaggtgccaatatgaaccagactacagagacaactgtggcgtcaccgccttgatggacgcaatccagtgtggtcacatcgacgtcgctaggctgctcctcgatgaacatggggcttgcctttcagcagaagacagcctgggtgcccaggctctgcacagggcagctgtcacagggcaggacgaagccatccgattcttggtctctgaacttggcgtcgatgtagatgtgagagccacatcaacccacctcacagcacttcattatgcagctaaggaaggacatacaagtacaattcagactctcttatccttgggagctgacatcaattctaaagatgaaaaaaatcgatcagccctgcatctggcctgtgcaggtcagcacttggcctgtgccaagtttctcctgcagtcgggactgaaggattctgaagacatcacgggcaccctggctcagcagctcccaaggagagcagatgtccttcggggctctggccatagcgcaatgacataaggatgtttccaagaggaggcaataaagtgcatgagttgctgggagcctgagcacctttcgtttttcggctcagagaaagccaagtgcaacttgcttcagtcatcctgaacctgagttcaaccaaccgcagccacctacgtttgaccccagcgagatcaaagttgtatatctgaggtgtaccagtggtgaagtcagtgccacatctgcactggcccccaaggtcagctccctgggtctgtctccaaaaatggttgctgatgacatcaccaaccattgactggaagagtctgaggatgatagtgaaactgaccagccacagcagacaggcccagattgaggtggtgccttctgcctctgccctgatcgtcacaaccctcaggaaccaccgacagaaagaaagaaacacaaaaacatgaaacacagtggtagcaccacttctgatgagattgtcaacattgcctaacagatgcagcagcagtctttagccagagaactctctggaaccattaaagaattcctgggggccggttgcggtggctcatgcctgtaatcccagcactttgggaggccgaggcgggaggatcatgaggtcaggagatcgagaccatcctggctaacgtggtgaaaccccgtctcttactaaaaatacaaaaaaattagccaggcatggtggtgggcgcctgtagtcccagctactcaggaggctgaggcaggagaatgctgtgaaccctggaggcagagcttgcagtgagccgaatatgcgccactgcactccagcctgggcaacagagcaagactccgtctccaaaaaaaaaagaattcctggggcctgcccagtctgtgagctgccatgttgatagtatcacagatgataccaacagtgaagctgtggaatgcccagctagttaaagaatgcaaaggaaaatattttcacaaagggttatctgataaccaaaaaataaaaagacatttcatctaagccactt

SEQ ID NO: 215001 - DNA, 2797 bp, Homo sapiens
cccagagttccttcgagctccccgagtccccgcggagcagcggcggtcgaggggcggggacgggggcggagcccaggaacgccggcccccagggctggaggctggggcggccctgaggacgcgtgcggggcaggtcacgcttgggcctggctgcctcaggagccaccctgcacggcgccgggcgaggctgtgcgcgccctcccggaccctccactttggggctttgcggtgtagcggcgcgccccactcccttacgtgttcagtcccgaatcacgtacgggccgctgcagctccaggacggcggacgccagcgctctcggatccccaggcccctccgtgctcatcccggaccgctccgtccctgaggaaaaaccgccccgtgcccggaaccgcggcttctcccacgcggggcaggccggggctgtgagggggcagcccgcctgcggactaggccgggggtttgaggaggcggctctgccggggacaaagccgggggcgtgaggggcggttctgccgggttcggggcgcgcggggcaggttgcgtgaagaggcggaaagtcccactcgccctcggcttctccctgcccggccgccggtgtcccgcccgccgcctccccgcgcagcccggcccgacccgcggcgatggcccagcccggggacccgcggcgcctctgcactgcgccgcgcgccacgggcatcgggacgtgctggcctatctggccgaggcctggggcatggacatcgaggccaccaaccgagactacaagcggcctctgcacgaggcggcctccatgggccaccgagactgcgtgcgctacctgctgggccggggggcagcggtcgactgcctgaagaaggccgactgggtcctcacagaaggcacagaggttgccggtcaaagctgttttcctgcctgccagacccctgaatcctctaggttttccatctgtgccaaggatgtgtgtgttttgaagacctggcccctggcttctaatgtctcagctgcctccatctgacagcttctcctggttggccttaggactcctctgatgatggcctgcacaaggaagaacctgggggtgatccaggagctggtggaacatggcgccaatccactcctgaagaacaaagatggctggaacagtttccacattgccagtcgagaaggcgaccctctgatcctccagtacctgctcactgtttgcccaggtgcctggaagacagagagcaaaattagaaggactcctctgcatactgcagcaatgcatggccatttggaggcagtcaaggtgcttcttaagaggtgccaatatgaaccagactacagagacaactgtggcgtcaccgccttgatggacgcaatccagtgtggtcacatcgacgtcgctaggctgctcctcgatgaacatggggcttgcctttcagcagaagacagcctgggtgcccaggctctgcacagggcagctgtcacagggcaggacgaagccatccgattcttggtctctgaacttggcgtcgatgtagatgtgagagccacatcaacccacctcacagcacttcattatgcagctaaggaaggacatacaagtacaattcagactctcttatccttgggagctgacatcaattctaaagatgaaaaaaatcgatcagccctgcatctggcctgtgcaggtcagcacttggcctgtgccaagtttctcctgcagtcgggactgaaggattctgaagacatcacgggcaccctggctcagcagctcccaaggagagcagatgtccttcggggctctggccatagcgcaatgacataaggatgtttccaagaggaggcaataaagtgcatgagttgctgggagcctgagcacctttcgtttttcggctcagagaaagccaagtgcaacttgcttcagtcatcctgaacctgagttcaaccaaccgcagccacctacgtttgaccccagcgagatcaaagttgtatatctgaggtgtaccagtggtgaagtcagtgccacatctgcactggcccccaaggtcagctccctgggtctgtctccaaaaatggttgctgatgacatcaccaaccattgactggaagagtctgaggatgatagtgaaactgaccagccacagcagacaggcccagattgaggtggtgccttctgcctctgccctgatcgtcacaaccctcaggaaccaccgacagaaagaaagaaacacaaaaacatgaaacacagtggtagcaccacttctgatgagattgtcaacattgcctaacagatgcagcagcagtctttagccagagaactctctggaaccattaaagaattcctgggggccggttgcggtggctcatgcctgtaatcccagcactttgggaggccgaggcgggaggatcatgaggtcaggagatcgagaccatcctggctaacgtggtgaaaccccgtctcttactaaaaatacaaaaaaattagccaggcatggtggtgggcgcctgtagtcccagctactcaggaggctgaggcaggagaatgctgtgaaccctggaggcagagcttgcagtgagccgaatatgcgccactgcactccagcctgggcaacagagcaagactccgtctccaaaaaaaaaagaattcctggggcctgcccagtctgtgagctgccatgttgatagtatcacagatgataccaacagtgaagctgtggaatgcccagctagttaaagaatgcaaaggaaaatattttcacaaagggttatctgataaccaaaaaataaaaagacatttcatctaagccactt

SEQ ID NO: 215002 - DNA, 2619 bp, Homo sapiens
cccagagttccttcgagctccccgagtccccgcggagcagcggcggtcgaggggcggggacgggggcggagcccaggaacgccggcccccagggctggaggctggggcggccctgaggacgcgtgcggggcaggtcacgcttgggcctggctgcctcaggagccaccctgcacggcgccgggcgaggctgtgcgcgccctcccggaccctccactttggggctttgcggtgtagcggcgcgccccactcccttacgtgttcagtcccgaatcacgtacgggccgctgcagctccaggacggcggacgccagcgctctcggatccccaggcccctccgtgctcatcccggaccgctccgtccctgaggaaaaaccgccccgtgcccggaaccgcggcttctcccacgcggggcaggccggggctgtgagggggcagcccgcctgcggactaggccgggggtttgaggaggcggctctgccggggacaaagccgggggcgtgaggggcggttctgccgggttcggggcgcgcggggcaggttgcgtgaagaggcggaaagtcccactcgccctcggcttctccctgcccggccgccggtgtcccgcccgccgcctccccgcgcagcccggcccgacccgcggcgatggcccagcccggggacccgcggcgcctctgcaggctggtgcaggagggccggctgcgcgccctgaaggaggagctgcaggcggccgggggctgcccggggccggccggggataccctcctgcactgcgccgcgcgccacgggcatcgggacgtgctggcctatctggccgaggcctggggcatggacatcgaggccaccaaccgagactacaagcggcctctgcacgaggcggcctccatgggccaccgagactgcgtgcgctacctgctgggccggggggcagcggtcgactgcctgaagaaggccgactggactcctctgatgatggcctgcacaaggaagaacctgggggtgatccaggagctggtggaacatggcgccaatccactcctgaagaacaaagatggctggaacagtttccacattgccagtcgagaaggcgaccctctgatcctccagtacctgctcactgtttgcccaggtgcctggaagacagagagcaaaattagaaggactcctctgcatactgcagcaatgcatggccatttggaggcagtcaaggtgcttcttaagaggtgccaatatgaaccagactacagagacaactgtggcgtcaccgccttgatggacgcaatccagtgtggtcacatcgacgtcgctaggctgctcctcgatgaacatggggcttgcctttcagcagaagacagcctgggtgcccaggctctgcacagggcagctgtcacagggcagggaaggacatacaagtacaattcagactctcttatccttgggagctgacatcaattctaaagatgaaaaaaatcgatcagccctgcatctggcctgtgcaggtcagcacttggcctgtgccaagtttctcctgcagtcgggactgaaggattctgaagacatcacgggcaccctggctcagcagctcccaaggagagcagatgtccttcggggctctggccatagcgcaatgacataaggatgtttccaagaggaggcaataaagtgcatgagttgctgggagcctgagcacctttcgtttttcggctcagagaaagccaagtgcaacttgcttcagtcatcctgaacctgagttcaaccaaccgcagccacctacgtttgaccccagcgagatcaaagttgtatatctgaggtgtaccagtggtgaagtcagtgccacatctgcactggcccccaaggtcagctccctgggtctgtctccaaaaatggttgctgatgacatcaccaaccattgactggaagagtctgaggatgatagtgaaactgaccagccacagcagacaggcccagattgaggtggtgccttctgcctctgccctgatcgtcacaaccctcaggaaccaccgacagaaagaaagaaacacaaaaacatgaaacacagtggtagcaccacttctgatgagattgtcaacattgcctaacagatgcagcagcagtctttagccagagaactctctggaaccattaaagaattcctgggggccggttgcggtggctcatgcctgtaatcccagcactttgggaggccgaggcgggaggatcatgaggtcaggagatcgagaccatcctggctaacgtggtgaaaccccgtctcttactaaaaatacaaaaaaattagccaggcatggtggtgggcgcctgtagtcccagctactcaggaggctgaggcaggagaatgctgtgaaccctggaggcagagcttgcagtgagccgaatatgcgccactgcactccagcctgggcaacagagcaagactccgtctccaaaaaaaaaagaattcctggggcctgcccagtctgtgagctgccatgttgatagtatcacagatgataccaacagtgaagctgtggaatgcccagctagttaaagaatgcaaaggaaaatattttcacaaagggttatctgataaccaaaaaataaaaagacatttcatctaagccactt

SEQ ID NO: 215003 - DNA, 1777 bp, Homo sapiens
cccagagttccttcgagctccccgagtccccgcggagcagcggcggtcgaggggcggggacgggggcggagcccaggaacgccggcccccagggctggaggctggggcggccctgaggacgcgtgcggggcaggtcacgcttgggcctggctgcctcaggagccaccctgcacggcgccgggcgaggctgtgcgcgccctcccggaccctccactttggggctttgcggtgtagcggcgcgccccactcccttacgtgttcagtcccgaatcacgtacgggccgctgcagctccaggacggcggacgccagcgctctcggatccccaggcccctccgtgctcatcccggaccgctccgtccctgaggaaaaaccgccccgtgcccggaaccgcggcttctcccacgcggggcaggccggggctgtgagggggcagcccgcctgcggactaggccgggggtttgaggaggcggctctgccggggacaaagccgggggcgtgaggggcggttctgccgggttcggggcgcgcggggcaggttgcgtgaagaggcggaaagtcccactcgccctcggcttctccctgcccggccgccggtgtcccgcccgccgcctccccgcgcagcccggcccgacccgcggcgatggcccagcccggggacccgcggcgcctctgcaggctggtgcaggagggccggctgcgcgccctgaaggaggagctgcaggcggccgggggctgcccggggccggccggggataccctcctgcactgcgccgcgcgccacgggcatcgggacgtgctggcctatctggccgaggcctggggcatggacatcgaggccaccaaccgagactacaagcggcctctgcacgaggcggcctccatgggccaccgagactgcgtgcgctacctgctgggccggggggcagcggtcgactgcctgaagaaggccgactggactcctctgatgatggcctgcacaaggaagaacctgggggtgatccaggagctggtggaacatggcgccaatccactcctgaagaacaaagatggctggaacagtttccacattgccagtcgagaaggcgaccctctgatcctccagtacctgctcactgtttgcccaggtgcctggaagacagagagcaaaattagaaggactcctctgcatactgcagcaatgcatggccatttggaggcagtcaaggtgcttcttaagaggtgccaatatgaaccagactacagagacaactgtggcgtcaccgccttgatggacgcaatccagtgtggtcacatcgacgtcgctaggctgctcctcgatgaacatggggcttgcctttcagcagaagacagcctgggtgcccaggctctgcacagggcagctgtcacagggcaggcatcctggctaacgtggtgaaaccccgtctcttactaaaaatacaaaaaaattagccaggcatggtggtgggcgcctgtagtcccagctactcaggaggctgaggcaggagaatgctgtgaaccctggaggcagagcttgcagtgagccgaatatgcgccactgcactccagcctgggcaacagagcaagactccgtctccaaaaaaaaaagaattcctggggcctgcccagtctgtgagctgccatgttgatagtatcacagatgataccaacagtgaagctgtggaatgcccagctagttaaagaatgcaaaggaaaatattttcacaaagggttatctgataaccaaaaaataaaaagacatttcatctaagccactt

SEQ ID NO: 215004 - DNA, 373 bp, Homo sapiens
taaaccctgttcttgggtgggtgtgggtttaatactaagttgaaatgatatcatttacgggggaaggcggtgtggcagaagggaaagaaggccctcattcttatataataaatctatcgtccagtgctgattacctgtcatactgaggttttgatgaggcccagagggttctagcttatgatgtgccttttttcctgattggttaatattaatgtatacaccaagacttcattataacctaggaacacatgctagcaaggtagaattcaaaagcccaccagaattaaacagtttgaacggcagctagttttaattttcaggttcattcccatttctctccattggcaagttgtatttgttttaaccataatct

SEQ ID NO: 215005 - DNA, 430 bp, Homo sapiens
tgatgttcaaacccaaaggcataaaatgccacgatgtgttgtcagtttcccttagtaagtggagattccaaattgtctgtttctgtgtctagcagattcttgtcaacattgattgggattcccatttacagttggcaagggtcatcagtaagtcttccaggagactcttcatactcaattcgtgggaactgacttactgtatctagccaaaactaacttcttaagccaaaagcagtttggttttatgggtttaaaaaactttaggtaggaaacatgaaatacatttctcttactaagttttccttgattagttgttcattctctgtgcacttgttccttttgggatagtagggtaaatgtagcatgatgttgccaagaaaacaaatggacttttaattcagaacaagcatagcacttctcagttaaatgt

SEQ ID NO: 215006 - DNA, 408 bp, Homo sapiens
atcccatccatgtcctaccgagtatggcctgggccaatcccacccacgtccgtccccattcacgtcctttacaaacagcccaccacaccctatatctagatgcccggtcctggcctagtgaggtgactcacacctataatcccagcactttgggaagccaaggcaggaggattctctgagcccaagagttcagaccagcctgggcaacaaagcaagaccccgtctctacataaattaaaatagttgggtgcggtggtgtatgcctgtagctccagctaagcaggaggctgaggcaagaggatagcttgagcccaggagttcaaggctgcagtgggctacgattgcgccactgcggtccagcctcggtgacagagcaagacaccgtcattaaaaaaataaaattaaaaa

SEQ ID NO: 215007 - DNA, 569 bp, Homo sapiens
tcaagaacaaaaatgaccaaagtctccttccttgtggagccacagttaagtaggagagagaaaataaacacatatgtatataaggtacgcagaatatcaaatgataagtccatggagaaaaaaggtcaagagaagctgacgagaacatgcccaggggaggcgagaggaatgcagcgctgaaggaatgtaggagaacattctagaaagaagcggtagcaaggacaaaagtcctgaattgggagcagccagtgaacaaggagggcagggaagatgaggccagttctggtagggccttgctcagaatccagctgccgttctgcgtcaatcagtcatgtccagagtcaaaattatcgtaatttaaaaatgatttttcaaagtacatagagcctaaatctgaaatcaatgactgcaaccgcagatacccagagaacccaaacaggtaagaattagtggagtaggtatgctaatagcagggactccacccggtgccattcaggaatggtctccgtgttgctaggtgttctgatttttcaaaatctgaatttttaagagaaatgtcccgcttttaa

SEQ ID NO: 215008 - DNA, 516 bp, Homo sapiens
gctagtctgagctttctcacataatggtttcagtgttcccagagcagataagccccaaggtgctagtgctgttgaagcctctgcttgctccatgtttcctcccatcctcttggtcaaagcaagtctcatggccaagggtagagaaactgattcaaagggtagagagaccgacaccacttcttgatgggacgtgctgctaagaatttgttgccatttgttgtaatcaagtatagtctgtctctgacaaaaattattcacatttcttttgcaagaaaaatatgctccctcccatcccaggattccccgaagtctcatcagattatagtattagcctcgaagtctagagacttatgcctgatctgcatgagatctagatacagttcagactcctcagagatagctcttcttatgctgatcctcttgatcccaagacaatgaacaggctgtctttcccatacacatccaacatataatgatgagataggaaaaggataacaaaagtagacaccccattta

SEQ ID NO: 215009 - DNA, 834 bp, Homo sapiens
attaattctttaataaaaaaacacacagaaattaaggtagtcaagaaagatagcagagtgattgaactataaagaaaataagatctcttccaggttttaaataatcacaatattagagaatctatatagtcttgccaggtcctatggtacaatgcattatataagtatattgtaacgaattacaaagatacatcagagagaattccaatcttcttagagtacagtctggtaagaaaaaaggcagacatacaaatggatataatgaaagatataaaataggatcgcaggggaggtgaaaatagaagtcatggaaacttcggagtggaaagcttacttctggctgtgggaaattgggaaagcttcaagaagaaagttaagtatgaattagggcttaaaggggatttagaaacgcagttgtaaatatcagagtactccaagcagagagagaaaaaaaaaagagtatgattagaggcagtgaggtaggagagcataaatgcaaagagcaagcagttaaaggatgcgtgaaagtgaatagggcaaaacctgcatgattgacctctccactgggatgtctaatcgtgttttccacccacacaccaactctgttcttttctgtcttccaccagccagttgctaaaactctaaaggtaggagttttcattgatttttctattttcttcatggttttaatccaatttatcagcaaatcctgttgactctacctgtaaagcacatcctgacccacccacttttttccatctttacataaaacacctgaaatacaagtcatcatttcttgcttgagttactgcaatagcttccctccttccactg

SEQ ID NO: 215010 - DNA, 499 bp, Homo sapiens
gctgttggcttctacaaaccacatgtgattccctggttctgtcagtgctggaaaattcagaagaaaaataagagcaaatcgattctgaaaagtagttatttaatcagaatgggggtagtgtgtgctttcccttccaaagcacaactatgagttgcccatcaaagcttataatcatctcctctaggagtgttcctcaacatgaacgagtttcaaatgttggcaggtcatacttgttgaagaccccctgtagtctggagcagtatttcccaactaagaatttaggaaagagtctaattccataattttacttaaatctgtcccagggggcctggtttaggtctgataccatatgctcttgtccatgatgacagtagctgtgccccagctctgtttcagggattctgcaaatttaattatacaacaataatagcttacactgttgagcacttactatattctgggtaccattctaagaatgctattactattatactcatgt

SEQ ID NO: 215011 - DNA, 367 bp, Homo sapiens
gaatatcacactctgcggactgtggtggggtggggggaggggggatggatagcattgggagatatacctaatgctagatgacgagttagtgggtgcagtgcaccagcatggcacatgtatacatatgtaactaacctgcacaatgtgcacatgtaccctaaaacttaaagtataataaaaaaaaaagaaaaagaaaaaaaaaagattgagaagcgggtggggcaagccatgagggggaaagaaagcagatgaacgaacactctttttacagaacaaatccctttcttatcagttcaaccatcaatctttagttttctgaacactgttgctatatgctcaaattgtccaaggtatgatgagggcatga

SEQ ID NO: 215012 - DNA, 1092 bp, Homo sapiens
aacaaaaatataaaaattagccgggcatgacagcgtgcacctgtagtctcagctacttgggaggctgaggtaggaggatggcttgagcccaggaagtggaggttgcagtgagctgagattgtgccactgcacaccagcctgagcaacacagccaggccctgtctcaaagaaaaaagattcactccatgaattatgtcatccagaaccaggtgtgaaactcacctacatttttttctttcattgaaaaggtgcatgaaaccatcagggttattgactttatctcatatggagaaaagagcttgtagctaggttttaattatagctctgcacatcctcttggcctaattaaagtttgctttactccaaggaaggaggaagtgtataaagctttgcagtggtactgtttgtatctcagttcctcagaaaaaagcctgcaaataatgcccctgggtggttcttggagttggcagtggtatggaaaatttcgttaggtagtggttagctgtttgtgatggcctgctttttcattatagtatagtcctgtcctctttcgatctgattctcagaagcccaaggtagacagacacctgcccctattttcagtacttcaccttctccagcctactgggtcctctcaccctgtggtgtctacttaacacgcaacttgaagaatttctgggaaattgaccaaaacagctctttggaaagaagctaggcctcagtcccaaagggaaaggtggctgatgtgactttgacttgaggattgtctcctgtgatgtgctcctagtggggctacaggggtcagtcctttgctttgagcacctctgtagtccactacccatggacacattgctatcctctgagggggatggagggagtagagccctctactgctagcccattttatggaggtttgatgagggtcttaggtgaataagcttcaactcaggtccttggtcttggtttgttaaattattctatcctttctgaagccagggagatttgagaatttccatgaccccattatgaaattgatgatgaagagttttcatcttgtgaacagagttcagatgaatatgatcacaaagtcaa

SEQ ID NO: 215013 - DNA, 1025 bp, Homo sapiens
gtccttcccttttcaaaaactcgaggatagatgaatttagacagtattcccacagttggtggtactgactgataggcatcttcgtaaatatccagttggtatctgatcttcagtactgtaggaggggcctggtggaaggtgactggatcattggggcagatttgcactttgctgttcttgtgatagtgagtgagttctaacgagatctggttgttgaaaagtgtgtagcactttcccttcactctctgtctctctgtcctcccaccatgtgtagatgtgcttgctttcccttagcccttccaccatgattttaagttcactgaggcctccccagtcatgtctcccatacagcatgtagaactgtgagtcaattaaatatcttttgtttatacattctcttgtctcaggtagttctttatatcagtgtgagaacagactaatgcagtattacctctttctttcctcaaatatcaaagttcaaattttgtaggcctctaagaaacattatatagcagtgcagctgtaaaatgagcaggaaaggttgggaaggcaaaccttaggcacacctgtgcagacgtaaacctgctgaaggcttaggtttacttctacacaggtgttttctgtagtatggcaccaaatggacatgtcagttacagaaagctaactctccaaggtcagcttaagtcctgtccgttgactcaagtatcacaccatgaacacatttaacttaaattaggtgtattcaggaatgagtgggtttggatgcagatgtcaatcacttcacagtgaatgatgaatttaatttaacggttttgatgtctcagatgacatctttatcataatttgtctctttttgtttttttgacagcctgctaccacagcgttgataaccttcctggttatctccttatgttaggcagtgaacttcctgacagtaagcagcgtaactgcaatgtattctttttaaagaattgcaactacgtggtaaaataggatatacctctagatattattctgtcataagt

SEQ ID NO: 215014 - DNA, 401 bp, Homo sapiens
caataaataactgagttaaatagataaggaaaggcatgttcacctggtctactgatattttttaaattccagttgagtagagagcaatgttaataagactaaggttttgggccagtcccatttttgcctacttgctttgcacctggaaaaatatttgtaactgcatgcaaactctttcccctcctcgtcttcaacaatctgtaaactttccctgagcagctaccaagtgtaacacaaagtgggaatgaaggaccattaagaaatcatctctgtgccatgcgcggtggctcaagcctataatcccagcactttgggaggccgaggcgggtggatcacctgagctcgggagttcaaggccagcctggccaatatggtgaaaccctgtctctactaaaaataca

SEQ ID NO: 215015 - DNA, 372 bp, Homo sapiens
aatcactgggcatggcagagccttgatttgtaatgtttgctaatttacgtggtacaagtgctccagtacggccagtttcacactactaatgtgaagccactgatgagttgagaagtgatacacacagctcttgcaagctggtacgaacagaatccagcacaccactgtaactaaggtgtctctcagcagttaggactgacggtcaagaatgttggaatttgtagcttatcttccctactaagaaacaaatctattggtttcaacactgtatacctaggacctaaatgttatttaatgaataaatgatactcctttcccccatgaagtgttttatcataatatatagagatgcaggaaacccttattattaga

SEQ ID NO: 215016 - DNA, 432 bp, Homo sapiens
ttattttactgatagatcaccagtgcccacaataatgccaggcacataacaggcaaatatttgttttattcattcatccaacaaatatttattgagcatatataatatgctaggcattgctctatatgctggggatataacaaaacatgacaaaatttgctgtcactgttaagtttactatgagcaaatacattaaatatgcttagcctagagaagaaaaggtgagaagaggaagacaaactagcagctttcaatgatgtatagggcaattaaatgcaggggtgattccaagagcctgaaggaggaacagtgagctaagattaccgagtagctgctttcagctcaacctaagagtcagaactgggggaggaccaaacaggagcaaccagaagtagaaagctttctgtcactgaagaaatctggccagtgggc

SEQ ID NO: 215017 - DNA, 515 bp, Homo sapiens
tgtctccaggactctggggggctgtattgctggcagtggaggctggaagggtgggaaggggaggaggacagctgaggctcattcttccctttcacttggggagggggtgctcagatagggcaggatgtggtggggctgtgggctgcagaggcagtgaggctaggggagggagaattataaaacaggaacaaggttcaaggggagaagggaaggcaggactggatgatgcagagtgcacttcatagaggccgggagtactgccctccaggaaggctgagaccccctcatgtccagggaccccgggtctaaggccttgggccgtaaccatggctgggccaaaggcagcagcctccttcagggctcccaggctgcagccatgcccaggaaagggaagaggggttgccactgacttttcgtctcaggctagcaatggccaaagaaaaggctcctggacatcattttgtcctcaccatgttcccaagcaggacagtgatgaatccagaacttgggtgtga

SEQ ID NO: 215018 - DNA, 425 bp, Homo sapiens
tgtctccaggactctggggggctgtattgctggcagtggaggctggaagggtgggaaggggaggaggacagctgaggctcattcttccctttcacttggggagggggtgctcagatagggcaggatgtggtggggctgtgggctgcagaggcagtgaggctaggggagggagaattataaaacaggaacaaggttcaaggggagaagggaaggcaggactggatgatgcagagtgcacttcatagaggccgggagtactgccctccaggaaggctgagacccccccatgcccaggaaagggaagaggggttgccactgacttttcgtctcaggctagcaatggccaaagaaaaggctcctggacatcattttgtcctcaccatgttcccaagcaggacagtgatgaatccagaacttgggtgtga

SEQ ID NO: 215019 - DNA, 438 bp, Homo sapiens
actctgcttctgatggttgtctggctgttgactagggcagtgggggaaactggattccgtatcttgcatcctccagcaggctagcttaggcttgtttacatggctatgatagcagatcccagaaggtaagcagaaacacacactgtctcttggtctcagcttctctggcataaagtcatttctgccacattctgttggtcagagtaagtcacatgactcagcccagcttcatagggtagggaaatagactgtacttcctgatgagaatctttggaaagtgacactgaaaaggagcatgggccaggcacagtggcttacccctgtaatcccagcactttgggaggccaaagcaggaggatcacttgaggccaagagttcaagatcagcctgggcaacataatgagactccgtctctccaacaaaaacaaacaaacaaac

SEQ ID NO: 215020 - DNA, 883 bp, Homo sapiens
  misc_feature (877)..(877): n is a, c, g, or t
ggtcccccctcccccgccaaaatctgtagaccataagtcttggcctacactgacctggtttgtaaaatatcttcctctgtgtacttttcccttcagcctcaggctcttggctgattcgctcacaacagaagcagcttggctttcctctggaagtaccaatttgaaagcccaccagcctgcaaacctagagtgtattctccacccctgggtcacagaacttcgttctccccggctctgtaacccaaggaccctacagcctctgaggcctaacacccaagctcttccttgcagaagagctgagatgctaaggagaccatctggagtgtcataataagcccttgggatttgctgagctcccacatggctttcttcaaccacctggcccactttcttcaaccacattccactttggaatgcgtgtctttaaggcaccaagtgatcttaagaatgggctctgtttttgaattcagcaatccaagttcctatctatctcggtgggacctccaaaaaaaagaaaaaggattggcttggcttctaatgtaaggcctgccttttacacaccagttgtgtgtttgttagtggctgctggatgccagtccacaccctcaaacacctcacagtcccaaacggggtgctcctacaggtcccagggtcctgttagtggaagaaaggcagttccaggaagtcttcctctagccttcatgacaggaagtagttaatcctctgggaaatagacttgcagccctgggaagaaaagagttgttcctccttggggacatacaccatcatctgggctatttcatccagtgtctcttctttatacaggagctcctggctcaggaaggcatcccgtgcacacagcctcacgtgacggtantccaaa

SEQ ID NO: 215021 - DNA, 383 bp, Homo sapiens
tcccagctggtctcataccacaagataggagatgtttcaggacacccagcctcccctacacctcagacatgcgtgaggacacaaggcctgggatgccaaccccagcctgtctaaattctcccgggctcccgtgcacagctgacatttccaagggaacgtccgcggctgggctgaccctcacagcctctaagtagccagaataacctcagcggccccagcactgatgagtacgttttgtggcatttaaggcaggtttaaagttaaagataaaaaaagcccatgacgcttctttggtcaaccggcaagggcgcaatagtaacggtacgagctcactgaattctctttcatttaaggtgtctctttccccataaatctcccataaa

SEQ ID NO: 215022 - DNA, 138 bp, Homo sapiens
atcctaaatttattatttaaattgaagcgacaattaaatgccttcccctaaatttaatttcagaccaatattgctttagcaataaattcttccaaatgtttatggaagaaataatgccagtgttacacaaactcttat

SEQ ID NO: 215023 - DNA, 876 bp, Homo sapiens
ccttcagtctggcatacagggtagacccactggtacctggtacctcactctgggggtgaggtggccacccacctaggtctgggtcctgtagcagtttggcagcaacatctgggtgataagagaaggcgatttgacctactcccagggacaagaagctttgactcttcaagatcataaagtcttccctcctggccttgggtcctcctgttgcgggagaggtgaggtggggtgagggtcctccgggagggcaggcttggcagagcccagcaccatctcagcagacactgctcttctcctactctcagcacctccaaggcagtgagtggctttctcttgtctagaggacaaaatccgttcctcacctggacacaatgaacctgtctgtgggatttagggagcatcaaggagggaatttagtttccgcagacttcaaggaagactttctggaggaggtgatgcctgagagctatccaggagagaagagtgaaaaaatgttaagcagtggaaaaacatgaaccaaactgtggctgcatcttcccatagggcaacagggacttagcgcgtgcaatcaaggatctccagatggggataacccaggtgtgcccaacctaatctcagtgtccttggaagagggatgcagaaggagtcagaatcagagaagaaggtgacacgatgaaggaatccgaaattagagtgatgctctttgaagatggaggaagggaccacaagctgagaaatagaggtggccactagacactgaaaaaggcaaggaagtggattctcccctggagcctccagaaggaaccagctctgccgacaccttgacattagcccattgagactgatttaagggctgctggcctccagaattgtaag

SEQ ID NO: 215024 - DNA, 622 bp, Homo sapiens
tctattagtctcagatcttctttgctttgcttttttcctttttctgcttccttcagactagtttagtaatttttatgatttagttacatatctgtatatgcataacttttttagttattaatctagttttacatttctttacaatttagtcatatcttttttggtataagtttatttggtattaggtataactctttgctgtcttagtagttgctttaggatttataatgtatgaatttacctcatcacaatccaccttcaagtaatattatatcatatcatagatggtataagaaattacaatcatattttcacttcttttctatcaaccagatcccagcctagatctgtgggattatggctttcgttaagtttagaacatatttagccaatttttcctcaaatttttgattctgcctctcctcctatctctttggggacttatatactacctgctggaagtttgctcatcgttcactagtgtctcaaatttgtgaatcttttctttcatgatggcgaattaatctatgctcatatctactcagtgtagctttcatctccagcattgtaatttgtatctctaaaagtgcaatttggtttttaaaagtatcttctattgctt

SEQ ID NO: 215025 - DNA, 1138 bp, Homo sapiens
tgaggagtctcgctctttcgcccaggccggagtgcagtggcgctatctcggctcactgcaacctccgcctcccgggttcacgcgattctcctgcctcagcctcctgagtagctgggattacaggcgcccgccaccgcgcccggctaattttttgtatttttagtagagacgcggtttcaccgtgttagccaggatggtctcgatctcctgacctcgtgatccgcctgcctcggcctcccaaagtgctgggattacaggtgtgagccaccgcgcccggccagtaacagcattttttaattcagacaccaggaaaaaaaaaaagtaaaagaggactttaaaggagagttaaaatgaggagaactgagataggtgcaatggtcattttctaccaaggaattttccttcacagttatctttagcagtagttttcaacccttttttcactatgacacatgtgagggtcattcacatacaaagcattctcatgtatatactcatttagcaacaaagtgaaaaaaattaaatggattagtaaagctccacaataattgacaatcactaccacactggtgtacgtactaatatttctatttcagtgactgacttctgtgaatttgttcacctcaagagagtagggcatgaaattcaggttattaaaaaaaaaaatctattcagcacagatactgaccaaaaggaaagaggctggtggaaaaaccaatacagccaacctcttgttaactggtggaataccagccctggacacaagacttccacagctacaggttacccaactcccagcaagctagttgtcatcagttctctcttcctcccaaacaaagtacatgaagatacaagagcatgaagcatacacagagacaaattctcccatttgaatatgctctatttcattaaaaaaggagattcaggaatttaattactttataatattacagtattcataacagtgttcttatgacactgtgacataacatcaacactgaggcagctaaactttccaaaaatcctttctgtgatattcatagctctgtgtaatatagcctgacctatttagccaaaatatatcttagttatttcttccactataacaagcaaacctattttaccattcctaaaaaaa

SEQ ID NO: 215026 - DNA, 384 bp, Homo sapiens
atcttagccagggccaaattatgctccagggtctcctgggcctgaaactggtagtagcccaggcgggcctgctcccgagtgagtgttgcctccacttgctgcagcagcaggtccgtgggcagtccccggcaatgcgccagcccatagtgcagaacagcccagagccaggctgccaggctggctgcaggtcggctcactgcccgcagggctgcatcgtccatacctggagccttcagaattagatgtaactttatcagctctgagtctgttatcttctccttggggaagaacaccagctcctggaaggatgtatgttaacgggatggggaagccacggatgctctggaccttgacccaacagtttagccttgccaagtgtccctt

SEQ ID NO: 215027 - DNA, 402 bp, Homo sapiens
tagtaggtggtgtgtgcctgtagtccagctactccggaggctaaggcaggaggatggcttgagctggggagatggaggttgcagtgagccgagatcataccactgcactccagcctgggtgacagagccagaccctgcctaaaaaaaagaaaaagaagaaattttggtggagattttggagcagaagccagactcaggatagggagaagtggatacaatgcagataagaaggaaagaaggaaatagaattgacagacttggtgattgactggtaggggtgaaagagggcaaaatcaagggtaatccccaggtttcagctttggcagctgagtgagtggtgtcagctgatgaagcagatgtgtgtttggagggggatgtgcgcagatcagtagtctatgatga

SEQ ID NO: 215028 - DNA, 416 bp, Homo sapiens
gtgtgtgtgcatctgtgtgtgtcttagtccttttcagcacacatgctgaagtaggttccaatgaaatgaaatgaggaagtgcttaacagggaagctgtcgcctcagcagggagagcagctctctccctcctccgcacagaggatgccggctccggggtagagagtcctcgtgaaatccaatgggcttctctgctggagtgagttcaccagtctccccactgagaagtgtgtttaaattattcagtgagcttctttgatcctatctgttgaactatgttttgttttgttttgctctttgcagagggaagtgtttgtagatgctgggccaccttccaaagcaataaaaggcccatcctagagcatctgatgtgcccagcatggtctagattctaatggcctggtttattgccacaaac

SEQ ID NO: 215029 - DNA, 643 bp, Homo sapiens
taatttaactttcaagacttgacttggaagttactttgaaacagtctaggaaaatgaaaaactaaaccactcagcacctatggacatactaaagatggtgactatggtgatgccaaacttcacagaaacaaattctaaaatgaggacagtctgtacttcctgctgattatataaaatcactgccaagaaaaacacactacccgtactttcaatctttcaatgttacaacctgttactattcaaatgctttagtcactgctcaattcttgccttatctagtaatgtaaatctacgtaggctctgtctgctttaaaacagctaacacatgtaagtctgaagaaaccaatgggtacgaaagcacaagtgagcaaaattaaagagcagaattgtactgagtggctttatatgttcatctagtaccagaggctccacttttttttcctttgccaacaggccaccaagctacccctgaaaactaccatatgcctcaaatagtagttataaatgcttataagtacactagactgtaagaactccactaaattgttataggctggtatcttttgagatgacaccaaaattaaaatttggagcattaaaaataaaactaaattttactttacaaacaagagcaaagagattt

SEQ ID NO: 215030 - DNA, 824 bp, Homo sapiens
acaggcatgcgccaccacacccagctaatttttgtattttttagtagcgatggggttttactgtgttgcccaggctgttcttgaactcctgacctcatgatccacccacttcggcctcccaaagtgctgggtgggcgtgagccaccgcacccggcccccaattttttttttccaaaaaagtaaccagaaaagtcatctcaagacagtgttagagaaagcgttgtgtttcctcctctgagtcttttgtgggggctttatgggaaagggaggatgactcacttactctgaaatctgggcttccaggaagggcctctcccatccttggagcctcctcattctcctgtctctcactgtccccccacctctaccatgatgtcctcattctggaaaccccgagcagggatagtggcttgggcccttcgtctggcttttctccccacacttgctcccttctaacattttctccctcatctgacatggaaggggcaatggttaacccaggagggagggcagagaacaagggccccacatcctggctctgcctctgacaagctgtgtgaccttgggtatcagctgactcatcggagaagtgaggaggacggacttgggccgtgtctggatattaaactttgttgggtccctgacctctttgagaaactgatgcatgcttctcaagaggccgcaagtgcattttacacactatttcaggcaccccacagatcccccagattcaggctccacaggcttcatgttgaaaactccttaagtgacagtggtcaaggtacccaccaacacttatttaaccttgacagtttgcaaagttc

SEQ ID NO: 215031 - DNA, 775 bp, Homo sapiens
ccttgcacagccagcatcaggctggcctgccttcctgttcccgtcactgggtgacattgatcccagacacattctgatgactagtaaagttgcttttagtagccccagagccaggaggaataattcatatggaatttttaaagacgcccactcttggcgttaattacagcccaacgtacatttcttggggagattttcctgtgacaagtgaataccctctacattttcttaactggatgggaaaaggattttatgcccatacatcttgctaataaaccaaatcccttcttcagattcttgagtgaaacatttaaaatgtagtttctttagaaataaaagtatgaggcattttaaattatatgacagacaaaaaagtcaatgctcttgagctctttacagtaaataggttgtgtttactcataggatacagaatcatggatatcaaacatcaaaaataaattataaaaataatgtctcattttctgttgcatattattagcctgtctctcattccaccatttgttcttttgaactggaaaattgtgggctcctagtcactgcactaatctatctgaatatccaactaccagaaagggtttatcccatctcaagtttgtcagttgctttatatcgttaagggtgtttttgccaccctggttgtgttcataattaccattgagaaatgtcactgttattaaaatacattctgtgttccaactaactgcctctctgccctagcagtttctctcttacctccctcaaatcattgactagg

SEQ ID NO: 215032 - DNA, 452 bp, Homo sapiens
tcagataatcaggcagtagattctcataaggagtgtgcaacctagatccctcgcatacacagttcacaataaggttcacgctcctatgagaatctagtcaccgctgatctgacaggaggccgagctcaggcggtcatgctcgctcacctgctgctcaccttctgctgtgcagcccggttcccaacagaccatggactggtctgtggcctgggggttggggacctctggtataaagattagaggcagatatacctattaattaatgattatataattatgagaattaaactggtaatatctattatgtatttgggatttgctaattaatggtgataatagagattgtttctgccctgggggtagttcaaggataacacttaactaacagactaactaaactaacagaataatatgagaaaattaataaacatatgattcaaaaattggagaaa

SEQ ID NO: 215033 - DNA, 288 bp, Homo sapiens
tcaatctccagccttgacttcctctgtgagttccaaacttctgtatcctgatacctctatgtggatgtctggaaggcagtttgcaccatgtccaaaacagaagtcttgattttttttcctcccacgctgattttttctctacctgctcaatcatccacccagtttcttagaccccaaaccaaaaagtcatcctttgttcctcttccccatcatccatccgccagcccacgacagcgtctctcctcctctgccctgaccctactctcagcccccttctgtcgtcttctc

SEQ ID NO: 215034 - DNA, 171 bp, Homo sapiens
agtcacaatgagaaaagcctttatgcttttatttttcacacgttaattactgagaactttagtgagggaatattagtctagtctttttatttttaacaggaagacactgaaaggtaaagtaacttcaaagtcacagaactattttattgaatggccttttcgctattatta

SEQ ID NO: 215035 - DNA, 238 bp, Homo sapiens
caggttaaagtgaattatcctacagagagctgctgggaaaaaaggctgtttcagatctgctgagctgaaacccaaacccaaggagcccttcatcttacaaaaatccaggaattctggatgtggcctgcatgaagcatttggtgaaatgtatctattattttattttattttgagacagagtcttgctctgttgcccaggctggagtgcagtggcgccatcttggtgggttcaagcgat

SEQ ID NO: 215036 - DNA, 256 bp, Homo sapiens
aattagagtcctaagttagtggaccttaagttacagagtagtccccagctgacagccagcaaggaaacaaagaccttagttctacaactccaaggaactggattctgccagcaacctaaataaacctggaagcagcttcttccctagagtctccagataagagcaaagctaccaacaccttgattttaatcttgtaatgcacagctgagcttgcgtcgacgcggccgcgaatttagtagtagtagtaggcggccgc

SEQ ID NO: 215037 - DNA, 732 bp, Homo sapiens
tgtgtgtggccactgaagtgtctgcttggctagcttagccaaagactagacagaggtttcattaagtgattgcacccaatgagtctaccagtctttgctggaggggtatatacataaatttttctggaactattttagagtcacttgctggcatacaggacaacataggctcccaaccactgtggagcaccaaagacaaaccagagcagctgcacatcctcagcagctcccaaattccaaaatcttgggggatggaaccatctctcctggagtctcacctctgcacagtgaggccctggtggctactgtcctgacttctggtgattattttgcactggagtctctctttgttttagtcagtagaatctctaatgcccactttcactttctggtttaaatacaggctaaaggttccccactgctcccccagccccaaactctgtttcatcccagcacctaccttgggcccaccttcaatcctcattcctgctcctattactttctttttcaccccagattaaggcttctggggtatcctttcctaggacgcagaatgaggtatagtctgtcaccccaattgaagctcaacatttgttgagaatttctagtttttactctgtaattcagagatcttaggaagaattttgtcttccatctcccaaccttgttcagtacagcctggcctcccaggactatgtgccattttctattcttcctagagaatttcctata

SEQ ID NO: 215038 - DNA, 578 bp, Homo sapiens
tgagggtgacttataattttagttcttaatctagagaacacctcttatataccatgcatgttagtataatacttataaaaacctcaatggaaccatagatgcaaattaagtgaaagaagccaatctcaatgttgacatactgtatatgatgtgacattccaaaaaaaaaaaacaaaactatagcgataataaaaagatcagtgattcccaggggttgagggaggagatgaacaggtgcagtagagaggatttttaggacagtaatactattctgtataaaatgataatggtggatacacgtcattatccatttgtccaaactcaaaaactgcccaacaccaagtgtgaaccctaacataaatgatggtctttgctgataatgctgtttcaatgtaggttcatcaactgtaacaaacacagctctctggtgtgggatgctgatagttagggaggctgtgacaggtcaatggggaggggtgtggagagaaggtatttgggaattctctgtatactccactcaattttgctaactctactaaacctgtaactgctgtaaaaaaaaaaatagtctattaaaa

SEQ ID NO: 215039 - DNA, 340 bp, Homo sapiens
tgcattatggccagttgaaagttactgtaattttaaaggaggagggtgaaagggacctctccaaactcccaatccctccagtctcccctgttttactgaattcaaattgtgccacaaagactttagaaatagttaagaaaaatgagattgcttttaataggcattactttttcttctgttgctttattttttaaaatcatcatcacagacttaagtacgcctttaaaacattttaaacagggatacacatacatagtaaaatttttttttgaatatcaaaaaagagtgtattcctttttactgaaacccctagttcctcagtcccttctgtcgtcttctc

SEQ ID NO: 215040 - DNA, 672 bp, Homo sapiens
tcatttttggatcatgaaaaatgtgtttgtatcttttataagaaaaagccattgaacttattgatgttaaaaatgcaactatacttggtaaaataaaatcaagctgtgaactgatgcttactgcatattctgttagataagaggtgttagaaacatatttgatttttccatgagtcctgcacacaagtacacgcacagccccttattacagcactatatattcaaaagagtatgcaattgaaaacaatgtggttttttttcttgttgttccttagtagaatatcagagagcctaaactatgaacattggtgttactgtcctgatttctaccaccgtctgcatctttggcctgttttcattggaagtatcatagattgtcatttggacagaccattcctagcgaatactggcctttcgcggagcttggaaaaccctgtgggaaaatcagaaagctggtaagataagaggaagaagagatgtcacggtgtcagattatgtttgtattctgttctgtccaaagttctttacatcagtaaatgaaaaacaaaacaaatgatgcataggccacgccctgcagtgaaagatgcaagaacttgttcatattggtatgaatcgttcactgtatatgattcaaacatgtggaaataaatgtttgattacagtcattccaaa

SEQ ID NO: 215041 - DNA, 432 bp, Homo sapiens
tctgcggccgggccttcaccactaagggcaacctcaagaatatcagagagcctaaactatgaacattggtgttactgtcctgatttctaccaccgtctgcatctttggcctgttttcattggaagtatcatagattgtcatttggacagaccattcctagcgaatactggcctttcgcggagcttggaaaaccctgtgggaaaatcagaaagctggtaagataagaggaagaagagatgtcacggtgtcagattatgtttgtattctgttctgtccaaagttctttacatcagtaaatgaaaaacaaaacaaatgatgcataggccacgccctgcagtgaaagatgcaagaacttgttcatattggtatgaatcgttcactgtatatgattcaaacatgtggaaataaatgtttgattacagtcattccaaa

SEQ ID NO: 215042 - DNA, 610 bp, Homo sapiens
ccgggtcacctcttagcggccatgtctctgaatccggctaggcagaaaagtactaactcgcaagatatccaggaactcttgttgtcttgtgcagaagggggaaattgaggcatggtgtggttaaaaagccaagatcacgggccaattcctgcacactttgttgagcgtaagaatcacttggtttaagttttaaaatgaagattcctgggtccccaactaccagagattttgatctgacctatatccctttaatctctatttaaacaaatttctctggcgattctgatgctaaagatgcagaccattcttgagaaacatatgttacactactctgaaaaataaacataggacagacttctttgttctgtccgttttatgaacctaggaagctcataaatgggaacgaaagctctggtatccacttagcaagccagaaccaccactcacacttggtctcctgctgacacaaagctacattcctagctccaggtggcatgtcatgggtgttttacttcagccccagattttcagtctttttttaatggcaagggtaatgcagaccgtcttgtgccaaataaagaacggacgttgttgagttttgcttggaaaa

SEQ ID NO: 215043 - DNA, 664 bp, Homo sapiens
cctaagaaaggtgcttgcccttgctgggtatcagcattctcacttgttacggtgaggattataacaatatcaaactcacagggcagttgccaggtttagatgaaataatgattcatgacaaaaagtgcttggtggtaaggattcaataaatgatcacgaaatccctttgggattagctaattaatctcctcatcttgaccacaatcatatgtactataagccatcactgtcggactaaactgcgacaaacactcctgttacagagcaccaggaatctacgtttactcacaccaaactaaaacatacgggttcagcttttaaggctctctaaaagttttccccacgctacctatacaattattaataccaaccccaaaacaatctgtttttgtcctgctattcttcattcctcaaacaaaacagccccaaatttttgtgtccacctctgcagcaagctcagtttaaaagtcccgttttccaggcacttctcacctctactttcactcctttttttttctttttttctttaagacagagtctcaggccgggcatggtggctcacgcctgtaatcccagcacttgggaggctgaggtaggtatgtcacctgaggtcaggagtttgagaccagcctgggcaacatagtgaaaccttgtctctacaaaa

SEQ ID NO: 215044 - DNA, 297 bp, Homo sapiens
agtagagacggggtttcaccatgttagccaggatggtctcgatctcctgacctcatgatctgcccaccttggcctcccaaagtgctgggattacaggcatgagccaccgcgcctggcccaaaattagcattttcaaaggtgttaattgctttcttgaaaatagatgtgtatataaaaatatgtgattttcaggatgctgaggcaggagaatcgcttgaacccgggaggtggaggttgcagtgacctgagattgcgccactgtgctccagcctggtggcagagcaaggctccgtctca

SEQ ID NO: 215045 - DNA, 572 bp, Homo sapiens
acttacccctgagccctatcaacctaggtctacagccagtggagtctattgtacactgtggaaaaatacccatgggaccagatcctgccaaattcttccagctcactttattctcagcattcctaggacattggacattggttttctggagggttttttttccatctttgtatttttttaaatttgattcttttctttgcaatgctatctaaccagaatacataggggaactgtgggctaggcaaacaaaatagaaaaaagtgtgaaaaacagtaaagttgggagaggagcatctattttcttaaagaaataaaacacccaaaacaatataaagttgtccagaatgtatgtcaagaattttagataggcctttcagtaacacaggtgacgaaatttttaaaaatacattgattattatctaggttagacttaaagtgaatctcaaataaaagaatcaggaatacaacttaagtaatcatgaggtccttccatatttagattgggtaagcatgaatgtgtattttctacaaaagaccttgagaagagttcaataaaaaatgttagcattataa

SEQ ID NO: 215046 - DNA, 283 bp, Homo sapiens
aagtaacgtatacaatcgagcctttaccgtgttctgtgccctcacacctaaacaagacaccataatatcatcctatttaattctttccagtttttttgtgtgaatttatcccaaaagcaatcgatagtttttctggtgtatgccctccaaaatctcctggccattatcactgaataaaacttctagatttggaaaacaggcaccataaggttaaaccctaatggtacactttgtattatttctttcttgtgggggccatgtatcaattcattgatttgattca

SEQ ID NO: 215047 - DNA, 239 bp, Homo sapiens
gcttcacacccaatactgccggatggggcaaaaagtgaaattgtgttttgaatttgatgaagatttcagaggtaaattataaaaatcttaaatttggccagtctgctccatgtttcaatccaatatgcagggcaagagagatgaatcttggtgttcatttcctttatgtttatttcatgcaaattttatgtgtatgtgtattgtgtgggcagtattgggtgtgaagcgtggtgcgtatg

SEQ ID NO: 215048 - DNA, 378 bp, Homo sapiens
tcatctacaagttgtgtgaccttaagatcaaaattataaagaaagaaagggatgaagaatggaccaggataaaggaggattaattaagaggacaaaataggataagtagaaaggggagaggtatcaacaataagtaaatctctgctttgtgttctataaatgtgttatcccttacacttgtattacttgatgtgtctagactggaactgattgatcagtggcttgattcctcagaaaataacacacttatcctccttgcttccctgctttcttcattccatcctctctaccccagttacattgtgtaatataattttcatagagctcagaccctctataatatagctaaatttataacacagttgaaatagttaaaag

SEQ ID NO: 215049 - DNA, 603 bp, Homo sapiens
aacatgcgtaaagtagtctcacccccttttttggtacagcacattcccccatttttgcataaaaacttccctagtcatagtgttggcttttaagttttggagaagttctgtaggactgaagctgcatgccacaggagatgcctggggtggggagttaaaacaatacaaactgtagcaacatgcaaaaatgctcatggcttgatgtaaagtgaaaacaagatgaaagcctttcctctaatatttctacaagtatgtgaacagagactttccacctaaccaagttgccactgggacgaatgaaggccagattgtattgaaacaggactatgagtcactcctgggaaggccctaggacagaggtcagagagtttccatatttcagtctgggacctgggcctgtcctggtcttctcaggttcctagctatagagacctctaggtgcctgctctcaccacagcccagtgctggccaaggttagtggtgtagggcacctgctctttttccaaagagatggaggagttagactcatcaaacagctcctcattaatctgaatgcggctctgtaaacagtgcccagcagccaagctaaaaaagattgattgc

SEQ ID NO: 215050 - DNA, 436 bp, Homo sapiens
cggtttcattttcatgtgtttgaaatttctttacttatcctgcttggtattcagtttgcttcctgaatctgaagattcctgtctttaatcaattctggaaatttttcagccattatctcatcattatctgcctcttttggtttttctcttttctctcctggaattctcattaggagtatggtagagaccttaacaatctatccccatgtctcttaagcttgctttcatttttcctgtctctaggctgttctcagtaatttcttttggtctgtcttccagtttactaattttctcttcaattgtgtgtaatctgctatttaaccaaacattggctttggtttcagttattctttgtttctagaaattctacttaattcttttgttgttgttgtttttgttttgagacggagttttgctcttgttgcccaggctggag

SEQ ID NO: 215051 - DNA, 203 bp, Homo sapiens
tctttctcttgtgcttattcttcctgggagtggtgtaagacttcttcttccttttcttagcaccaccacgaagtctcaacacaagatgaagagtagactccttttgaatattgtagtcagacaaagtacgtccatcttccaactgcttgccagcaaagatcagtctctgctgatcaggaggaattccttccttatcctggatc

SEQ ID NO: 215052 - DNA, 477 bp, Homo sapiens
gaacaataaacactggggactgctgggtggaggagggctggaaaactacctattgggtactatgcttactacctgggtggtgggatcattcgtaccctaaacctcagcatcatgcaatacatccatgtaacaaacctgcacatgcaccccctaaatctaaaataaatgttgaaattatttaaataacacaaacgctggttctaacaggtccccttccatcaaacattaaaatattcttgatatttgcttagattatgacaaagaaaaatattttatctgggaaatttactaactttattagttcactcattttacccagttgagaaaaatgtgtaggttttaaaatcatgtagatccaggttggagtcttggttctgttcctcattggcccagagatgcgaggctactgacttatcctctgtgtttgttttacctataatttaaggatgacagtaactatctcagggcattattagg

SEQ ID NO: 215053 - DNA, 532 bp, Homo sapiens
aaggtaaacaaaaatgctttattatttaatattacgcaaaacttttgtttaaaggagaaaatcaaattttatttttgttgaagttaatttttaataaaattttacgtaaaatctatggaattttaatcagtttgactctaaggtaagatttttataaagtttgcataacatttatagttcttttaaagaatagattaatattctaagaaaaccctgctattctgatacatgaacccaaattaaggccttgtatcagagtgtttttaatgaatgtttaatttctttaaaaacaaaataattccttaaattttaaccaatgcttttttttgtaaaatttttatagaactaatttttacaaatcttttacaacttatttaaaccttgagtcttgtcttgttattttttatttttgaatttaacataactttttagaactgcaaaactagacaaaattactgttttttataaaaactatatgttcatgtctttttataactttttattaaaaatacattctactttttcatatact

SEQ ID NO: 215054 - DNA, 401 bp, Homo sapiens
tactaaataaatattagttttactatttttaaatttttatttacatttataactgtcactaagagagtttttcatgttttggcaaaaaattttaaaggccgtggaacaattataattttccccattgtgattattaaaatggcttcgcatggtttcagcttgcacagtcatttttatgttcctgtagtgctgtgcaaagcaaggacagcctctctatataattgcatttatataaagagctactaaaaattgagaaaaagcccaacagtacaatacaaaaacaagcaatgtttatgaactatcagtgctcataatggaatatgcacttagtggatattatgcagctaaataaacagaagctctctatgtagtgatgtaagatattataagtatttggagtg

SEQ ID NO: 215055 - DNA, 431 bp, Homo sapiens
tcatatgctattcttcatttattcttccataatgaacattttcataatttaaaaaatcctcccattatccacagacccgattttcaggaggtgccaccatctggttcacaggcatatgcccaaaagtaagcgaggagctctgagcagccagcgtggcagtcaccaagccctccaggctgcagctcccaaggtgggtgtttattgattgagctcaacgtctgctcccccttcccatctgctctgacttccgtttggagatccacgtggtttaggagaagctggctcccctccaatctgaatattctatcccctgaccacagagagtcagggacacacatgtgatctaaggcagtccagtccccccacagggggcaggagttgcccacaaccagctcaagaatgaaggggaaccaaccctaagcaaagccaat

SEQ ID NO: 215056 - DNA, 474 bp, Homo sapiens
  misc_feature (474)..(474): n is a, c, g, or t
agtcacacactggacagtctaagtgtcacactcatcaaaaccactgcctcctaggatgcatcacatgtggcatcaattacacagtgacattaaaagcaattagtgccaccgggttgactgcagattgctcctaccaaagttatttctctggtgcctgctgccctttgggggtgaaattatataggctgggccctaatggcatccggatctactggcaagcctccaggggctctgccaattacagcactgacctctatggctccaaaggcattttcacgtgcaccccgagtgctggcctcagtttctgtgatgtcactgagataccctgtggggatgtatacactgtgatggtctcaccagttgctaaaacaggattgaagcttactttctgtccaaaaaaaatatattcagtaacttgctctggaagtacactcggaatgtcggaatgggtgcagggtaccgagctcgaattcn

SEQ ID NO: 215057 - DNA, 510 bp, Homo sapiens
gggtaacactgtttctgtcctttttaaccaaaaacaatctgtgattataataacctactaaagccctagcaattccaacaggaataactcttttgcctctgaaatcttcaagagcctgacagtcatctctgaagcaacatttcctaaactgacggatccttttgtgaaggaatgtaaatgttaagtaagcactactgaaaactaaaaccacatttccaaatacccctagttgaaatctacttcatttcaaacttaaaacatccacaggaataggaattctgagtctggtttgtaatgcaactacatctgaagacatgccaccaacatttcagaagcctgggaactggttaaaaaaatgttggtctgttctgaacagcatcatcatggaagtatggatattaggtacggctactccactgatttaagcaattttcttttcttttcttttccttttttttttgagacagagtttcacactgtcacccgagctggagtgcaatggcgggatcc

SEQ ID NO: 215058 - DNA, 419 bp, Homo sapiens
ttagaggatcccctcgaatcgacggttcctccatatccttgccaacatttggcacagccagtcttttcaatcttttagttattctaaggtttgtagtgcttactgtggctttaatttgcatttccctagtgactaatggtgtgaagcatttttcatgagtttgccatttgtacacctcctatggtgaagtaactgtacaaatcttttggccatttttatgtttaaagttgattaaataattttgtaaactgacaaagaaaaatggtatatatttaggttgtacaacatgtttttttttgttttgagatggagtctcactctgtcgcccaggctggagtgcaatggcgcaatctcagctcaccgcaacctctacctcctggattcaagtgattctcctgcgtcagcctcccaagtagctg

SEQ ID NO: 215059 - DNA, 670 bp, Homo sapiens
cttccgctggagcctctcgggaggcgggtaacgttatagtatttgtcagaagttggggtctccgtgggcattgtgatccgtcccaggcagtggattaggaggccagaaggagatcccttccacggtgctaggctgagatggatcctctcagggcccaacagctggctgcggagctggaggtggagatgatggccgatatgtacaacagaatgaccagtgcctgccaccggaagtgtgtgcctcctcactacaaggaagcagagctctccaagggcgagtctgtgtgcctggaccgatgtgtctctaagtacctggacatccatgagcggatgggcaaaaagttgacagagttgtctatgcaggatgaagagctgatgaagagggtgcagcagagctctgggcctgcatgaggtccctgtcagtatacaccctggggtgtaccccaccccttcccactttaataaacgtgctccctgttgggtgtcatctgtgaaaaaaaaaaaaaaaaaaacaaaaaaaaaaaaaaaaaaagaaaaaagtagaaaaaaaaaaaaaaaaaaaaaaaaagggggggggcgccaaaaaatccaccgaggggaggaccccacgattgacggcgagcacacacacggagtttgttggctgcacagggagggggcccccatggggg

SEQ ID NO: 215060 - DNA, 714 bp, Homo sapiens
cttccgctggagcctctcgggaggcgggtaacgttatagtatttgtcagaagttggggtctccgtgggcattgtgatccgtcccaggcagtggattaggaggccagaaggagatcccttccacggtgctaggctgagatggatcctctcagggcccaacagctggctgcggagctggaggtggagatgatggccgatatgtacaacagaatgaccagtgcctgccaccggaagtgtgtgcctcctcactacaaggaagcagagctctccaagggcgagtctgtgtgcctggaccgatgtgtctctaagtacctggacatccatgagcggatgggcaaaaagttgacagagttgtctatgcaggatgaagagctgatgaagagggtgcagcagagctctgggcctgcatgaggtccctgtcagtatacaccctggggtgtaccccaccccttcccactttaataaacgtgctccctgttgggtgtcatctgtgaaaaactcgagcaagcttatccattcggcccaaattcgagcttacttgggcaattcgccctatagggggcgtattacaattaattgggccccgtttaaaaaatcgggactgggaaaaccccggggttccccaattaaatgggttgaacaaattcacttttgacagccggcgtaaaacaaaaaagccccaccatttggcttccaaaaatgggcaccttgcgcg

SEQ ID NO: 215061 - DNA, 126 bp, Homo sapiens
agggatgattaaattttaacagcggttttgtatatagatttacctgcctttaggtttgtccttgatatcttaatgaactgtttctcagatagtcataacttatacttcacttgtttgccaagcttt

SEQ ID NO: 215062 - DNA, 417 bp, Homo sapiens
gaaaagaaataacacataatactatataatatagtttcttaacaagtggggctaaaaatcattttatagtaatttttcacattgatattaaacttcatgagtttcctttagtcattattattttttaaaaagaaaactccccccacccctaatataccattttgtatctcaaaattttactttgttgatttttaaagagtaatttctacttttatcttttaaataaaacatttttgtgtatttttcaagacaaaaagcttaacatttagtgtttttggaaatgtattaacgttttcttgaagtatgtatagttttccaaattattttactgatctgttaacgcactttacttgtttttaacttattttttcatgacccctttacaaggtgagtccatttaatcatctgtggtataaa

SEQ ID NO: 215063 - DNA, 401 bp, Homo sapiens
tggcttaaagtattttttggctcacagatcccttggaaaatatgatgcaagctgtggattcttgcctgagccccatcaatctggattatttgaggtgttggcctgccaggcctattgcactaaaatcttgggatgtcccctcaccttatcttggagttatcctctgtcactttctcgtgatggctccagtttcctccatcccatatgtaagtcgtttttttttgttaattctcgttttggcagagcatatgcttcctgagaaaggattcatagaaaatacattctttttttgagattacatgtttgaaatttctttcttttactctcttattatttggctgagtatataattctaactggaaataattttcccacagaattttgaggacattgcctcattg

SEQ ID NO: 215064 - DNA, 135 bp, Homo sapiens
ttttctttctttctttctttctttctttctttctttctttctttctttctcgctctcgctctctcgctctctccctcgctcgttttctttctctttctctttctctctctctctctctccctctctgtctctctc

SEQ ID NO: 215065 - DNA, 446 bp, Homo sapiens
cgcagtggcacacgcctgtaatcccagcactttgggaggctaaggcaagaggattgcttaagctcaggagttcaaatccaggaccagcctgggcaacatagtaggaccccagctttataaaaaaatttaaaaaattagccgggtatggtggcacacacctgtagtcccagctgctccagaggctgaggtgggaagattgcttgcgcctgggaggtcgaggctacagtgagctgtgattgcactactgcactccagcctgggtgacagagtgagaccctgtctcccaaaataacaaaaaaccacaaacactcactagtgtgtttagccatacatgtgtatttttatatattatgtaaacacatagtagctgatattttttgacctcttatgttgggcgtgattctaagcattttacatttattagctcatttaacttgagctaattg

SEQ ID NO: 215066 - DNA, 394 bp, Homo sapiens
gcttttctattttctacactattataaataactgtgatgaatatctttgtaagtctttgatgatacatgtgatgatttccttaggacagattcttagaagtggaattcctggatgcaagaacatgatttttctttttctttctttctttctttttttttaattttatttttattatttttttattttattattattatactttaagttttagggtacatgtgcacaatgtgcaggtttgttacatatgtatagatgtgctatgttggtgtgctgcacccattaactcgtcatttagcattaggtatatctcctaatgctatccctccccccttcccctaccccacaacagtccccgacgtgtgatgttccccttcctgtgtccatgtgttctca

SEQ ID NO: 215067 - DNA, 413 bp, Homo sapiens
tgtcagtgtttcctttttacagtaaatgtgtttctttcttcgtaggaaattagaaccattgaaaattttagacactgattaagtggaactctggacagtagttcttttcctatttctgccagtaaaagttcttaatgtctttatttcccttattttgcaaaataaggcactatgaactatttgcttgataaaaatggctatcaatgtcagagagagaattgtggattctttatagcacagaattgagataacttagattctatccagtatagttaatttaaaatactttaacctgtaacattatacaactgccagaatctcaaaagaactgctttgtggttcattaacattttatatagtgccactgcaggaataagtaatagacatttgttcagtagttcaacatattccga

SEQ ID NO: 215068 - DNA, 849 bp, Homo sapiens
gatggggctgagacttgcttgtgcctttgttgatggcagggcacttttattgaaacttgttgaaaggagctagcttcgaaggctcctccaagattctacaccacagggggaagcaggactttgatttaagatactcacatctgtcaaccacaggcattcattcagttttctctttcatttggggaaggaagggagaaaatgaatcagaggctgattttttttttttctggcctgttttccccaagctccaggaaattaagaaacatgccattagttttagcaaacaatttgaacaaagtaaaaccagatctcccaccaaaggccgaggaccatgaggggtctgagtgcccctggccctgtttgtggactctgcgggtcgtggaggagccatgaagtgggaagagagcttgggtgatacaggatggtgtgcgtgacagtcctccctgtgtcttctttgctaccatatttatcatagcttagatgtgtgtggcctggtggcaccaaaggtgaacagaaagcatttttggggcgccatggcccagacctcagcctgaacgttgtgggaagccagtgggtgtctgcatgtgttggcgagaaccagtgggcatctccttggaagccagtccccaaggtggctctagatggcttactcctgcatcttgccaaatccacagggtccagctgtgtctccagggctgcgtggcttattgaaaaagagagtgtatggtggatttcaatatctatattctacaaaaaatgtaaaaggggcaggggacgggaacaaagaaaccagtgctggtgatcctgcccccacagtaaggtctgctttagtgtggacatgggacaggg

SEQ ID NO: 215069 - DNA, 429 bp, Homo sapiens
cagggaagagacacttctactgagaatcacctcgttccctccaaaccaagaaatgcccagctctatgttcctcattctgcaattgccaaactagtggctaatgaggaggtgctattactctgtttctcacaggagtcttctagaacatgtggcagggatgatggatgcttccatgctcctattgaccagctagcagaggaagtgagaatgacaaagtttataccttataaacaacaccatcagctatcactgggttatgatttttacattcataaacatcatgatcataaaaatgtcttcattgatttttatgtttcatgttttcatgtttataaagatagttcatgcttattttaaacatagaaagtagaaaactgaaaactttcatttatcctgctctccaataaatattatttaacagtttggttt

SEQ ID NO: 215070 - DNA, 360 bp, Homo sapiens
ttctagatacaagtctctcatcagatacattatgtgaaaatattttctgttctgctacgggttgtcttttcattttcttaatggtgtcatttgatgcactaaaaatttttaatttggatgaagtccagcttatcttttttttccttttgttactcatgctttctggtcttatctaaaaaccatttccaagtccaacgtcatgaagatttataaacatgtttacttgtaagagtttgcattgaggcattcactctgagttcattttgtatatggtgtggtaggagtccagattcattcttttgtgtgtgactatccagttttccagcaccattcgttgaagagactcttctttccctgttg

SEQ ID NO: 215071 - DNA, 569 bp, Homo sapiens
gcccagatccgaatcggagtcggtaccctcgcgaacgtgttatccatacatgtccagggaccacagtttgaaaacctccacggctgacatgtaatgggatgacatggtccaataaatgaaggaaaaataacaggtggcaacctcaggcagcttcatcccaaccagtaagaaagtaaatccttttgtaaactcagaggaagtattaatatgggtgtttgagcaaacatttaagtgttaggagaaagaattaaaaactagcacaggcacccctgaagcatgataggatggcaacagaagggctgatttagtttccaagaaataactgacaggcagtgttgtgtgtgtgtctactacttaggaacccaaaacaaaccttcagaccgttttcatgagtactgagaccaagaaaaccactgggcagtgggtggtctggaaatgtaaatgttgatggtactccagtaatgagtcatggaacaatgtttcatattgaaaatgtttttgtaaatgtgggtttcagggtttcaaagtgaacccatatgtgttaggagaaaggataacaccaaagaagt

SEQ ID NO: 215072 - DNA, 245 bp, Homo sapiens
gcaatctaaccactacatttcaccattacgttccttggctaaactcttgaaatctatttaaagagaggaaaaacagtctaattactatcagaaccacagatgagatgcatgcgtaactctgctcagatcctaattcctctgccatgccttagttacagtcacttaggcttcaactatctcctagtcctaaattcctgctagacaatcaatagaactattcattttgcctgatattgtcagtaatc

SEQ ID NO: 215073 - DNA, 1351 bp, Homo sapiens
cgtgacccgggctgcggggcgcagcattgtgcggtcatggtgggccagatgtactgctaccccggcagccacctggcccgggcgctgacgcgggcgctggcgctggccctggtgctggccctgctggtcgggccgttcctgagcggcctggcgggggcgatcccagcgccggggggccgctgggcgcgcgatgggcaggtccctccagcctcccgcagccgctcggtgctcctggacgtctcggcgggccagctgcttatggtggacggacgccaccctgacgccgtggcctgggccaacctcaccaacgccatccgcgagactgggtgggccttcctggagctgggcacaagtggccaatacaatgacagcttgcaggcctatgcagccggtgtggtggaggctgctgtgtcggaggagctcatctacatgcactggatgaacacggtggtgaattactgcggccccttcgagtatgaagtcggctactgcgagaggctgaagagcttcctggaggccaacctagagtggatgcaggaagagatggagtcaaacccagactcaccttactggcaccaggtgcggctgaccctcctgcagctgaaaggcctggaggacagctacgaaggccgtgtgagcttcccagctgggaagttcaccatcaaacccttggggttcctcctgctgcagctctctggggacctggaagacctggagctggccctgaacaagaccaagatcaaaccttctctgggctctggctcctgttctgccctcatcaagctgctccctggccagagtgacctcctggttgcccacaacacctggaacaactaccagcacatgctgcgtgtcatcaagaagtactggctccagttccgggaaggcccctggggtaggtgggtgtgggtgtgtctgggggatgagcaggtgggtgggcacacacgtggggagtggtcctaggaggtttgggccttggaaaccctcccaacacacggagtcactgcagggatattccaagagttcattttggttttgtttttttctttttgagttgggtgacagtgcaagaccttgtctctaataaagaaaaaaacagttttacagtcaaggccaaagtcctccatagtgccacatccttcatcccaggccccagcatcagccccagggataccactgccaaatgtttgcagtacctccttcatggccaaatgtaaaaacttgatgggaccaggagctggtgaggaggtggggaagtgtccagccttattcattgctaatgggagtatgcgttggcacagctacttttaagaggaatccagctggcatctaataaaattcaaaatctgtc

SEQ ID NO: 215074 - DNA, 738 bp, Homo sapiens
caagaagtactggctccagttccgggaaggcccctggggtaggtgggtgtgggtgtgtctgggggatgagcaggtgggtgggcacacacgtggggagtggtcctaggaggtttgggccttggaaaccctcccaacacacggagtcactgcagggatattccaagagttcattttggttttgtttttttctttttgagttggggtcttgctctgttgcccaggctggagtacagtggcacagtcatggctcactgtagccttgacttcccaggctcagattatcctcctgcctcagcctcccaagtatctggaactacaaatgtgtaccaccacactcagctaatttgtttatttttttatttttaagagatggagtctcactatgttgcccaggcttgtctcaaactcctgggctcaagtgatcctcctgacttggcctcccaaagtgctgtgattacttatgtgagccaccacgcctagccagttcatcttgttttacatgtttattgccttttttattttacctattgctgcttaaccagttaccccaaaatttaaaacaacaacagcttaaataaccgctatttattttttgctcctgcctctatgggtcagctaggtggttttggttttctgggctgggccaggctgatcttggctaggctcactgatgcatcagcagtctgctggcaggtcagctggggtgggatggctggaatgggatggcctcttctcctg

SEQ ID NO: 215075 - DNA, 1023 bp, Homo sapiens
  misc_feature (999)..(999): n is a, c, g, or t
cgtgacccgggctgcggggcgcagcattgtgcggtcatggtgggccagatgtactgctaccccggcagccacctggcccgggcgctgacgcgggcgctggcgctggccctggtgctggccctgctggtcgggccgttcctgagcggcctggcgggggcgatcccagcgccggggggccgctgggcgcgcgatgggcaggtccctccagcctcccgcagccgctcggtgctcctggacgtctcggcgggccagctgcttatggtggacggacgccaccctgacgccgtggcctgggccaacctcaccaacgccatccgcgagactgggtgggccttcctggagctgggcacaagtggccaatacaatgacagcttgcaggcctatgcagccggtgtggtggaggctgctgtgtcggaggagctcatctacatgcactggatgaacacggtggtgaattactgcggccccttcgagtatgaagtcggctactgcgagaggctgaagagcttcctggaggccaacctagagtggatgcaggaagagatggagtcaaacccagactcaccttactggcaccaggtgcggctgaccctcctgcagctgaaaggcctggaggacagctacgaaggccgtgtgagcttcccagctgggaagttcaccatcaaacccttggggttcctcctgctgcagctctctggggacctggaagacctggagctggccctgaacaagaccaagatcaaaccttctctgggctctggctcctgttctgccctcatcaagctgctccctggccagagtgacctcctggttgcccacaacacctggaacaactaccagcacatgctgcgtgtcatcaagaagtactggctccagttccgggaaggcccctggggggactacccgctggttcccggcaacaagctggtcttctcctcctaccccggcaccatcttctcctgcgacgacttctacatcctgggcagtgggctggtgaanttgagacaccattggaaaaaaacc

SEQ ID NO: 215076 - DNA, 986 bp, Homo sapiens
caagctatcagtgggggacacggggccagccatggactccagagctcgagatcacatgacaggacctgggtggaagactttcaagaacaagtatgcaggatgcaatcaacagagcgtaccactgcgtgagaggctgaagagcttcctggaggccaacctagagtggatgcaggaagagatggagtcaaacccagactcaccttactggcaccaggtgcggctgaccctcctgcagctgaaaggcctggaggacagctacgaaggccgtgtgagcttcccagctgggaagttcaccatcaaacccttggggttcctcctgctgcagctctctggggacctggaagacctggagctggccctgaacaagaccaagatcaaaccttctctgggctctggctcctgttctgccctcatcaagctgctccctggccagagtgacctcctggttgcccacaacacctggaacaactaccagcacatgctgcgtgtcatcaagaagtactggctccagttccgggaaggcccctggggtaggtgggtgtgggtgtgtctgggggatgagcaggtgggtgggcacacacgtggggagtggtcctaggaggtttgggccttggaaaccctcccaacacacggagtcactgcagggatattccaagagttcattttggttttgtttttttctttttgagttgggtgacagtgcaagaccttgtctctaataaagaaaaaaacagttttacagtcaaggccaaagtcctccatagtgccacatccttcatcccaggccccagcatcagccccagggataccactgccaaatgtttgcagtacctccttcatggccaaatgtaaaaacttgatgggaccaggagctggtgaggaggtggggaagtgtccagccttattcattgctaatgggagtatgcgttggcacagctacttttaagaggaatccagctggcatctaataaaattcaaaatctgtc

SEQ ID NO: 215077 - DNA, 417 bp, Homo sapiens
tgtgagagggaaatgtctgttgtctgagccatcagtctttggtgttgggctatcacagcctgaacagacagagatgcctcatttaggccgagctcctgggtgggccacacgggtgtggactggacgctctgcatttggccgccagatttgaccccctgaaggtctttagtccattgttggggctggtctccagacttctcgggactctggatccagtccccaaagacttctacatcctccactcatgacctacaggggctgaagcagagctggccaggttgcagagcattgcggagtggatggagtagcaagccctggctagtctcttttgatgtttgactggttaagggagggtgtccttacgggagaatttatagtgctattaatttaaaaataaactataataatattttataa

SEQ ID NO: 215078 - DNA, 484 bp, Homo sapiens
aggttagtgtccagctgagcatggtggcatgtacctctagcaccagctactcaggagattgaggggggaagattgcttgagcccaggagttcgaggcagtagagtgctttaaaggcacttgtgggccagccatggtggctcatgcctgtaatcccagcactttgggaggccaaggcgggaggatcacttgaggtcaggagttcgagaccagcctggccaaaatggtgaaaccccatctctactaaaaacacgaaaattagctgggcgtggtggcccacgcctgtaatcccagctgcttgggaggctgagacaagagaaatgcttgaaaacccaggaggcagaggttgcagtgagccaagatcatgccactgcacttcagcctgggcgactagagtgagaatccatctcaaaaaaaaataagggcacttgttaataggcactgcatcccagcctgggaaccacaacaagaccctgcctcttaaaa

SEQ ID NO: 215079 - DNA, 965 bp, Homo sapiens
taaaaaaagcaaaaatatagagggcagagggcacttaaaggaatcatgttggtgaaaagtaaaagatgttaatataaaaaaaaaacacctatggaataattatgcgtcaattgtacatatgtatcccagtgatcacagctgacgtgacccatgcaggacaccccaccttcaatgcctccagatgtgctgcatggggagtgcacagcccagtgtggttctcctgcaaaatgcgtggcctgagtgccactgtgagtctaaccccacctgagggaaggaagctgtatcacctatcacgatattccactcttcaaaactagccacagcatgacaaacattgagaacccaaggaggaagtgttaagagatgggacaactaaataagaagcaacgatgctggatcattattgttttaatgtgaaatttcctcaatgtgataactgtattgtggttaagagattgtccttgtgtttaggaaatacgctcctttggcatgaataagggggcacaaacgtctgcatctaactgaagatttggggaaaaatagaatgagggggtgggagtgggtaaggaagagagagggagaacggggaaagtgaaggaaagggtatttggaagtctctgtactgttcttgccatcttccctaactttaaaattaattccaaagaaaaatttggaacaaggactcttgcctgtacatatgaatcacaggcatcttagtaaaaactctgactcagtaggtcggggtggagcctcagaggctgtatctgaatgagcccctaagtggatctgctgctcggaagaggtcagtgtggaaaagcctgtcttcccaggctgttccacagaatccaaaacaggcctcgggaagccactggatttcattacaaggacctgtgggagtcaacttgatgttggtttcttaaatggggaaaaaatggtaattgccccagtgacaaaaaatacaaaag

SEQ ID NO: 215080 - DNA, 1026 bp, Homo sapiens
gggaattcatggccaggcatggtggctcacgcctgtaatcccagcactttgggaggccgaggcaggtggatcacgaggtcaagagttcgagttcaagagcctgactaacatggtgaaaagtaaaagatgttaatataaaaaaaaaacacctatggaataattatgcgtcaattgtacatatgtatcccagtgatcacagctgacgtgacccatgcaggacaccccaccttcaatgcctccagatgtgctgcatggggagtgcacagcccagtgtggttctcctgcaaaatgcgtggcctgagtgccactgtgagtctaaccccacctgagggaaggaagctgtatcacctatcacgatattccactcttcaaaactagccacagcatgacaaacattgagaacccaaggaggaagtgttaagagatgggacaactaaataagaagcaacgatgctggatcattattgttttaatgtgaaatttcctcaatgtgataactgtattgtggttaagagattgtccttgtgtttaggaaatacgctcctttggcatgaataagggggcacaaacgtctgcatctaactgaagatttggggaaaaatagaatgagggggtgggagtgggtaaggaagagagagggagaacggggaaagtgaaggaaagggtatttggaagtctctgtactgttcttgccatcttccctaactttaaaattaattccaaagaaaaatttggaacaaggactcttgcctgtacatatgaatcacaggcatcttagtaaaaactctgactcagtaggtcggggtggagcctcagaggctgtatctgaatgagcccctaagtggatctgctgctcggaagaggtcagtgtggaaaagcctgtcttcccaggctgttccacagaatccaaaacaggcctcgggaagccactggatttcattacaaggacctgtgggagtcaacttgatgttggtttcttaaatggggaaaaaatggtaattgccccagtgacaaaaaatacaaaag

SEQ ID NO: 215081 - DNA, 698 bp, Homo sapiens
cagaccctccaggggcagggcccaggattgaagagggaagccctgctccacacgtgttcatcaggaaggacccacagactgctgctcctggaggcctctcggtttatggatgtgtgtttgttccataaaccctcagagggtcacctggagacccgctaaaatgcaggttcttgggccacatcctagaccttctgaccgacccagggagtggggcccaggaagctgcatttgacagatatccccgtgtgatcatcatgcacacaggagtgagagaaccagtgttctccccgggcagaagggaagctcgtgtgcaggacacctcacacctcctttcccattcccctgccaggctctccctgctgacattgtttttgcgggagagctgtgaattctgaagattaggttgcttctcaccccaagctccagaagtccaggctgagccaaaccaagcttcaagttgtgcctggacttggagaaccaggaggtgaggggactgactacttgaagatcacatggaggaggagtctgatccaggcccagtcttgctctgttgcccaggctggaatacagtggcatgatctcagctcactgcaacctctgccccccaggttcaagcaattctcatgcatcagcctcccaagaagctgggactgactacaggcatgcaccaccacacccagctaatttttgtgtctaac

SEQ ID NO: 215082 - DNA, 699 bp, Homo sapiens
cagaccctccaggggcagggcccaggattgaagagggaagccctgctccacacgtgttcatcaggaaggacccacagactgctgctcctggaggcctctcggtttatggatgtgtgtttgttccataaaccctcagagggtcacctggagacccgctaaaatgcaggttcttgggccacatcctagaccttctgaccgacccagggagtggggcccaggaagctgcatttgacagatatccccgtgtgatcatcatgcacacaggagtgagagaaccagtgttctccccgggcagaagggaagctcgtgtgcaggacacctcacacctcctttcccattcccctgccaggctctccctgctgacattgtttttgcgggagagctgtgaattctgaagattaggttgcttctcaccccaagctccagaagtccaggctgagccaaaccaagcttcaagttgtgcctggacttggagaaccaggaggtgaggggactgactacttgaagatcacatggaggaggagtctgatccaggcccaggcaccaaggaaaggccatgcaaggacacagggagaagggcagctgtctgtaagccagaaagagccttcactagaaaccaaatcagccagaaccttcatcttggactttccagccttcagagatgtgaaaaaataaatttctgttgattaacctacccag

SEQ ID NO: 215083 - DNA, 410 bp, Homo sapiens
atgccctgggaaggacagggttgcatttaacagaaacagctaaacctgaagggatgagcttgcctttccccggggccatgggatggtttatagaaagttctacccatcaggacaaagacctcacatgacaccatcagaggaactgatttcacaccacagagggaggaagagggcacatgccataggtctgctggtcacagcacacacgcactcctgggagcttcagacccagcagtggtggctcaggtgccaggtcaggatgtgggaggacacagtgtctgggtgaatctgtcacctttgctagctgccttgtcccaccaggtagaagatgtggcaatgggagcacagcagtaggaagcccagtgtcccccaaccttccacctcacagccaggacctctgaggtcgacgc

SEQ ID NO: 215084 - DNA, 797 bp, Homo sapiens
gtggggtttcaccatgttggccaggctggttttgaactcctgacctcaaatgatccaccggcctcggcctcccaaagtgctgggattacaggtgtgagccatagtacccagccagaaataaatttattgactgatataaattaaaattcctgtgtatagctggcttcaggaaagcctgaataggtgttcaaagaatgtcatcaggaacttgtctcaccaatcccttacctgtgttagcttcaattaaaaaaacatatttttgggccgggcgcagtggctcacacctgtaatcctagcactttaggaggccgaggtgggtggatcacctgagatcaggagtttgagaccagcctggccaacatgatgaaaccgtctctactaaaaacataaaaattatcgggcgtggtggtgcataaccgggcatggtggtgcatgcctgtaatctcagctactcgggaagccgagggagaattgcttgcatctgggaggcagaggttgcagtgagctgagatcgcaacattgcattccagcctgggcaacaagagtgagactccatctcaaaaaaaaaccaaaaaacaaaaacaaaaaacatttttttaagagacagtttcactctgtcgcccagagctgggtccagtagtgcaatcacagctcactctaacctcaaagtcctggactcaggcattcctcctgtcccagcctcccgagtcactgagactataggcaagcaccagcacgcctggttactttttttttttgaaacagggtctccctctgttgcctatggtggtatgcag

SEQ ID NO: 215085 - DNA, 223 bp, Homo sapiens
aacagggtcccgacccatgccaaccaggagggagcctttgggcagcagcccttgctgcgcacctgggccaacttggccagcactctctgtgggagaggccactcacccccatgccctccctgggcaaggctgaggctcttgaggggtggaacatcaggcatgttggggacataatcgaaaacaaaaatctcctgccaatgcagaaaacctttccacaaaagaa

SEQ ID NO: 215086 - DNA, 305 bp, Homo sapiens
tggtctcgacagaacatcaaattagctacagtattccccttaagtcaaagcctaacctaaagaaaggctttcttcagttatttgaaggctgagagaggtgagaagctacaggaagaaagctggaagccagcagaggttgttggttcatgacttttaaagaaagaagccatctctataacataaaagtgcaaggtgaagcagcaagtgctgatatagaagcttccacaagttatccaggaagatctagctgacatcaaggaggtgggtacagtaaagagattttgaatgtatgtgaaagtcttcta

SEQ ID NO: 215087 - DNA, 374 bp, Homo sapiens
ttggtgttccaccttaatcctgtcatatcactaatacccaccctctgtccccattccaacagtccatatctatgactctccatggaggactgcccttgaccacctggaactgctttgtctctgtaaaaagaaccagaagtgcttgggagtttttattccctgatatcaaggcaaaatctaatgactggctagtgcagtcatgaaaccccagctcctgtgcatcagtcatgactattctaaggtgctatttagggtcatgcagaaactatcttcagtgggactttacaagaagtcactcctttgcttgacttcatctctgactcctttgttgatttctcccaagatgacttcaacaatcacttccaggcaaatct

SEQ ID NO: 215088 - DNA, 146 bp, Homo sapiens
tgctatttaggaggctttttcctaagtcccacagttttctgttcttcatgttctatgtaatgctacatactttgtagattcttttctgaaggatgtaagagaaataatagatggagttcacagagttctccccttctttgtccttg

SEQ ID NO: 215089 - DNA, 434 bp, Homo sapiens
ttctcgtattcagaaaagcggagggaatagtacaatcactttatgtataccatcatctagatataccagtgatcactttgccatccttgcattttttttttgctgaagtattttaaattacaaacatcatgacattttaccccttaacccttgagtgtgcaccttcaaaaaccaaagatgtcccccacagaaccgcaataccatcaacatacccaataaaattttaataatcacttaatagcatctaatacccagattatactcaaatctcccaactgtcccccagatttccttatgatcacacattctttccttaaaatgtattggttgtcatggacagaagccactctgactctggattttggggtggaaaaggaaggtattcaggaactagccagatcatgtttaggggaacagaaagagttcataagttc

SEQ ID NO: 215090 - DNA, 1350 bp, Homo sapiens
tccggctgcccgcgcacctctccacgccggccccgttccgcggctcgccctcggctgcgctcggctcccgcgggcgctcggccccgagcccctcctccccctacccgccggccggacagggaggagccaatggctgggcctgccatccacaccgctcccatgctgttcctcgtcctcctgctgcccctggagctgagcctggcaggcgcccttgcacctgggacccctgcccggaacctccctgagaatcacattgacctcccaggcccagcgctgtggacgcctcaggccagccaccaccgccggcggggcccgggcaagaaggagtggggcccaggcctgcccagccaggcccaggatggggctgtggtcaccgccaccaggcaggcctccaggctgccagaggctgaggggctgctgcctgagcagagtcctgcaggcctgctgcaggacaaggacctgctcctgggactggcattgccctaccccgagaaggagaaccgacctccaggttgggagaggaccaggaaacgcagcagggagcacaagagacgcagggacaggttgaggctgcaccaaggccgagccttggtccgaggtcccagctccctgatgaagaaggcagagctctccgaagcccaggtgctggatgcagccatggaggaatcctccaccagcctggcgcccaccatgttctttctcaccacctttgaggcagcacctgccacagaagagtccctgatcctgcccgtcacctccctgcggccccagcaggcacagcccaggtctgacggggaggtgatgcccacgctggacatggccttgttcgactggaccgattatgaagacttaaaacctgatggttggccctctgcaaagaagaaagagaaacaccgcggtaaactctccagtgatggtaacgaaacatcaccagccgaaggggaaccatgcgaccatcaccaagactgcctgccagggacttgctgcgacctgcgggagcatctctgcacaccccacaaccgaggcctcaacaacaaatgcttcgatgactgcatgtgtgtggaagggctgcgctgctatgccaaattccaccggaaccgcagggttacacggaggaacagggcgctgtgtggagcccgagacggccaacggcgaccagggatccttcatcaacgtctagcggccccgcgggactggggactgagcccaggaggttgcacaaagccgggcgaatagccgtaactagcagtgggagatcaagtaggggaacaagatggctgaggctgcagactcaggcccaggacatcaaccccaggacggggagccgctcggcgacatgagctgggtgga

SEQ ID NO: 215091 - DNA, 659 bp, Homo sapiens
ccggtttgggcagaaggtggggccagttggaccattcagagggccctggctcagggtgccatccctacccccagatcttccacctgcagccacaggcagaagtcttctccactgcaaggtgataaagcagacagcccagctggccgtcctctcctcactcgctgccatcctatttagtggccatctggctttcatctctgtgattctcggactgtccctcctcgaggtccctcttaaagaggcagacacactggcttcagtaaaggacctccactcccaagccaatgcatccccagcctttaccaggacaagcctaacaaagaaaaggccacacaacaggggtttctggtagcaacacaagtctatttcaaacctcggattagagtatccgaaagaattacctgttccaagcaaacacgttcccaccctctggcagaaatgcggttggagcagcctgacgccacggcagactccaaatactctccactgaagcttgctttatcctgtttgaaactcctctgtctgtccccagagagtctggaaatacactctttctaggagctgatggaaaattaacccacattatgagagagctagttgatgctgcattggggacaggaaggtccatttgaaagggggaaaaaacaacaacaaaaaaa

SEQ ID NO: 215092 - DNA, 292 bp, Homo sapiens
cctctcatgtgataccttgtactgcctcgggactttgcaaattacccactagcaagaaggccctcaccaaacatgaccccttgaccttgatttctcagcttacagaacgccatctggttggactgggggcactggctggcccccatcttccaggtatttgtctggagttttcttgactctcctgtatcctggaagatccttctcaggagaaaacaaactcacaagagaaaaggtctacagatatagacatctgggggtccctaataaaaaagctgattaatcctcaaactgc

SEQ ID NO: 215093 - DNA, 1056 bp, Homo sapiens
gcggccgctcgacaatatagagcgtggggtcctccatggctacccggagccgtgcgggaccggccgggtggggctggagctggagcgggagacccggagagaagcaggagcggaagggaggagagctagcgggcgagagcggagagcagaggaaactcgagccacgtccgtgcgcaccgggactccgcccagaggggcctcagcttttccaccactgctttctagtcctttaactcctagaggcaaacttttgggggataagaaagcctgggaggggcctgtgccaaaaccctctctgcctggggactgggcggtgattccgcttctgcctgggctcctgccatggcccccgagaggggctgacactttagctcccggtgcaggtgagaacccgcccggaggaagaaggaaggcgcgggccggggattaggagacggaggcggactcggagccagggaaccaggggtccgggctagagctggagtcgtgagcgcgcgcccgccccgctctgggaggaccgcgagatgcccgtgctgaagcagctgggccccgcgcagcccaagaagcggcctgatcgcggcgccctgtccatctccgcgccgctcggcgacttccggcacacgctgcacgtggggcgcggcggcgacgccttcggggacacctcgttcctgagccgccacggcggcgggccgccccccgagccccgggcgccccccgcgggggccccgcgctccccgccgccgcccgccgtcccgcagtccgcagcgccctcgcctgccgacccgctgctgtccttccacctggatctggggccctccatgctggacgcggtgctgggcgtcatggacgcggcgcgcccggaggcggctgccgccaagcccgacgcggaaccccgccccgggacgcagcccccccaggcccgctgccgccccaacgcggacctcgagctgaacgacgtcatcggcctctaggttccctcattccccgcgcccttcccgcccggcaccccacttctgtatacataaacggccaaggtgtgtgcccggaaaaaaaaat

SEQ ID NO: 215094 - DNA, 890 bp, Homo sapiens
gcggccgctcgacaatatagagcgtggggtcctccatggctacccggagccgtgcgggaccggccgggtggggctggagctggagcgggagacccggagagaagcaggagcggaagggaggagagctagcgggcgagagcggagagcagaggaaactcgagccacgtccgtgcgcaccgggactccgcccagaggggcctcagcttttccaccactgctttctagtcctttaactcctagaggcaaacttttgggggataagaaagcctgggaggggcctgtgccaaaaccctctctgcctggggactgggcggtgattccgcttctgcctgggctcctgccatggcccccgagaggggctgacactttagctcccggtgcaggtgagaacccgcccggaggaagaaggaaggcgcgggccggggattaggagacggaggcggactcggagccagggaaccaggggtccgggctagagctggagtcgtgagcgcgcgcccgccccgctctgggaggaccgcgagatgcccgtgctgaagcagctgggccccgcgcagcccaagaagcggcctgatcgcggcgccctgtccatctccgcgccgctcggcgacttccggcacacgtgtccttccacctggatctggggccctccatgctggacgcggtgctgggcgtcatggacgcggcgcgcccggaggcggctgccgccaagcccgacgcggaaccccgccccgggacgcagcccccccaggcccgctgccgccccaacgcggacctcgagctgaacgacgtcatcggcctctaggttccctcattccccgcgcccttcccgcccggcaccccacttctgtatacataaacggccaaggtgtgtgcccggaaaaaaaaat

SEQ ID NO: 215095 - DNA, 969 bp, Homo sapiens
gcggccgctcgacaatatagagcgtggggtcctccatggctacccggagccgtgcgggaccggccgggtggggctggagctggagcgggagacccggagagaagcaggagcggaagggaggagagctagcgggcgagagcggagagcagaggaaactcgagccacgtccgtgcgcaccgggactccgcccagaggggcctcagcttttccaccactgctttctagtcctttaactcctagaggcaaacttttgggggataagaaagcctgggaggggcctgtgccaaaaccctctctgcctggggactgggcggtgattccgcttctgcctgggctcctgccatggcccccgagaggggctgacactttagctcccggtgcaggtgagaacccgcccggaggaagaaggaaggcgcgggccggggattaggagacggaggcggactcggagccagggaaccaggggtccgggctagagctggagtcgtgagcgcgcgcccgccccgctctgggaggaccgcgagatgcccgtgctgaagcagctgggccccgcgcagcccaagaagcggcctgatcgcggcgccctgtccatctccgcgccgctcggcgacttccggcacacgctgcacgtggggcgcggcggcgacgccttcggggacacctcgttcctgagccgccacggcggcgggccgccccccgagccccgggcgccccccgcgggggccccgcgctccccgccgccgcccgccgtcccgcagtccgcagcgccctcgcctgccgacccgctgctgtccttccacctggatctggggccctccatgctggacgcggtgctgggcgtcatggacgcggacctcgagctgaacgacgtcatcggcctctaggttccctcattccccgcgcccttcccgcccggcaccccacttctgtatacataaacggccaaggtgtgtgcccggaaaaaaaaat

SEQ ID NO: 215096 - DNA, 563 bp, Homo sapiens
gcggccgctcgacaatatagagcgtggggtcctccatggctacccggagccgtgcgggaccggccgggtggggctggagctggagcgggagacccggagagaagcaggagcggaagggaggagagctagcgggcgagagcggagagcagaggaaactcgagccacgtccgtgcgcaccgggactccgcccagaggggcctcagcttttccaccactgctttctagtcctttaactcctagaggcaaacttttgggggataagaaagcctgggaggggcctgtgccaaaaccctctctgcctggggactgggcggtgattccgcttctgcctgggctcctgccatggcccccgagaggggctgacactttagctcccggtgcaggtgagaacccgcccggaggaagaaggaaggcgcgggccggggattaggagacggaggcggactcggagccagggaaccaggggtccgggctagagctggagtcgtgagcgcgcgcccgccccgctctgggaggaccgcgaggtaaggcgcggtggggacaggggtcctgggtcccggtcg

SEQ ID NO: 215097 - DNA, 561 bp, Homo sapiens
gcggccgctcgacaatatagagcgtggggtcctccatggctacccggagccgtgcgggaccggccgggtggggctggagctggagcgggagacccggagagaagcaggagcggaagggaggagagctagcgggcgagagcggagagcagaggaaactcgagccacgtccgtgcgcaccgggactccgcccagaggggcctcagcttttccaccactgctttctagtcctttaactcctagaggcaaacttttgggggataagaaagcctgggaggggcctgtgccaaaaccctctctgcctggggactgggcggtgattccgcttctgcgacgcggtgctgggcgtcatggacgcggcgcgcccggaggcggctgccgccaagcccgacgcggaaccccgccccgggacgcagcccccccaggcccgctgccgccccaacgcggacctcgagctgaacgacgtcatcggcctctaggttccctcattccccgcgcccttcccgcccggcaccccacttctgtatacataaacggccaaggtgtgtgcccggaaaaaaaaat

SEQ ID NO: 215098 - DNA, 945 bp, Homo sapiens
gcggccgctcgacaatatagagcgtggggtcctccatggctacccggagccgtgcgggaccggccgggtggggctggagctggagcgggagacccggagagaagcaggagcggaagggaggagagctagcgggcgagagcggagagcagaggaaactcgagccacgtccgtgcgcaccgggactccgcccagaggggcctcagcttttccaccactgctttctagtcctttaactcctagaggcaaacttttgggggataagaaagcctgggaggggcctgtgccaaaaccctctctgcctggggactgggcggtgattccgcttctgcctgggctcctgccatggcccccgagaggggctgacactttagctcccggtgcaggtgagaacccgcccggaggaagaaggaaggcgcgggccggggattaggagacggaggcggactcggagccagggaaccaggggtccgggctagagctggagtcgtgagcgcgcgcccgccccgctctgggaggaccgcgagatgcccgtgctgaagcagctgggccccgcgcagcccaagaagcggcctgatcgcggcgccctgtccatctccgcgccgctcggcgacttccggcacacgctgcacgtggggcgcggcggcgacgccttcggggacacctcgttcctgagccgccacggcggcgggccgccccccgagccccgggcgccccccgcgggggccccgcgctccccgccgccgcccgccgtcccgcagtccgcagcgccctcgcctgccgacccgctgctgtccttccacctggatctggggccctccatgctggcggacctcgagctgaacgacgtcatcggcctctaggttccctcattccccgcgcccttcccgcccggcaccccacttctgtatacataaacggccaaggtgtgtgcccggaaaaaaaaat

SEQ ID NO: 215099 - DNA, 461 bp, Homo sapiens
aacaagcattgttgcagagtgaattttctgcaaaccttcgggagaagtataagcacaggggactcagcagttacccacagtatgtgccagggctagagtcatttgtggggaccctcctggctctttggcctatttttttttttcaacatacttaggacaaggtcatttcaaatgcccagataagtgcagagaaatcagtcattaaattctaactcagcctgaagtttcactcggtgggaaatttttgaatataaatgtcttgtgttaccatataatagtagtgacttatagttttagccaacctttattgaatgcttactatgtatcaggtatgttctaagagatgtacatttattatctcattcagtctatgcatcaaccttatcaggtagttatgacagaagtagtattttgaattcaccaaatcccatttcatattcctccattctggacacatagaa

SEQ ID NO: 215100 - DNA, 352 bp, Homo sapiens
ttagctcttgtttttgtcattttgtcctctcaataacatctaccactattcttttttaaaaatatattttttaggccgggtggtggctcacacctgtaatcccagcactttgggaggctgaggcaggtggatcacaagttcaggagttcgagaccagcctgaccaacatggtgaaaccctgtctctactaaaaatacaaaaataagctgggcgtggtggcatgcgcctgtaataccagctactcaggaggctgaggcaggagaattgcttgaacccaggaggcagaggttgcagcaagctgagatagcgccactgcactgcagcctgggctacagagcgagacttggtctca

SEQ ID NO: 215101 - DNA, 891 bp, Homo sapiens
attcagataggattttaaaactacactatgtttacacacaaggcattaatattttaatgaaaatataagtaattatcaacagtatgaatgtttcttcataccatcataatcaagactgaaatttatcctgaatgggtatggtatgagctgggtttactgaaaggacacaaacacatttattaaggacacagaaaagataaacagttagcaaataagctacaagtggtgggcatcattcagaaatacactcaaaatattattttcaaatatattgctttatgccatttcaaatacatggaacaagaaatagttacaaaattaggtaatagtatagcagaatgctataatcaagctttattcactagccctgtttcacttttttatcactcaaaatgtctagactcattggagacagggagagttatgttgatctgcaatatattcccagtgccttgcatttagtagttgtttaacaaatatttaagaaagttttataaaggagtagctatacactgtgaattttcattcatatagaagaatttgtactctctccaatgacagcaaatagtctcctcataaattttaaatgtagctaaaattataatatggtttgtcaactatatttaatgtaagaagaatggaaacaattacaattttatgtctattttcgtaaaacatctgtgtgtaggcactccctttcttctgcaattgcaaaacgggactgattttgagaatattttatttttctatgatatttaatatatgtttatttatatttttgagcttgctaaatgctgacatttaaaattttaaagagatattactctgattgcaccatattttgtactatgtgtagaaatggtcattttttacataaataaaactacatgt

SEQ ID NO: 215102 - DNA, 630 bp, Homo sapiens
  misc_feature (26)..(26): n is a, c, g, or t
ggaccttgtagacaaatcaaccaccntggaatcaaatcttatctttactccttagggctttgtgaggtaaatgtcctcatctgtaaaatgggaacaattagagcatgatctccttaatatagttgtttgatgacctgaattagtttatgttcgcaaggtgactaaatagcggaagaaggataataagcattgctgatgggctggacccagtgctcctgcaggagtgactggagtagttgttagatggccttggacatgactgggaatacaatggggttcctctctagcagggctcaccacagacttgggactggggctgtaggcaatagttgttctgccaaccctcctgaagggaaggtggttaagtattctttgaattgttatcttctgaagtcttccagtggtcttttttctttttttcttttttttgagatgaagtctcactctgttgcccaggctggagtacagtggcgtgatctcggctcactgcaacctccgcctactaggtttaagcaattcttcctgcctcagcttcctgagaagctgggcttacaggtgcctgccaccatgcctggctaatttttttatattgtttagtagagacagggttttgccatgttggccaggctg

SEQ ID NO: 215103 - DNA, 413 bp, Homo sapiens
tagaaataaggaaatgtgacttagaagtttgtgattaggaaccactttgtagagcctcgcttatttgctgcattagatagtccttggaaataagctgagtggtctcattttgcagattcatttgtctaaccagatacactgtagggccagggtttgtggctaagtaaatgaaaatccagcaggattggagggagccaccccaggaccttgcccctcaccagccatcttgaagagccactcgcctgcctgcctgtgttcctgccccactgcctgaggagaccttttcagaattatgttagctattctaacagttcctttgcctttccttatgcattttatagttagcttgttaatatctattagaaaaagcttgctgggattttgatagaattgcattgaatctatagatccag

SEQ ID NO: 215104 - DNA, 131 bp, Homo sapiens
gaatcagagagaaatgccccaggggtagttagctggaagagggacttgggggaaactgaaatatcaaatagataattttaaaaagtttctatttttaaaattaatattattttaaattgacaaatcataat

SEQ ID NO: 215105 - DNA, 499 bp, Homo sapiens
aatttgaaatactagctatgttaatggaggtcaggattactaaggctggatttacagctacaaaaaagtgacccagatttattttctattactcaaaattagttatgtcgaaggaggagcaaggggcttcttggtctatagactattgctaatgtgtctctggacataaatcttctttggttttcattatctattctggagaaagcaatggtgactctgagtaagtggggcagcaattcaggtctttaccacaccacatgcagcatttgtacaggagtagctttggcctcccagaccttagtgacctgggcaggccacccatctctgccttttcttggagtgatttttacaggcacagagtaaactcctgccctcaaatacctactgccatttgcttcctgatgcttaacattccacatttatagaaaaggcctcaaatataaggaccacaataataacacgtgatttaaattcacatagagatgtattggctcctatt

SEQ ID NO: 215106 - DNA, 525 bp, Homo sapiens
attctacactgtggaaggtcaccatggatttttggtgaactgccagccatctttgcttagcacctttttgataagcaaggtgtttctcatcctgctttgcttaggaatcaccgttatgcactacccaggtgtatatttgttgtttgttgctgtgaaaaataatttcccaaaatttcatgacttaaaacaacaaatactttgtatctcatgttttctatgagtcaagagtgttgatgtggctcaaccggatgcccgtggctcacggtctttcatagacatcaacagacactgcagggaggatccacttacaagctcactttcctggccacttgcaggcctcacttcctcactggcggttggtggtagatacaggtgcctggccactaaggtctttccactgggaaactcacaacttggcagctggcttccactgtaatgagccatcaagagagtgagaaaggaaactcaaggtagaattcaccatattttgtagcctattcttgttagtttcatcctgtgaaatta

SEQ ID NO: 215107 - DNA, 469 bp, Homo sapiens
aaatgacatctgcactcctactgtatttctgctggacagcactgctttagtagctgcaattttgtttcacatcttgggtagcctcaatagctgctatggtttgaatgtctcctccaaagctcatgctgagatttaattgccactgaggtgattagatcacgagggctctgccctcatgaatggattcatattcttatcacaggggtttgacctccttcttcctgtcccgctctcctgccttccatccttccgctatggatgatcctcaccagatgctggaagcatgctcttggacctctcaggctccagaacctttgagccaaataaacttctcttctttgcaaatacccagtctgtggtattccgttatagcagcagaaaacagactaagacaatagctcagaatcaaacataacaaagagaaaaacacacaagaaggacagtagactggaaaagaggaattcaagta

SEQ ID NO: 215108 - DNA, 541 bp, Homo sapiens
acggctgccagaagactacagaagggcacttgaattcagccctctaccaggagggtgtgccctgcagacacaagtgatgaacatttgcttattcatgtattatgtattttctgcttgcttactaaaaggatttagtgatttggttcagctttcagtaaaaagatttctagaacgagagtcatcaaactggcgagatgattactgaaaaacttgacaggccaggtgtggtggctcatgcttgtaatcccagcactttgggaggccaagatggaaggattgcttaaggccaggagtttgagaccagtctggacaacgcagtgagactctgtctctacagaaaaaataaaattaaaaaaatcagctgggtacgagggtgcatacctatagtcttagctacttgggaggctgcagtggaaggatcatgagcccaggagtttaaggctgcagcctaggagtttgaggctgcagtgaaccatgattgcgtcattgcactccagcctgggcagccgagcaagactctgtctctaaagttaaacaaact

SEQ ID NO: 215109 - DNA, 99 bp, Homo sapiens
attgtacatgtgatttttttttttcctgttcatacatttgtgctgcccatgtactcttggcacatttcaataaaattgtttggaaaataaacacagcaa

SEQ ID NO: 215110 - DNA, 227 bp, Homo sapiens
tggaactcaaacccaggcaagccagctgtagaaaggaagagaataagtgacctttcatccgtttctccatatgacttatgtagatgtttcttttgcacagcacaggttggtagggtcagggacatgaagataggctttgtggcaggcagtgtctcttggcttgtcagcaggaggcctgccagataacttcctgcctatctggtcattctcaagtcttggcgtgtgag

SEQ ID NO: 215111 - DNA, 640 bp, Homo sapiens
ctgacctgccatcaggagatataatttgccagtaattacaactttaattccaaaccaaagcacaagaacatacgcacacacacctctgcttgaagactgtgaaaagttagtaaacttaggtaggttgcaggagcacacaaaagcaacagcctcacatatactagttagccatgtagctccaccataacataaggtcaactacctataatgaattctctattagttctctcattattatacccagttgtgcttctctgatcaaactatgactaatataccaaaactctacatcttagttttggtgttagctctacatgtataaaatctccatccatccattagcagtttccctactcacccatggttctctagctctccctatagtagattcaccagaaagggcacatgtgcacagtattctctgagttttgggacattcaaactgtttttctttaaccttgattgattcttgaaggacaaatggttggatataatctctttggtttatggtttacactcattaagattcctgaaatgtcactctactgttgccttgctttgtacgttatttgtgaaaagcatggccagtctaacttacatgtctttgtaagttacgttctttgtttttcaatgtttaaag

SEQ ID NO: 215112 - DNA, 125 bp, Homo sapiens
gagatcacgccactgcactgtagcttggacagagatagactctgtctcaaaaaataataattaaaaaaaataataaaaaacacagaagatcctaaagacaaataaagtcaccactactaaaattt

SEQ ID NO: 215113 - DNA, 117 bp, Homo sapiens
gtattcctccagcattggagtggaccactagtttttcggttaaaccacagatgaagctgttggcttgaatttagggtagtgttttacacacacacacacgcacgcacgcatacacac

SEQ ID NO: 215114 - DNA, 239 bp, Homo sapiens
tgcactgtcccatgacagagggcaaagagagggagagaggaaagaaagagagcaagcacaagtgtgcaaaggggccaaagtcatccttttataagaacccacttttgagaaaatactaatctattcatgagggtgatgcccccggatccacacacctcccactaagccctgcctcccaaccccactgcaccgaggatcgagtttccaaacccatgaacttttggggacacgaatgttca

SEQ ID NO: 215115 - DNA, 377 bp, Homo sapiens
caaacagctacactcggagtagaaaacaaatgaagcaaaagtttagcatcctctcatgtgtgtcaacattgtagttttacatttactttcttctaatctattaaacataagtatggctccatttttttagtattaccagaagccctcccaatacggcaatattaccttctgtgtaatccacttgccaacagctgttttctgttgaaatgggactcaagaattttgaatccaaggccaatgctgcctgctctgtttacaatggtttgtgttttgtggatacatatcaaatgctgtaatatatttttatgatagaattgatggttaatacagggaaaaagtatatattgtgattctgtccaataaagcctcctgttata

SEQ ID NO: 215116 - DNA, 410 bp, Homo sapiens
ccgaaggccccagtcctctccttgggagctggatcagggtttattttaaagcccattcttacctcttagcttggcaaagtattgccaagcctggggaaaaccagccattcatgtatatttctggcgagtgtaatgtacctcctctttggagggcaatttggctgttgtctattgaaattaaaaatatgcgtctcttcctggaaagggaattgttgggggaatttatcctacagataccctcccgtgtgtgtaatgatagccggaccaggatgttctttaaaagtggttctcagccagtttgttacaaaggtcatgaattattcagcaagatgataatggttttatgtttttaaaaatgataaattgtagcctgttgatcatcgttaaaaatatttgaatgctatttgtat

SEQ ID NO: 215117 - DNA, 480 bp, Homo sapiens
tatctttcataagcataaaataaacctaaaactaaataaaaataatataatctataaaaatcataactaaagcaaatacttaaagcattgttcaaggaatatgcttattatttacaataaaaataacaataatgattataatagatcactatttgactggatatctactatgttccagatgctctagtttatacatacatataaactacatttataaatgtatatgtaaatttatacattcccataaaatcctattgacagtcactaccaccaccatttacaaatgagaaaacaggtcaatatatattatgtctaagacaatggcaacctgggatttgactgtgtcttggtctgactcagagtccctgccttaatatcatgtaaatgctttctagttttaaaacctcaggttttaaaatctgatgtccagagttccctgccccctttttctagcctgtaatgattaagaataggagaccc

SEQ ID NO: 215118 - DNA, 264 bp, Homo sapiens
cggaggttgtggtgagctgagagattttaagcagtagagaattacagtcaggattgcattttagaaaaaccatgtttgtggttttttggaaaacaggagggaaccatactgcatgcagggaaagcagtttgccttcattcagatgtcacctactaatagtacaatggctggtgtgatgggagtagagaaaaagttgtggggtttgggtctccctatcctgtcacttcaaaaatcatttcataaaatgcacatatttaacaatgt

SEQ ID NO: 215119 - DNA, 373 bp, Homo sapiens
atatgtaaatgaatgggcatggctgtgttccagtaaaaccacaaaaacaggcagctagctttggtgtggggccctaagagcttggactttgaagccaggttcaaatcctggctttctcaccttctagctccgttaccttaaagaacttcattatcttccttgtattttagtcttttcatctctaaattagtgatagtacttaacagtgttgttataaagattaaacgagttaagtttgtaaagtacttaaacagtgcctaccaggtagtaagtgctatagcagagtgtgttagataatgaaacatcctgtgctgtggatatattattcccattacgatttggattcaaataaagaaatacatgacttagaaga

SEQ ID NO: 215120 - DNA, 423 bp, Homo sapiens
cacgccaggccacagtttgatgagttttgagaaagtaatatacgcatgtaaccaccatcaccacaatcaagatctagaacatttccatcaccccaaaattccctggtactcgtccctggtcccaggcaagccctgatctgttttctgtcactgtggatcagatttgtcttttctagagtctcataaaaatgtgatcttataaaatgtatagactcttgtgtgtaaggtttcttttcctcagcataatgtttttagacttgtctatgttgcatgaatgagtggttcatttctgtttatcactgagtatttttccagtgtatgtatataccacaatttgtttatataccacaaatgttgatggacatttaggctttgtccagttttgtctattatgaataaagccattatgaacatctatgtaca

SEQ ID NO: 215121 - DNA, 597 bp, Homo sapiens
caggcggattgcctgagcctaagagtccaaactagcctggacaacacagcaaaatcctgtctcaaaagaaattggcaaaaatgattaaggttacaaataccaaatgttacaatctgagctatttgaatgaatgaagagagaaagaataccaagtgttgacaagcatgtaagcaatcagaactcaaaaactgctattctatttataaaagaagttgacattatcttgctttaagctaaacatacacttaccccatgacttgaaaattctactcctagatattgtaatgtaacccagtgaaatattttgtggtagtgaaaatggattaactatagccacttggctattagatgaaaaatgcaagtcatagaatatacatagtacagatgcactaacaaaagtttaaaattaagcaaaactaataatgtattactaagagaaataaatgtaataaacatttaaagggaagcaagagaataaaaaatattcaggatagcgagtaactcttggtaggtaaaaggagaattaagattgattgaggaggccaggtgcacttggctcacggctgtaatcccagctctttgggagccaaggcagtg

SEQ ID NO: 215122 - DNA, 306 bp, Homo sapiens
cagatagatatacaggctaaaattcattgagcaagacacttaactttcacacattttacagcactgaatcgtgcctcaactcagggaaatgaaaaagacaggccttataccctacatactactctgttctcttgtccttttactttatttaaacctgctgccagttggtagatctgcatgataattttagtgactgcatagtatttcattctgtgatcatcatttgtatcttcagaccaactttgttccctggtagaaaacccttctgaaatgaggtaaaaggagaggggaccccagggcctttgg

SEQ ID NO: 215123 - DNA, 609 bp, Homo sapiens
caaatgatcaggtcaggaagccaggtggattctccttcctgtccttgaggaggtgaggggtccggggctggctttctcagacaggatttcccagatgatttccattactcctgactttggcactgcatcattctctgtgggaggctgtcctttgtactataggatgctcagaggccaccctagcctcttcccgatggatgtcagtgacacctccagccccacagttgtaacacctcggaacgtctccagacattgctaaacatactgggatcaggggcagaattgtcctgggttggcagtgatggctgtagagtagaggttgccagtggggcaaggtggcccacgcctgtaatcctagcactttgggaggctgaggcaggaggatcacttgagtccaggagttcaagaccagcctgggcgacaaagcgagacccccttctttacagaataaaaaattaaaaaattcgttgggcatggtgctgcacgcctgtcgtcccagctactcgggaggctgaggcaggaggatcacttgagctgggaggtcaaggctgcagtgagctgtgatcccgccagtgcattccagcctgggcaacagagcaagaccctgtc

SEQ ID NO: 215124 - DNA, 229 bp, Homo sapiens
ggaataagcccaaacactgcttttcattttagactaccccagaatattatatactatttctcagggtagctttaagtcttcctctttaaggaactcagtaaacaggtaagttatattaggtggctttatgaagaaatatacatgctctttaataatattctgttttaaggaagaaaaccacttattaatcagggatgtcattcaacccagaaatctggtacagttgctt

SEQ ID NO: 215125 - DNA, 376 bp, Homo sapiens
tcgtccaccttcctctttccgcgagggagaaacagatcctgagttcaaaattccagagctgaaagtcctctcttggatccttctggaaacagtaagcaaaagcccgtttttgctgagaaagtgactcggcagctatccggagctctctgcctgcaggtggggccattctcctatggagccgacccgacccgctcaaagctgccccgggaaccgcaggtttggttcgcgcacgccgggacttgccaaccgcacccggaaaatcggggccatgtccaaatgtttcgcttcgctgccggcagggagccgcgccgggctcgctcctgggatcaactgcacagtcctggctttggggagcgggaggcggtgagcctgcccg

SEQ ID NO: 215126 - DNA, 861 bp, Homo sapiens
attgtttccagtgggcattgttgttagcctttcagaattccatctgcacgtgaaacctaatggatttagatctttagtttctctcttacctgtaatccactattattgccaattcactgtattttgagcctaaaatctgagcccatgtcctctgacaggcatgaaatcttttgtccctctgccagaaaactaagaaagtactgtattttgtatgtttattattttgaagtgtctgaaatgcaatttacaacactgttgcaaagaactttacaaaaggtaatatttgtatcgtatatacattttttctcccagccttctcccatctcctccagaaaaatttcctataaagatggatttttttacactgaaattttactgaatatagtcaggatcatgggcaagagaagaaaatagtatacccaagatgataaaaatttaattcgtctatgcttgatcagtgtgagtaaaacatcttcctttatcatgggagctgcacagattcatgtgggaaactttagggaatgactgtagataccctttctctatgtactctctcacctaattttcagtcactcatatatgctagagtggagcccttaatttaaatctatttggaaggacttttttaagaggaaaaatattttttctaaattataaagctttaccttttgagtgatttcttttttagagtgctcttacactagtcagcattgctagtttaaagttgattaacttgaaagagtatgtatactatatttctattttgctaacaaattggtatattaattaccattggttcttaattacaagaaaacttgtgcttagaattttaagataaaaggctaagtgacaaatgcttct

SEQ ID NO: 215127 - DNA, 481 bp, Homo sapiens
aatacatttgatcagactaggaacaagttgataccaaaacctgaaaaggaaactacagaatgggaaagtcatagaagatctctcacagaaatataaatcccttaacaaatattaacaagtaagattcatgtctctataaaatagacagtatatcatgaccacactggttttttgttatcctttgattttgtttatgaaaagcaaggatagcttaattttcaaaaactcaatcaatgtaattcagtattttaacaaaaggaatgaaaaattatcatctcaatagacaaagcttttgtctgagcaccttttcatatagctgctgaccatttgtatgtcttcttttgagaaatgcctgttcagctactttgcccatgtttcaagtagtttttggtttcttgctgttgctttgttttagttccttacatatttttgcatattaaccctttatcaggtatacagcttgcaactattttctcccatt

SEQ ID NO: 215128 - DNA, 398 bp, Homo sapiens
ttagtgaggcattagattctgaggactttggatatatatgcagattgctttatacaaacagccaaacacgtcctttcacacatgtgcagaatctaagaactgaaatatgattgaagtcacacccccctttcctgagggaatcctgcattgacttactggtctgtgtgggttataaagacctagtccccttgccctgattcaggacatctctgaaaatccgttccagctccagagtgcccctttaagacatgggaaaacaaaacaaaacaaaacaaacaaacaaaaaatgccatgctgcatcacagtccaacatctccctatgctcagtcctgctttacttactccctcaacaatgttgaccctgagaacacttcccaatgaacttattgcattaaatt

SEQ ID NO: 215129 - DNA, 424 bp, Homo sapiens
ttaagtaaaatcttgttacagatttagccctggatatattagaactatagtgtgttgaaattgcgcataagaaaagcatccatcagcattcatgcaaaggctacatgtcatgactattaggagtaatttcaaaagcatattactatatattctgcattcatcctttctctggtcatcatcttttaggctcaggcccagctttctgaaattacataagttttgactttattattagttattttgctgcttcctttaagcaatggactcattgtgtacttttttctttttataaatgttatcattttgtcatacttttgtctttttttcgtaaatttgtatctacattgttgaacacatggtacatatagcttcctaatgctttttgttttgttttttttttttttttttgagagagggtctcact

SEQ ID NO: 215130 - DNA, 386 bp, Homo sapiens
acacaaaaatctaagtataaaaaaagttgggaagaaaagacaaattctgcggttacaatgtctaagacaattatcctggccacttcaaaaaagacaattttatgaaaaatgcaaaagatggaggggggctgttctagattaaaagagattaaatgcaatacttgaaacttatttggatcttaagttggaaaaatatatatatatgtccttttgggggcaatgggtggaatttaaatatatagataagataattcgtgaataatgtttttaaaagttttagtgtgataatagcattggtttatgtaagagatattccttattctgaagaaatggacgctaaactatttagaggtgatgtctgcaacttagtttaaaatggttccaga

SEQ ID NO: 215131 - DNA, 355 bp, Homo sapiens
tggggctggggcgtgggagatggttccaagaggaggtgtttcctgaattgccttttgaagtttttatattgggtttaataactgtattgtgagatatattatttataccaaagagtgcataaagcataagtacagtttaatgaataattacacagggacatccctacagcaccatccctgaagtgagtttggaagggtaggtagtagttagccaggttaagctggggaaagatccgggaggaggtaatgatgtgtgaggcaggagaatcgcttgaatctgggaggcagaggttgcagtgagccaagattgtgccactgcactccagcctggacaacagagcaagacttcatctca

SEQ ID NO: 215132 - DNA, 601 bp, Homo sapiens
ggatatatacttttgtttccctattggtgaagcagttaatactcaggtaagtgtagaataatctgaatagcaaaagttataattgcttagccaaagaagttgtatcaataatgcataaataaaataatatttaaataacacaaaactttagtaaaaattgttttaaatttatccattttggaaaaaatatacatgtttttcacatggtgaaaaagcactctttgattctgtggctcatgaaaatagcctgaatatttgacaattatggctgtagaaaagcttgttgacactttgacattcagtttgagggaatgtgttgaacttgctatttttttttcttcattttgttacaactttagttattctataatccaaggaactcaaacctttaattgtaggtattttaatctcattagtttgttatctgtttcctagctttggttacccaatgccaaaacattgcagtgatgactgaaaattttgttcagtcatccagctgttttcaaatataacactgttttagcacataggagtttggaaaattttcattgattgactttttctggatacttattatcgtctaaaattttcattagcaaat

SEQ ID NO: 215133 - DNA, 609 bp, Homo sapiens
ttgcttagactttaatagactagcctagtaccccaaccacaatttataagcagtttcaagaaagaaaatcagtttgtatcctaaaaatcataagctcatttataaattggaactgactaaagaaaaaagttgaggtacttcattgttaatttattgcaaatacttaaaataaacttatttttaaagattagcttttgagttccaaagacctgatattaaatgtccttactgatccagaggcctcatagctgaatatccaaaacatgcatgccacagggtataagtccttcgccacagaccagagcatctctgaggctaacctttgggtaatgtttgttcacacctggtgcaaattaagtggtctaaccaattatatatgataactttgataaataatattaatagatattatttgttgaatatttaaagataggccaggcaacttcacatggatcatttcatttaatggattcgaataagccatgagattcatgtcgtcattgctgttttacagtgtaggaaaccaaggcttaggatacttaagtgacttggctggagtcatacagtagataaatgacagctgaaattcagatctaagtcctgcgtaac

SEQ ID NO: 215134 - DNA, 528 bp, Homo sapiens
agaagggaaacagaaagcttgacatttggcattgcttttctccttgcggcatttgctgattcaaaacatacagcctaggagctgaaaagccaaggagttgaaaagccagggagcagagaagccaattggcaagtgctcaagccaaaagcaccaactaagaggctgacaagcccttaggtagtctcataggtctaggagaacaagtaagcttagagtccaacgagggatctgagggcacaggtgaacccagcctttcacatggcaattttaaatggcaacgtcctaaatggaagggcaaaccaaaaatagaccagcacttacaaagactgaagaccaattttaaattagctcaaactgagaatgggttaaggttaccaatccctgtaataactatctgccataagagaaagcaaatcttcttcagagaaagataaggacatccatgaggtacaattatctctctctcttttaaatacacccagtattcaaaacatcacttgatataccaagaaataagagtaaatgatc

SEQ ID NO: 215135 - DNA, 483 bp, Homo sapiens
gcggtagttcatgactgtaatcccagcactttgggagaccaaggcgggtgggatcacttgaggtcaggagttcgagactagcctgggcaacatggtgaaaccccatctctactaaaaatacaaaaaatgagccgggtatggtggcagatacctgtaatcccagctactcgggaagctgaggcaggagaatcacttgaacctgggaggtggaggttgcagtgagttgagatcgtgccactgcactcaagcctgggcaaaaagagtggaactctgtctcaaaaaagaaaaaaaaaagaaagtggttcaagtgacagagtagagtcttggctagatagaggagtaaagtgaatgcctgaggatactgacaagctggaaaacaggaggaaaaataagttaaatggcctgaggatgaagtccagttgaattttaaacccaagaaaatgagaaagatcgaaagattggtaattaaaataaaatcctcca

SEQ ID NO: 215136 - DNA, 321 bp, Homo sapiens
catttgttcattcaacaaatggcaggctctttgctagttgctagggtggcagcgttgtcttcgagggacaccgtgatgttcatcctcgtggtgctcaagcttgagtgagaagagaggtgctgaacaagtaattttcatgaattatgagagatcgggatgagaaatacagcatggcatggaggaggctgtggtggtcaggaaaagctggaacctgaataataaagggaataagattgaggaagaatggaggatacaaaggcaaatgtagaaaaataggcaaaagatgcagacaggcaatttacaagaaaacaattgcagatg

SEQ ID NO: 215137 - DNA, 524 bp, Homo sapiens
gattttgcaaaattatggagagtgcagactaggagaaaaaggacaggcatagttgtgacaaggagctcttttttctagttctgcattctagaaacagtactgatgagtccaaaaatatagagataaaatttgtcttttttcttgctttaaaaaaaaatgcttctaaatgtctacatacttgcctaagaaaatatttctcaactcctccagaatatttagggttaactaaaaattataaaaacataccacagagctagtccactctttatgcctagggtttacccaaaaggtctgcatgctctggcttggagaccctgaccccatctcaacttgctggttttaagtctacatatttggctgcaaagccctaatgccaggaggaatgcggaactgatgagtccaccccatctacaagctagaaggacatcttgattaaattagtgtcaaggggggtggagagaaaggcacagtgacacaaagggtgttttgaggagccctgtagcgcctgtggagaatgaatgttc

SEQ ID NO: 215138 - DNA, 142 bp, Homo sapiens
atgattaaatgaaggaggacctgaaaagagggagcatctgaattgggccttgaccaagtggtaggatttggacacaaagagatgggcaaaggaactccagagagaaggtacagtgtgagtaaatttccagtacaggggctgg

SEQ ID NO: 215139 - DNA, 413 bp, Homo sapiens
caataccatgcccaagtaaggtttattccacatgtaaggctggtttaatactcaaaagtcaatcaatatgattcaccctattgattgtctagattggaaacatcatacaattctatcaaatgattcaaaaaatgcttttaagaaaaactatacccattcatgatttaaaatttaaaaaccaactctcagcaatgtgggaatcgagggaatttcctcaactgtgcaaagaacatctacagaaacctatagctaaattgtatgtaatagtgacagactcaatgctttcccatgaaatcaggaacaaggcaaagatatcctctccaagtctttctattcaacaaggtactggaattgtttgctggtgcaataaggtgagaaaaggagttaaaaagcatatacattggaagtaaaaa

SEQ ID NO: 215140 - DNA, 217 bp, Homo sapiens
aactgggaggctgcagtgcagcctttagtctgtggctgaaggtctgagagcccctggtgtaggtccaagagtccaaaagctgaagacttggagtctgatgttcgagggcaggtagcatccagtaatggagaaagatggaggccagaagacttagccagtctagcccttccatgttcctctgcttgctttgatcctatctgcactggcagctgattag

SEQ ID NO: 215141 - DNA, 288 bp, Homo sapiens
catcttaaccccttgaagctgatggtatttaggaactggggaggtgattttggatagaattttgcccaagtccagggatgactgagtgggctgtggcagacagtgccttttgtattggatagctgacaagctgcatgggaatacgcactcctcctcagtcatacattatcttcctttggcaggctggcagcatagggctcggtgggaaaaccttaagcctcactttaataatggtagcacataaggcacagtgattctgactcagttgcaagctgagtgcaaaattgg

SEQ ID NO: 215142 - DNA, 428 bp, Homo sapiens
aggaaatgagcccaggaagtaagttgggcagccgcaagagtggtaggagagcttacccagaattttactgtcttaaatccccaagggtattattgagggtgtgagaccagccacgttaggccctgcagtggaaaagggggagggggatggggagtaaagaatgctgacttttctctgggcttttagggaaacctctgagctgggctgcaggggttctgtcctttgacattcttgtttgtgaagatggaaaatgatctctggagtcaagcttagtttatttcagataatgaactttttctcttaaggtatacccatagctttagagtacatatattctcaataaagagtttttaggaagattttggtatattgtatataattgttcaggtagctatgcgggggtagggggctcccataacaaagtttaa

SEQ ID NO: 215143 - DNA, 679 bp, Homo sapiens
tctgttagggcaagatcaaacagtgtcctactgtttgaatgtgaaattctctctcatgctctcacctgttttctttggatggcctttagccaaggtgatagatccctacagagtccaaagagaagtgaggaaatggtaaaagccacttgttctttgcagcatcgtgcatgtgatcaaacctgaaagagcctatccatatcacttcctttaaagacataaagatggtgcctcaatcctctgaacccatgtatttattatcttttctgcggggtcctagtttcttgtatacattaggtgtttaattgttgaacaaatattcattcgagtagatgagtgattttgaaagagtcagaaaggggaatttgctgttagagttaattgtaccctaagacttagatatttgaggctgggcatggtggctcatgccagtaatcccagcgctttgagaggctgaggtgggtagatcacctgaggtcaggagtttgagaccagtctgaccaacaaggtgaaaccccgtctctactaaatacaaaaaattagccgagtgtggtggcacatgcctgtcatcccagctacttgggaggctgaggcaggagaatcgcttgaacccaggaggcagaggttgcagtcagccacggttgcgccattgcactccagactgggcaacaagagtgaaaac

SEQ ID NO: 215144 - DNA, 343 bp, Homo sapiens
gagacggaatctcgctctttcacccaggacggactgcagtggcgctatctcagctcactgcaacctccgcctcccgggttcatgccattctcctgcctcagcctcccgagtagctgggactacaggcgcccaccaccgtgccctgctaattttttgtatttttagtagaggcggggtttcaccgtgttagccaggatggtcttgatctcctgacctcgtgatctgcccgcctcggcttcccaaagtgctggaattacaggcgtgagccactgcgcccggcctcatcattttcttgattgtactctatgctgcaagcattttgaattcccttcagtcctttcta

SEQ ID NO: 215145 - DNA, 430 bp, Homo sapiens
agacatgctaaaaggcaagaaacacagtttgaagagacagaacaagcatcagagccagtcagctatgacaggaatgttgaaattaccagacaagcaattcttttaaactatgattaatatgctaagggctttaatggaaaaagtagacaacatgcaagaacagctggatcctgtaagcaaagaggtggagagtctaagaaaaaaaacaaaaagaaatgctacagatcaaaaacaccataacagaaatgaagaatgcttttgctgaccttatagtagactgggcacagatgagaaaagaatctctgagcttgagtatatgatgatacaaacttccaaaactgaaaaacaaagaggaaaaagactgaaacagaacagaatattcaagaactgtgggacaacttcaaactgtgtaatgggaatatcagaagga

SEQ ID NO: 215146 - DNA, 683 bp, Homo sapiens
gactcctgcttccccactggactaggaaagactggggagcagggctgatgccagaatcctaatgcaggaggagcttaggaatgcaaatcaggctctggagatgtgggcttgtgggggtggggtcgtcttgatgctgcccttgcatagcaagcactctgcatttacttggactgtgtgtgacttatttgattggttttgggggtgatcacagtgccactgggggcagagaacatgaatgctttatcctgcctgaatctcttttccttgtctggtgactggtgcagaggtagtcacaataaatatctgatgaacctgaacactgagtccaataagtaagcttggagggaatttatttggcaggcagggagggattgtctggcaggtttttcaataactatttgagttaatgaataacacaatgaatgacggtaagcctgaattatgtaattgaagccaggtaaaacagtataaaattaggaaacgataaatagcccttgccaccttgtgttgcaaagtgctgggattacaggcgtgagcccctgcgcccggcctcaagtggctttataatataattattactacggaaggaatccgtggtcacataagcttggcaaatgttgattcaacaaagctaagccaacttctttgcagcctgggtgatagagtgatgagaccctgtctca

SEQ ID NO: 215147 - DNA, 343 bp, Homo sapiens
tctacagctagctttcatgaatctaagtgggtgttaatcattttaattaatggtttaaatataatggtttaataccttagtacaggttaaaagcttcattaattgtgttagttttgatgaaaaatgtaagttataatcttatttaaaaaacagacaaaccacagacttgcacttttatttgccctgggctgaaaatgtgccaaagtcccacttaaaattttttttttaatgcttgaagcttttctgaccatttgatcttgtgttggattgtgttttgtaataatctaagcaagattgctttatgctcttccccaattaaaaacaagaatgatgaccttcatga

SEQ ID NO: 215148 - DNA, 178 bp, Homo sapiens
tactcagcaatgcagatgccattattcctattttacattcagggaaggtaagaaccctgctggtagtcacagagttgagatttcaatccatgtttgattttaaaatgcatgttcttttcattatgcccataagtagcgtgtgaaatttctttcctttttttttttttttttttttttt

SEQ ID NO: 215149 - DNA, 325 bp, Homo sapiens
  misc_feature (309)..(309): n is a, c, g, or t
caagcatgtgttccagctcataccctgtgagagggctgcccagcaaggcatgtgagagcaccacaggtttcaaagtatgtcctgtggattggcaaagtgaggagggcatccacccatgggggcagttcaacatggggagtcacacatgaccgggttactaggacatgatcctgagggatgggcccaaggtggaattcagggccctactgggatgaggtgggagttgccaaagataagtagactagaacggcagaacacaagcatcgtgagagttttcacacaggtgggaggcagagcaagactctgtcncaaaaacaaaaaaaaa

SEQ ID NO: 215150 - DNA, 576 bp, Homo sapiens
caagcatgtgttccagctcataccctgtgagagggctgcccagcaaggcatgtgagagcaccacaggtttcaaagtatgtcctgtggattggcaaagtgaggagggcatccacccatgggggcagttcaacatggggagtcacacatgaccgggttactaggacatgatcctgagggatgggcccaaggtggaattcagggccctactgggatgaggtgggagttgccaaagataagtagactagaacggcagaacacaagcatcgtgagagttttcacacaggtgggaggcagagcacagggaatcagaactccagttataaggggacctacacagaagaaggtgacaacagagatggcatgttggttatgaacagggaaattgatcagatatataaatatatgaagggtgatggagctaagtttcacactgtgcaaatagggagttacttatatgaagaaaaagctaaaattaaccctatggtgtgtcactagaataaagaatcagagtgattgcactaatggtttttgataattgtatttcattgtaggaataaatgtatatgcaaatatgtg

SEQ ID NO: 215151 - DNA, 646 bp, Homo sapiens
tcatgcctcctgcacttcattcagcctggaagacagactcaaaaaaataaataaatacaatgtcaaaaagtgagcaaggttctatccccaatccaaatgctaactggtttaaaaaaaaaaagtagaagagagacaaggtctcgctgtgctgctcaggctggtctcaaactcctgtgctcaagtgataactcccaccttggcctcccaaagtgctgggattacaggcatgagccaccgcacccagacgtaagcgggtttctgtttgttagagaagccttttcttcaccaagttaagaggaccttaccacttcattttgggaggagtgtttttattccttctatcttggattcatgaacatccaggtgttctttcttacctcttcttacaggcaggggagaatttaaaagagcctgaaagaatagttatgtgccccttgacatttcagcaaatgtttcagtagaaaggagattggctctttcaatagttcacctaatggtctgtgaccgagctgaggtgtcttcttgaccctgtaaaggaggcagctccatgagtttgagggctacacacgtcaaatggctgtagttgcccaaagaattttggatcagatctctcacctttgatgggaatgaaataacaaagcctcac

SEQ ID NO: 215152 - DNA, 413 bp, Homo sapiens
ctgaacatgatgcaaaagccatcactctctgaactgtgatagcattttccaagccacacataaatctggtagtaaaaggtaaaaacctaattgtctaagggggtttatgcaccatctgtaactaataagcagcttaggcaactcatgggcaaccctaggtagccaggctaaaagaaaagatgaaaaatagatctgagtagtgatatgagacactgcacactacaggggaaacagactttacagaattagctcagccaagtcacgaaacagataatcagccaaccaaccaacaacaatgccctggggggacacatattcagaactgctataatatattgtctaaaatattcagccaacaaaaaattgaaacataaacaaacaaacaaacaaacaaaaagagtgtaaccaataag

SEQ ID NO: 215153 - DNA, 487 bp, Homo sapiens
gcggccgcctaggagggagcccgccggggcggggcggggccgggtgcccatgaacagcggggtcccggccacgctggccgtgcggagagtgaaattcttcggccagcacggcggggaggtgaggtccagcgggctctgcccagactcccggctttggatgcagagtggttcctggttctgtgtagtgggggttccagaatgttctctgggcagtggctcaggacattgagtccagagtagactttgctaacccaagaaggatcgaagtaggttctcagctccagtgccgggccccagctccagagcagctctaggttctaagctctgcctgtaaaaagagccccgggctctgggctctgcctcgagaggggcacaaagctccctgctgactctggtgttttctggggccctggctctaaagtgaactcagaacttagagtagattctggactctccgttgtcagctgcggctctggaatgggctctt

SEQ ID NO: 215154 - DNA, 1145 bp, Homo sapiens
gcggccgcctaggagggagcccgccggggcggggcggggccgggtgcccatgaacagcggggtcccggccacgctggccgtgcggagagtgaaattcttcggccagcacggcggggaggtcaactcttctgccttctcccctgatggccagatgctgctcacaggctcagaagatggctgcgtgtatggctgggagacccggagtgggcagctgctgtggaggctgggtggccacacaggccccgtgaagttctgccgcttctcccctgatggccacctcttcgccagcgcctcctgtgactgcactgtccgcctgtgggatgtggcaagagcgaagtgtctgcgggtcctgaagggtgagtgagctgggagccaagcagccaggccagcgttccctttcagatggtgctgtgtcctgtgtcacgtcacctttccaccttccccgaccccgggctggtgcctgcaggtcaccaacggagtgtggagacggtcagcttcagccctgactcgagacagctggcatcaggtggctgggacaagcgggtgatgctctgggatgtgcaggtacgttgaggggctggggccaccagtctgggattcaaggaccagttccagagaggatgtcaccagtcttgccctcccagctcaaaccctccactggttcccatggcccatgcccacagcaggcaaccaaggctgcccccacctggccacagccgcctctccaggcttccttgcacacagcagccctcaggctttttgcacgaggtccccctttcctggactgtcaaggccaggtagccggctgccctctgctgccttctgcagctcagggctctctctagtccggccagatgctgcgcctcttagttgggcaccgtgactccatccagagcagcgacttctcacccacggtgaactgcctggccaccggctcctgggactccaccgtacacatctgggacctgcggatggtgaccccagcagtctcccaccaggcgctagagggacacagtgccaacatcagctgcctgtgctattcagcatccggcctcctggcatccggctcctgggacaagaccatccacatctggaagcccacaaccagcagcctgcttatccaactgaagggccatgtcacctgg

SEQ ID NO: 215155 - DNA, 529 bp, Homo sapiens
aagtgatccgcccgccttggcctcccaaagtgctgggattacaggagtgaaccaccacacctggtccaaagaatactcttaagaagagacccagtttggttctcttaccacctgctgcagaatctcccagggaagcttgtgaaaatgcagggtcctgggccctaccccagagatcctgaatccatctctggcagggacccaggaacctacattttaaccaagctcccaagtaacaaagtaaccattactgtccactgtccagattcctgaggcccaggaatctgcatgtttcacacactccagagtggattgcccggtcccatctcacagctggagtcactgggacccacccaacagaaggaaatgcactgagtgacaggaaagcaaataatcaatgagtgttgtcattcatttatttgctaatttcatcaggtccccaaacaagggcacttgtacactcccagatgcctcagcctagaatcagaatctctctcaattgtgctcctagtattataatattttaagcctc

SEQ ID NO: 215156 - DNA, 612 bp, Homo sapiens
ggatgggatctagtcttattcttttcatttaaaaaaataaaatataacggttccaatactttgcactcagggtaacttactgttgctagagaccatgatgacaaaaaagcagagaagggtaaaggcaatctgaaaacatggaggcatattaaaggcatttaacaatgtgttattatttttttaattgccaatctcacatcttaataaacaagacaatgtcctgagtgtggctgtatttgttctccggagaaaaatgaccaataggatatatataaataagtagagatatacaagagggatataccatgagaattgattcatgtgattatgagggccaagaagtcccacaacatgccatcagcaaggtggagaatcagggaggccagtgctgtaagtcaggccaggttcaaagacctgagaaccagaggagccagtggtgtcattgtcagttcaaggcagaaagcctgagggactggaggcctactggagtaaagacccaagaacctgcagctctcatatccaacgacagcaggtgcatgtcccaaagagacagtgaatttgcctttcctctgccttttctttctatccaggctctcaatggattggatcatg

SEQ ID NO: 215157 - DNA, 756 bp, Homo sapiens
aaattcagattgctaaataagggataccaatcagatgttttctatcttccctggagaaactaaggaacttcaagtttaaaacgcctcatgaagaattgggataaaatataaagaatttcctgaagaaagggaggaagatgattgtgtactgaatgattgcaatagaacatctgaaaatgtaaaatgaaaaggataactgaacttttctatgaagagcttgattatggccatacattgaattaatgagcattcagtgagtccacagttctttgttgagggtctcctgcatgccatacactgtgctacgtcctggggctccataaattctttgttaacaaaataaaaatacccccatacagagaagcactttcagatacattacctcatctctaacagaacacacagtcaacagaaccatgcggaggctgatcaatattctaaacaatagtttcataaatactgtccctagactcgtctactcactgggagctgcaggggttggtattctagctagcaaatgaaacaatctgcatacatgcttaaatcaagtttgtttaaaattagaaaatggcataatgtattcaaaagtttttatgcagtatttgcatggaatttaaaatatgctacatgctttgaattaggagagcagagcgatgtgtagctcatctattggtctgatcgaatgtttaaaaatcaaattttagagagctctgtacttaaataactgtaaaagaaaataaaatcagaatgcataaa

SEQ ID NO: 215158 - DNA, 357 bp, Homo sapiens
aagcccctggcctccgggttctgggatgtgggctgggctgaggtccgcccaggtttctcgcttcttggagcccccgtcagttatctgcgttctccattcttctctggggcacagcctgcttgtagtgggtccctggcaagcaggaagaccaggctgcccttgctggcacattccaaacctttgcccatttcaaatctgctaccttcccactagccagagcacgtcactcgccaagcccaaagtcaagggaggagagcccacccaccacctagagaccacagcaagcagacggatgtaaaattctgctacgggggagtgaaaaaccaatgattaaattgctaattgaattgtaagtta

SEQ ID NO: 215159 - DNA, 506 bp, Homo sapiens
ccctgcatgcacattcgaatcacctgggggcacaatgcctaggctccaaccccagacactcttatttcattggtctgggtggacctggcatcagaagtcatgtagctcctcaggggactgtagtgtgtggtcagcactgagggctcctctatgaggcctcaagcccaggtgactctgtgaggtctgcagagggagaaaagaacccacaagggaagaggtggaggtcaggcacggtggctcacgcttgtaatcccagcactttgggaggccgaggtgggtagatacctgaagtcaggagttcgagactagcctggccaatatggtaaaaccccgtgtctattaaaaatacaaaaattagctggctgtggtggtgggcacctgtaatcccagctactcgggaggctgaggcaggagaatcgcttgaactcgggaggtggaggttgcagtcagccaagatcgtgccactgcacaccatcctggatgacagagcaagactccatcacaaa

SEQ ID NO: 215160 - DNA, 406 bp, Homo sapiens
tggagtgcagtggtgcaatctcggttcagtgcagtctccgcctcctgggttcacgccattctgcctcagcctcctgagtagctgggactagaggtgcatgccaccacccctggctaattttttttttttgtattttgggtagagacagggtttcaccatgttcgctagggtggtctcgatctcctgacctcgtgatctgcccaccttggcctcccaaagtgctgggattacaggcgtgagccaccgcgcccagccctcattgtggttttaattctttatatattctggatctctagcccttttaagtcttattactcatttttttaagtttgtcttacttggcatcttagtagttgcttcttattcgcattttacttttttggtcatcatagcactctatttttgt

SEQ ID NO: 215161 - DNA, 181 bp, Homo sapiens
gcttcacgtttttctttatatcaggattattaccacttcctaggttattgtgaggattaaatttagatgatactgtaaaaagaccaacactatacttgcatatactttggccatttttattcagaatctgattcatataatttatttcaaaataactacacacacacacagatacatatgt

SEQ ID NO: 215162 - DNA, 249 bp, Homo sapiens
gattcaagatatgatgcctgctctcgagtggcttaaactctccatttgggtgaaggttagagaggaagagggaaaaacactcttgtttgaatgcatcaattttaggctaaatatctagaagcatatgcattataaacacatgatccatcacaggtataaacatgaaactccacttatctggtgttcacttattcaatcagctcagctatccagaaaaaagctgagatctcagagcagacacagtttatt

SEQ ID NO: 215163 - DNA, 811 bp, Homo sapiens
aatagcttttatgtagaatgattatgcttatgcataggttgaaggtttgaaggcaagaagataaagtttggggaataaacaggggacatgttataggaatggatgaaggataaaactgtggtggggacacagggttaaaggagaggcaaaattgggtttggggattaagatcgcagaagagggatacgagtatgagattgtgtgagactgtcctacatgtcattggcagtgctcatgttagagggaccatctggatgtgctcatgaagttgttgggtgagaaccagatgggcctcagggtagggaaaattaggtggagtttggcctcctcagatctacaaaggcagacaacccagtgaattacttacttaatttgactcttgtagaggctcaaagaagcccgtcctggaaggtctagctgcttgtttcacaaaggccaaagacagggaagtattttgtttactggattcattcagaaaagtatttattgagcatatactatgcaccaggcattgagaacatagagattttgttttccctcaaggagttcctagtctagtggggggaaacaaagacataaaaagtaaatgcaacagtgtgttacaatggagaaagaatcccgtgtggggtattatgggggcacaaagcagggagggataggttcacctcgaggagatagaaaaggcttctcagggaggcaacttggcgtctgggttttaaatgtgggagaatttataccgttttttgggaatttagggcacattttggagagaggttggcttttttggcaaaaacacacccaaagttttgct

SEQ ID NO: 215164 - DNA, 349 bp, Homo sapiens
tttgaaggccgaccgaaggggctctacatttgaaggcctactgaaggagatctacatttgaaggccgactgaaagggatccacatttgaagctgggcactgctgcatggtaggtttcctttcgtaactagtgcgagggaaattgacctctaaccccaacgcagaaggctgggcaccgtcctcagcacagagacctccctgcctgctctgggtttcctcaaacagttcattccatgaccctggaaagcagctccctaacattttacttgacagcccgtcaagctctgagtgtgggatcagacaccatgagcatgccgatgcaccctcggacttgttttcagcccactctt

SEQ ID NO: 215165 - DNA, 2575 bp, Homo sapiens
aggcggtggaggcgcgggcgctgtccagcgtgctgaagccggagcgagctagccgcccggagccgcgccgacccagctgagcccagcccacgggacgccagacctcgaccgtcgctcctaccccggccaccgctcggagccgaggcggacgcgtcccgatcttcccctgtccccaccctgccccgaccctcctctccacctctcgcgtcgtgacaccagctgtctccggcagcctcttggtcatgaaagccctcagattgtcggcttccgccctcttctgccttctgctgatcaacgggttaggggcagcaccccctggtcgccctgaggcgcagcctcctcctctcagctctgagcataaagagccggtagccggggacgcagtgcccgggccaaaggatggcagcgccccagaggtccgaggcgctcggaattccgagccgcaggacgagggagagcttttccagggcgtggatccccgggcgctggccgcggtgctgctgcaggcactcgaccgtcccgcctcacccccggcaccaagcggctcccagcaggggccggaggaagaagcagctgaagctctgctgaccgagaccgtgcgcagccagacccacagcctcccggcgccggagagcccggagcccgcggctccgcctcgccctcagactccggagaatgggcccgaggcgagcgatccctccgaggagctcgaggcgctagcgtccctgctccaggaactgcgagatttcagtccaagtagcgccaagcgccagcaggagacggcggcagcagagacggaaacccgcacgcacacgctgacccgagtgaatctggagagcccggggccagagcgcgtatggcgcgcttcctggggagagttccaggcgcgtgtcccggagcgcgcgcccctgccgcccccggccccctctcaattccaggcgcgtatgcccgacagcgggccccttcccgaaacccacaagttcggggaaggagtgtcctcccccaaaacacacctaggcgaggcattggcacccctgtccaaggcgtaccaaggcgtggccgccccgttccccaaggcgcgccggccggagagcgcactcctgggcggctccgaggcgggcgagcgccttctccagcaagggctggcgcaggtggaggccgggcggcggcaggcggaggccacgcggcaggccgcggcgcaggaagagcggctggccgacctcgcctcggacctgctgctccagtatttgctgcagggcggggcccggcagcgcggcctcgggggtcgggggctgcaggaggcggcggaggagcgagagagtgcaagggaggaggaggaggcggagcaggagagacgcggcggggaggagagggtgggggaagaggatgaggaggcggccgaggcggaggcagaggcggaggaggcggagagggcgcggcagaacgcgctcctgttcgcggaggaggaggacggggaagccggcgccgaggacaagcgctcccaggaggagacgccgggccaccggcggaaggaggccgaggggacagaggagggcggggaggaggaggacgacgaggagatggatccgcagacgatcgacagcctcattgagctgtccaccaaactccacctgccagcggacgacgtggtcagcatcatcgaggaggtggaggagaagcggaagcggaagaagaacgcccctcccgagcccgtgccgcccccccgtgccgcccccgcccccacccacgtccgctccccgcagcccccgcccccgcccccgtcccgcacgagacgagctgccggactggaacgaggtgctcccgccctgggatcgggaggaggacgaggtgtacccgccagggccgtaccaccctttccccaactacatccggccgcggacactgcagccgccctcggccttgcgccgccgccactaccaccacgccttgccgccttcgcgccactatcccggccgggaggcccaggcgcggcgcgcgcaggaggaggcggaggcggaggagcgccggctgcaggagcaggaggagctggagaattacatcgagcacgtgctgctccggcgcccgtgactgcccttcccggtcccgcccccgcgcgcccccgccgcgcgcgcgcgccggcgcccccctccgtgttgcccgctccccctcggtgtttgcatgcgccccggccctgccccttggccctgcccctgtccccgggctgcgtcgggacctgccagacccccctcccgggtcctgagcccgaactcccagagctcacccgcgggtgaccgggggccagcccaggagggcgggtggtttgtgcgagttcccttgccacgcggggccccggccccatcaagtccctctggggacgtccccgtcggaaaccggaaaaagcagttccagttaattgtgtgaagtgtgtctgtctccagcccttcgggcctcccacgagcccctccagcctctccaagtcgctgtgaattgaccccttctttcctttctctgttgtaaatacccctcacggaggaaatagttttgctaagaaataaaagtgactattttattagga

SEQ ID NO: 215166 - DNA, 2638 bp, Homo sapiens
aggcggtggaggcgcgggcgctgtccagcgtgctgaagccggagcgagctagccgcccggagccgcgccgacccagctgagcccagcccacgggacgccagacctcgaccgtcgctcctaccccggccaccgctcggagccgaggcggacgcgtcccgatcttcccctgtccccaccctgccccgaccctcctctccacctctcgcgtcgtgacaccagctgtctccggcagcctcttggtcatgaaagccctcagattgtcggcttccgccctcttctgccttctgctgatcaacgggttaggggcagcaccccctggtcgccctgaggcgcagcctcctcctctcagctctgagcataaagagccggtagccggggacgcagtgcccgggccaaaggatggcagcgccccagaggtccgaggcgctcggaattccgagccgcaggacgagggagagcttttccagggcgtggatccccgggcgctggccgcggtgctgctgcaggcactcgaccgtcccgcctcacccccggcaccaagcggctcccagcaggggccggaggaagaagcagctgaagctctgctgaccgagaccgtgcgcagccagacccacagcctcccggcgccggagagcccggagcccgcggctccgcctcgccctcagactccggagaatgggcccgaggcgagcgatccctccgaggagctcgaggcgctagcgtccctgctccaggaactgcgagatttcagtccaagtagcgccaagcgccagcaggagacggcggcagcagagacggaaacccgcacgcacacgctgacccgagtgaatctggagagcccggggccagagcgcgtatggcgcgcttcctggggagagttccaggcgcgtgtcccggagcgcgcgcccctgccgcccccggccccctctcaattccaggcgcgtatgcccgacagcgggccccttcccgaaacccacaagttcggggaaggagtgtcctcccccaaaacacacctaggcgaggcattggcacccctgtccaaggcgtaccaaggcgtggccgccccgttccccaaggcgcgccggccggagagcgcactcctgggcggctccgaggcgggcgagcgccttctccagcaagggctggcgcaggtggaggccgggcggcggcaggcggaggccacgcggcaggccgcggcgcaggaagagcggctggccgacctcgcctcggacctgctgctccagtatttgctgcagggcggggcccggcagcgcggcctcgggggtcgggggctgcaggaggcggcggaggagcgagagagtgcaagggaggaggaggaggcggagcaggagagacgcggcggggaggagagggtgggggaagaggatgaggaggcggccgaggcggaggcagaggcggaggaggcggagagggcgcggcagaacgcgctcctgttcgcggaggaggaggacggggaagccggcgccgaggacaagcgctcccaggaggagacgccgggccaccggcggaaggaggccgaggggacagaggagggcggggaggaggaggacgacgaggagatggatccgcagacgatcgacagcctcattgagctgtccaccaaactccacctgccagcggacgacgtggtcagcatcatcgaggaggtggaggagaagcggaagcggaagaagaacgcccctcccgagcccgtgccgcccccccgtgccgcccccgcccccacccacgtccgctccccgcagcccccgcccccgcccccgtcccgcacgagacgagctgccggactggaacgaggtgctcccgccctgggatcgggaggaggacgaggtgtacccgccagggccgtaccaccctttccccaactacatccggccgcggacactgcagccgccctcggccttgcgccgccgccactaccaccacgccttgccgccttcgcgccactatcccggccgggaggcccaggcgcggcgcgcgcaggaggaggcggaggcggaggagcgccggctgcaggagcaggaggagctggagaattacatcgagcacgtgctgctccggcgcccgtgactgcccttcccggtcccgcccccgcgcgcccccgccgcgcgcgcgcgccggcgcccccctccgtgttgcccgctccccctcggtgtttgcatgcgccccggccctgccccttggccctgcccctgtccccgggctgcgtcgggacctgccagacccccctcccgggtcctgagcccgaactcccagagctcacccgcgggtgaccgggggccagcccaggagggcgggtggtttgtgcgagttcccttgccacgcggggccccggccccatcaagtccctctggggacgtccccgtcggaaaccggaaaaagcagttccagttaattgtgtgaagtgtgtctgtctccagcccttcgggcctcccacgagcccctccagcctctccaagtcgctgtgaattgaccccttctttcctttctctgttgtaaatacccctcacggaggaaatagttttgctaagaaataaaagtgactattttattaggaaaaaaaaaaaagttcaactctcttaactaccttatgtattaaatcaataatgaaaaaatggcg

SEQ ID NO: 215167 - DNA, 2848 bp, Homo sapiens
aggcggtggaggcgcgggcgctgtccagcgtgctgaagccggagcgagctagccgcccggagccgcgccgacccagctgagcccagcccacgggacgccagacctcgaccgtcgctcctaccccggccaccgctcggagccgaggcggacgcgtcccgatcttcccctgtccccaccctgccccgaccctcctctccacctctcgcgtcgtgacaccagctgtctccggcagcctcttggtcatgaaagccctcagattgtcggcttccgccctcttctgccttctgctgatcaacgggttaggggcagcaccccctggtcgccctgaggcgcagcctcctcctctcagctctgagcataaagagccggtagccggggacgcagtgcccgggccaaaggatggcagcgccccagaggtccgaggcgctcggaattccgagccgcaggacgagggagagcttttccagggcgtggatccccgggcgctggccgcggtgctgctgcaggcactcgaccgtcccgcctcacccccggcaccaagcggctcccagcaggggccggaggaagaagcagctgaagctctgctgaccgagaccgtgcgcagccagacccacagcctcccggcgccggagagcccggagcccgcggctccgcctcgccctcagactccggagaatgggcccgaggcgagcgatccctccgaggagctcgaggcgctagcgtccctgctccaggaactgcgagatttcagtccaagtagcgccaagcgccagcaggagacggcggcagcagagacggaaacccgcacgcacacgctgacccgagtgaatctggagagcccggggccagagcgcgtatggcgcgcttcctggggagagttccaggcgcgtgtcccggagcgcgcgcccctgccgcccccggccccctctcaattccaggcgcgtatgcccgacagcgggccccttcccgaaacccacaagttcggggaaggagtgtcctcccccaaaacacacctaggcgaggcattggcacccctgtccaaggcgtaccaaggcgtggccgccccgttccccaaggcgcgccggccggagagcgcactcctgggcggctccgaggcgggcgagcgccttctccagcaagggctggcgcaggtggaggccgggcggcggcaggcggaggccacgcggcaggccgcggcgcaggaagagcggctggccgacctcgcctcggacctgctgctccagtatttgctgcagggcggggcccggcagcgcggcctcgggggtcgggggctgcaggaggcggcggaggagcgagagagtgcaagggaggaggaggaggcggagcaggagagacgcggcggggaggagagggtgggggaagaggatgaggaggcggccgaggcggaggcagaggcggaggaggcggagagggcgcggcagaacgcgctcctgttcgcggaggaggaggacggggaagccggcgccgaggacaagcgctcccaggaggagacgccgggccaccggcggaaggaggccgaggggacagaggagggcggggaggaggaggacgacgaggagatggatccgcagacgatcgacagcctcattgagctgtccaccaaactccacctgccagcggacgacgtggtcagcatcatcgaggaggtggaggagaagcggaagcggaagaagaacgcccctcccgagcccgtgccgcccccccgtgccgcccccgcccccacccacgtccgctccccgcagcccccgcccccgcccccgtcccgcacgagacgagctgccggactggaacgaggtgctcccgccctgggatcgggaggaggacgaggtgtacccgccagggccgtaccaccctttccccaactacatccggccgcggacactgcagccgccctcggccttgcgccgccgccactaccaccacgccttgccgccttcgcgccactatcccggccgggaggcccaggcgcggcgcgcgcaggaggaggcggaggcggaggagcgccggctgcaggagcaggaggagctggagaattacatcgagcacgtgctgctccggcgcccgtgactgcccttcccggtcccgcccccgcgcgcccccgccgcgcgcgcgcgccggcgcccccctccgtgttgcccgctccccctcggtgtttgcatgcgccccggccctgccccttggccctgcccctgtccccgggctgcgtcgggacctgccagacccccctcccgggtcctgagcccgaactcccagagctcacccgcgggtgaccgggggccagcccaggagggcgggtggtttgtgcgagttcccttgccacgcggggccccggccccatcaagtccctctggggacgtccccgtcggaaaccggaaaaagcagttccagttaattgtgtgaagtgtgtctgtctccagcccttcgggcctcccacgagcccctccagcctctccaagtcgctgtgaattgaccccttctttcctttctctgttgtaaatacccctcacggaggaaatagttttgctaagaaataaaagtgactattttattaggactttgttctcggttattcacccgtccccttgggcctgtgtggtccttcccaaggggcggtgagggaagcgccagccacagtccccgtctcctcctgcttcctgcccccaaactaaggcgaggggtaagtggggaaagtcctcaaactgtttttagaggagaagaatgtggctcgcacccattaagaaacccgaaattccacttccagcttgggggctggtggtaaagtcatctttccccagggcttgacagagagaggcccagcggaatgcaa

SEQ ID NO: 215168 - DNA, 2508 bp, Homo sapiens
aggcggtggaggcgcgggcgctgtccagcgtgctgaagccggagcgagctagccgcccggagccgcgccgacccagctgagcccagcccacgggacgccagacctcgaccgtcgctcctaccccggccaccgctcggagccgaggcggacgcgtcccgatcttcccctgtccccaccctgccccgaccctcctctccacctctcgcgtcgtgacaccagctgtctccggcagcctcttggtcatgaaagccctcagattgtcggcttccgccctcttctgccttctgctgatcaacgggttaggggcagcaccccctggtcgccctgaggcgcagcctcctcctctcagctctgagcataaagagccggtagccggggacgcagtgcccgggccaaaggatggcagcgccccagaggtccgaggcgctcggaattccgagccgcaggacgagggagagcttttccagggcgtggatccccgggcgctggccgcggtgctgctgcaggcactcgaccgtcccgcctcacccccggcaccaagcggctcccagcaggggccggaggaagaagcagctgaagctctgctgaccgagaccgtgcgcagccagacccacagcctcccggcgccggagagcccggagcccgcggctccgcctcgccctcagactccggagaatgggcccgaggcgagcgatccctccgaggagctcgaggcgctagcgtccctgctccaggaactgcgagatttcagtccaagtagcgccaagcgccagcaggagacggcggcagcagagacggaaacccgcacgcacacgctgacccgagtgaatctggagagcccggggccagagcgcgtatggcgcgcttcctggggagagttccaggcgcgtgtcccggagcgcgcgcccctgccgcccccggccccctctcaattccaggcgcgtatgcccgacagcgggccccttcccgaaacccacaagttcggggaaggagtgtcctcccccaaaacacacctaggcgaggcattggcacccctgtccaaggcgtaccaaggcgtggccgccccgttccccaaggcgcgccggccggagagcgcactcctgggcggctccgaggcgggcgagcgccttctccagcaagggctggcgcaggtggaggccgggcggcggcaggcggaggccacgcggcaggccgcggcgcaggaagagcggctggccgacctcgcctcggacctgctgctccagtatttgctgcagggcggggcccggcagcgcggcctcgggggtcgggggctgcaggaggcggcggaggagcgagagagtgcaagggaggaggaggaggcggagcaggagagacgcggcggggaggagagggtgggggaagaggatgaggaggcggccgaggcggaggcagaggcggaggaggcggagagggcgcggcagaacgcgctcctgttcgcggaggaggaggacggggaagccggcgccgaggacaagcgctcccaggaggagacgccgggccaccggcggaaggaggccgaggggacagaggagggcggggaggaggaggacgacgaggagatggatccgcagacgatcgacagcctcattgagctgtccaccaaactccacctgccagcggacgacgtggtcagcatcatcgaggaggtggaggagaagcggaagcggaagaagaacgcccctcccgagcccgtgccgcccccccgtgccgcccccgcccccacccacgtccgctccccgcagcccccgcccccgcccccgtcccgcacgagacgagctgccggactggaacgaggtgctcccgccctgggatcgggaggaggacgaggtgtacccgccagggccgtaccaccctttccccaactacatccggccgcggacactgcagccgccctcggccttgcgccgccgccactaccaccacgccttgccgccttcgcgccactatcccggccgggaggcccaggcgcggcgcgcgcaggaggaggcggaggcggaggagcgccggctgcaggagcaggaggagctggagaattacatcgagcacgtgctgctccggcgcccgtgactgcccttcccggtcccgcccccgcgcgcccccgccgcgcgcgcgcgccggcgcccccctccgtgttgcccgctccccctcggtgtttgcatgcgccccggccctgccccttggccctgcccctgtccccgggctgcgtcgggacctgccagacccccctcccgggtcctgagcccgaactcccagagctcacccgcgggtgaccgggggccagcccaggagggcgggtggtttgtgcgagttcccttgccacgcggggccccggccccatcaagtccctctggggacgtccccgtcggaaaccggaaaaagcagttccaagtcgctgtgaattgaccccttctttcctttctctgttgtaaatacccctcacggaggaaatagttttgctaagaaataaaagtgactattttattagga

SEQ ID NO: 215169 - DNA, 1594 bp, Homo sapiens
aggcggtggaggcgcgggcgctgtccagcgtgctgaagccggagcgagctagccgcccggagccgcgccgacccagctgagcccagcccacgggacgccagacctcgaccgtcgctcctaccccggccaccgctcggagccgaggcggacgcgtcccgatcttcccctgtccccaccctgccccgaccctcctctccacctctcgcgtcgtgacaccagctgtctccggcagcctcttggtcatgaaagccctcagattgtcggcttccgccctcttctgccttctgctgatcaacgggttaggggcagcaccccctggtcgccctgaggcgcagcctcctcctctcagctctgagcataaagagccggtagccggggacgcagtgcccgggccaaaggatggcagcgccccagaggtccgaggcgctcggaattccgagccgcaggacgagggagagcttttccagggcgtggatccccgggcgctggccgcggtgctgctgcaggcactcgaccgtcccgcctcacccccggcaccaagcggctcccagcaggggccggaggaagaagcagctgaagctctgctgaccgagaccgtgcgcagccagacccacagcctcccggcgccggagagcccggagcccgcggctccgcctcgccctcagactccggagaatgggcccgaggcgagcgatccctccgaggagctcgaggcgctagcgtccctgctccaggaactgcgagatttcagtccaagtagcgccaagcgccagcaggagacggcggcagcagagacggaaacccgcacgagacgagctgccggactggaacgaggtgctcccgccctgggatcgggaggaggacgaggtgtacccgccagggccgtaccaccctttccccaactacatccggccgcggacactgcagccgccctcggccttgcgccgccgccactaccaccacgccttgccgccttcgcgccactatcccggccgggaggcccaggcgcggcgcgcgcaggaggaggcggaggcggaggagcgccggctgcaggagcaggaggagctggagaattacatcgagcacgtgctgctccggcgcccgtgactgcccttcccggtcccgcccccgcgcgcccccgccgcgcgcgcgcgccggcgcccccctccgtgttgcccgctccccctcggtgtttgcatgcgccccggccctgccccttggccctgcccctgtccccgggctgcgtcgggacctgccagacccccctcccgggtcctgagcccgaactcccagagctcacccgcgggtgaccgggggccagcccaggagggcgggtggtttgtgcgagttcccttgccacgcggggccccggccccatcaagtccctctggggacgtccccgtcggaaaccggaaaaagcagttccagttaattgtgtgaagtgtgtctgtctccagcccttcgggcctcccacgagcccctccagcctctccaagtcgctgtgaattgaccccttctttcctttctctgttgtaaatacccctcacggaggaaatagttttgctaagaaataaaagtgactattttattagga

SEQ ID NO: 215170 - DNA, 2244 bp, Homo sapiens
aggcggtggaggcgcgggcgctgtccagcgtgctgaagccggagcgagctagccgcccggagccgcgccgacccagctgagcccagcccacgggacgccagacctcgaccgtcgctcctaccccggccaccgctcggagccgaggcggacgcgtcccgatcttcccctgtccccaccctgccccgaccctcctctccacctctcgcgtcgtgacaccagctgtctccggcagcctcttggtcatgaaactctgctgaccgagaccgtgcgcagccagacccacagcctcccggcgccggagagcccggagcccgcggctccgcctcgccctcagactccggagaatgggcccgaggcgagcgatccctccgaggagctcgaggcgctagcgtccctgctccaggaactgcgagatttcagtccaagtagcgccaagcgccagcaggagacggcggcagcagagacggaaacccgcacgcacacgctgacccgagtgaatctggagagcccggggccagagcgcgtatggcgcgcttcctggggagagttccaggcgcgtgtcccggagcgcgcgcccctgccgcccccggccccctctcaattccaggcgcgtatgcccgacagcgggccccttcccgaaacccacaagttcggggaaggagtgtcctcccccaaaacacacctaggcgaggcattggcacccctgtccaaggcgtaccaaggcgtggccgccccgttccccaaggcgcgccggccggagagcgcactcctgggcggctccgaggcgggcgagcgccttctccagcaagggctggcgcaggtggaggccgggcggcggcaggcggaggccacgcggcaggccgcggcgcaggaagagcggctggccgacctcgcctcggacctgctgctccagtatttgctgcagggcggggcccggcagcgcggcctcgggggtcgggggctgcaggaggcggcggaggagcgagagagtgcaagggaggaggaggaggcggagcaggagagacgcggcggggaggagagggtgggggaagaggatgaggaggcggccgaggcggaggcagaggcggaggaggcggagagggcgcggcagaacgcgctcctgttcgcggaggaggaggacggggaagccggcgccgaggacaagcgctcccaggaggagacgccgggccaccggcggaaggaggccgaggggacagaggagggcggggaggaggaggacgacgaggagatggatccgcagacgatcgacagcctcattgagctgtccaccaaactccacctgccagcggacgacgtggtcagcatcatcgaggaggtggaggagaagcggaagcggaagaagaacgcccctcccgagcccgtgccgcccccccgtgccgcccccgcccccacccacgtccgctccccgcagcccccgcccccgcccccgtcccgcacgagacgagctgccggactggaacgaggtgctcccgccctgggatcgggaggaggacgaggtgtacccgccagggccgtaccaccctttccccaactacatccggccgcggacactgcagccgccctcggccttgcgccgccgccactaccaccacgccttgccgccttcgcgccactatcccggccgggaggcccaggcgcggcgcgcgcaggaggaggcggaggcggaggagcgccggctgcaggagcaggaggagctggagaattacatcgagcacgtgctgctccggcgcccgtgactgcccttcccggtcccgcccccgcgcgcccccgccgcgcgcgcgcgccggcgcccccctccgtgttgcccgctccccctcggtgtttgcatgcgccccggccctgccccttggccctgcccctgtccccgggctgcgtcgggacctgccagacccccctcccgggtcctgagcccgaactcccagagctcacccgcgggtgaccgggggccagcccaggagggcgggtggtttgtgcgagttcccttgccacgcggggccccggccccatcaagtccctctggggacgtccccgtcggaaaccggaaaaagcagttccagttaattgtgtgaagtgtgtctgtctccagcccttcgggcctcccacgagcccctccagcctctccaagtcgctgtgaattgaccccttctttcctttctctgttgtaaatacccctcacggaggaaatagttttgctaagaaataaaagtgactattttattagga

SEQ ID NO: 215171 - DNA, 1232 bp, Homo sapiens
aggcggtggaggcgcgggcgctgtccagcgtgctgaagccggagcgagctagccgcccggagccgcgccgacccagctgagcccagcccacgggacgccagacctcgaccgtcgctcctaccccggccaccgctcggagccgaggcggacgcgtcccgatcttcccctgtccccaccctgccccgaccctcctctccacctctcgcgtcgtgacaccagctgtctccggcagcctcttggtcatgaaagccctcagattgtcggcttccgccctcttctgccttctgctgatcaacgggttaggggcagcaccccctggtcgccctgaggcgcagcctcctcctctcagctctgagcataaagagccggtagccggggacgcagtgcccgggccaaaggatggcagcgccccagaggtccgaggcgctcggaattccgagccgcaggacgagggagagcttttccagggcgtggatccccgggcgctggccgcggtgctgctgcaggcactcgaccgtcccgcctcacccccggcaccaagcggctcccagcaggggccggaggaagaagcagctgaagctctgctgaccgagaccgtgcgcagccagacccacagcctcccggcgccggagagcccggagcccgcggctccgcctcgccctcagactccggagaatgggcccgaggcgagcgatccctccgaggagctcgaggcgctagcgtccctgctccaggaactgcgagatttcagtccaagtagcgccaagcgccagcaggagacggcggcagcagagacggaaacccgcacgcacacgctgacccgagtgaatctggagagcccggggccagagcgcgtatggcgcgcttcctggggagagttccaggcgcgtgtcccggagcgcgcgcccctgccgcccccggccccctctcaattccaggcgcgtatgccgaaggggccttccgaacacagtcgggagggtgtttccccaaaaactagggagattggaccctgcaagcgtcaggggcgccgtccaagggccgccgaagcaatctgggggccagggagaagcccttcaacagctgcagagcgggcgagggagcaaacgagcgggaaaaaggggcccccagacatatgggaccgcggccgtgggcggggagaaacgaggcgggcgggagaaaaacactgcgatcgccgcgttctatcaatattcttcttcgcaccggaggacaaa

SEQ ID NO: 215172 - DNA, 537 bp, Homo sapiens
atgaatgaacattgacgtcaatggggcggggcgcgcccacgtgaccccgcgcgctcccctttataaggcggtggaggcgcgggcgctgtccagcgtgctgaagccggagcgagctagccgcccggagccgcgccgacccagctgagcccagcccacgggacgccagacctcgaccgtcgctcctaccccggccaccgctcggagccgaggcggacgcgtcccgatcttcccctgtccccaccctgccccgaccctcctctccacctctcgcgtcgtgacaccagctggtaaatactccgctgttcgtccctcaaaccctcggcagccagccgtgggcgtgagggagggttctctctcctctcgatgggggtgttgcaaacacagcggggagccccctggtaagggtccccggtaaacgggggagtcgcagctttttctcttgctgctgaagtcgcccacgcaccatccggggagtcctacggggagggagcagagatttttttttcccccatattgctgctgcttagtacgtgggcg

SEQ ID NO: 215173 - DNA, 607 bp, Homo sapiens
atttcaatgcgatattgaagcttttggtttgatgttccactttggagttaactcctagggttggccccaggccaggttctgaaggggcacccgggtcctcattggctgagaatgttattacttatggtcacatgacctccacaagctgaataaatgtagtgagttctaacgggagacagaattgggaagtaagtataatttttccagacccttgtggcacctttcaacattctcgccccttttgtgttcccctcctttcttagacatcaagtgttcactgtaatgttctctttccaatttcatcccttcaaattttgctgtcaggaaagatttgataagctttcactagaaattttagtgttagtaagatttaacatgttaaccctaaatgggcatttatatttaacaataattacttcaggtcaaaagggtgaatctccacttggagaacctagggcgatagccaggtagtagtgggcgaatatttggggaatgggagaggaaccctcactgccctccattatttcataatgtggctcttattcataaggcagccttgtttatgtgttgctaatttgtctatgatctagaggatttcccttggctt

SEQ ID NO: 215174 - DNA, 362 bp, Homo sapiens
gagtccttgtggacaaacggtaacctacctgaataggtggacgagattgaaaacctaactcaggagtatgtacctgagcacctcaccaacagctgagcgttggccaatttcagcagccatacctcaaccactcatacactcttgagtgtgcaaactgtgtttaaataagacaaacatcagcctgtaaccaatccagctgtttctgtacctcacttctgatttctgtacataatttaaaaaaatgtataaatcttcttcaaccacatggctgcactgaagtctctttcaatctgctgtgattccgggggctgcccaattcatgaatcatccattgctcaattaaactcctttaaatttaattt

SEQ ID NO: 215175 - DNA, 401 bp, Homo sapiens
tatgggtgtgaggcctggctccacccttcctgtggtgggacctggggcacctcaactggccaagcctcaactgcctcacctgtaaaacggagagatggcaataaaaactacttcccaggggctttgtgagacttcagtgagcatgtacatccccgtccggtgcctgtgccccacggtcctgggtggtgcatctcccaccagccctagccggtgcctgtgctgctggccccatgccacatgttgagtagcgagagtttaaaattctttgtttaaggctaggtgcagtggctcatgcctgtaatcccagcaatttgggaggccgaggcaggcggatcacttgaggccaggagtacgagaccagcctggccaacatgactaaatcccgtctgtactaaaaatac

SEQ ID NO: 215176 - DNA, 264 bp, Homo sapiens
ccatagtcctggaggtaccgcgtgaaaatgtgtctcacgatggaggttttaatgtagtaccactgtgtgtaagttccaggcagcccaggacatgcagagagcaaatattgacaccaggaacagaaactttccacatttttgttgactacagcgatgggaactgcagtgaattatttgccttatatagtgtctgtaaagctggaaaagaagtaggtagtttctggtctttgtgtcagtagcataaataaataaacttgaaacatt

SEQ ID NO: 215177 - DNA, 350 bp, Homo sapiens
agagcttctttttgtcataatgaaaatattgtgtatcatatggcagtggctatctgacaatataaatttgcaaaacttattaaactatacagtttaaaatgggtgatttttatatcacaaatttaaatgcttattaaatttaagcttattacacaaaacttatgaaatcatacacttaaaatgggtatagctaatttaaataaagttagttaaaaaacaagagtctatagtgccttcacccttgttttaatatgataaaatttctaaaaatattctaaattagggcttaatctgtaatcttaaaatatcattattttatgatttctttgcttcttttctaaagttgataa

SEQ ID NO: 215178 - DNA, 99 bp, Homo sapiens
atttgttacccaatggtaaataaccaaccaaagctttagttttatagaactccattaggggttgaattgcttcattgggtccctgcattgtgtcttctg

SEQ ID NO: 215179 - DNA, 672 bp, Homo sapiens
ccaacctcctctccattccaacatttacaatgtttaccatttaacacatcttttttcctctagccacaggcctgtttctaaaataccatctataggacacaatcccagaacatgtaatacaaagccctttacaactaacattctttacaatttactttacagctggctgctcctcaaacacatcaaggcccctcacaactcaatctttgttacatgtgtcatctttgacctgtgagttcttgaagatttgtctatttctaatgcactgacatattaatatatttagccatggagtaataacagcactctgaaaacctctaagaatttcatactcgttacttatatactgtattactagtcatgcaccacatacaaaatgtgctaagtttaaaaagtcctcagaaagaccattgaactaaaccagtctttttgaaccaggtttcttgctcaccaagtctccgctgtcataataaagcctgttatcaaacctgccatttattggcagtttctatttcgtgttgcccaaagttctccaaataagaattaaagaggccaggaacgatggctcacatctgtaatcccagcactttgggagggcgaggtgggcagatcacctgaggtcaggagtttgagaccagtctggccaacatggtgaaaccccgtctctactaa

SEQ ID NO: 215180 - DNA, 347 bp, Homo sapiens
gagggggtattccccctctatcctggagaataaagttgctgtgaaacctcttatggctgcaaggaattcagttacagagtttatgactcccagaggcaagatgtttggaggcagcctgggaggaggctcacaggacttctgccagaagaggagtatttacagtgaacctgcctgggatcaggaaacagagactacagaaaaagccaccggcccagccccatagcccagggcagaagtgccaggattcaagttcagatctgcctccctccaatgcccctgttgtttccacctcatcatgctgactctgtgaaggctgacactgcagaaataaaagtcacaaggtgaaa

SEQ ID NO: 215181 - DNA, 367 bp, Homo sapiens
ttctgtggagtcttaattaggcaaaaggaatcaggctggcaggacgaggagaaaccgaaaagaaaaagcagataagctccaagtctgcctttcttcatggtccaggacacacagccctcctgcacaaataactcacaatcttcctgtgcccacctatcaccagacacctgcatgctagctcactgcaaccatagtgttatcggtattgcacaaaaccctcttcagcacacagcataaacactatcctataaaatctcaagcaagcctttgtttcttggcagtcagcttctcttctgctgatcctgcctatgggcaacatatcttcctactttctctaataaatctgcctttatttacctacaattgt

SEQ ID NO: 215182 - DNA, 681 bp, Homo sapiens
ggctcagttgagtacctatacttttcgttttttgattgggtttaggtggttatgtcaaagttaaatggcaaaattaggaatttaacccaggtctggctggttcctttacaatacactgctttcttaagtacaaataatttaattgcaatatttaggaaaagtaggtacctttgaataatgataagaaacagtcttggttaagaatatgagttccctcttcaaaatgtaaggggtggcaaaatgtaaacactgcttcctattactgtgcaagtttttttatgtcaactttactatttcatgtttgttgtggagattacaaaatatagcttagcaaaaggaaacaatctcacttgaaggatatgttaaataatttaatgatattttaaagattttcttttttagttaaactttcctatgattctcttaatgttttttctgaatacaaaagtaataaatatttattgagtaaaacacacacaccccaaataaaaattgcctgtaaggccactatctagagaaaactattcttaacatcttgtggcatagtgactatgtatgtaaatgtattttattttattaaaaaagcgttgtatcatacatactctttgataacctgatttttaaacttatatttggtacaaagagctccacattaataaatacaatattctatcaaaaaga

SEQ ID NO: 215183 - DNA, 298 bp, Homo sapiens
gaggtgtggggaaggggtcgttttgaaggtggacctagagctggatgaaaggcagaaggtaggggagaggcaagacgatggctactaaatttctggcccagcatctgggtaaatggctgccgtctgggaatcaggagagtagcatttgggacgtccatgtagagcaggtagtgacctggagcacaggagcgtgtgctagagccatcgagttaggaattgttggcacagagatggcttgggaggccccagaagatatccacagccgagtccctggaacccgtgaaggttacttaccttc

SEQ ID NO: 215184 - DNA, 354 bp, Homo sapiens
actctaaaaacattatttattagatgctgtctttaggacagtgtttttgagagagcattagatgtggattccagcttggggtcggggagtagggtttctccccttgcaaatcctccacccgagcatttgagggtttaaattttccagtttgatctaatgcgaacataaaagcactgcgacaatcttgggctgattttaattacgaacacaggcaatacgctgagagcacagctggtgtgtggccctaaccagcttcccagaagagagtggcgctatcagaaatgacaataatagaccaggtttttaaaaccatttacatgcaagttgcaaaattcccctccatagtttggggat

SEQ ID NO: 215185 - DNA, 243 bp, Homo sapiens
atttgtgtcacccagatcctggtaccaaaaaaaaagctatcaaggaaagaaatggcaacaccagctaggcgttaaagatgcagtcactggctcactcccggctctaagcgtgcccagcaccagctgcagctcggctctgctgaattcctaggtgttcacacaggcaggcgtattcacccagaaagctcaggccaaactccaaactctagacacctttgctcttgtcacacagcccagtccgga

SEQ ID NO: 215186 - DNA, 527 bp, Homo sapiens
gcacacagtttataaatttgaattagttgcaaatattttaaacattgagaactttcaataaatatcctacttttcagtaggacatttatcttaagaattagcagacctggcaaaacaatatgctttctgtgtggcaacagtttcctgacctgagtagcagctatgccctttgcctattcgccacaatccctgcaactccctgttgtccctgcttcactcatttgttatgtgcctttaattcttgtaggcatttgagtttgtgaactcctctctgggttatgtcactttgatttatttttctttgtagcaaccacttctgactgtataaaaatcaccaaaaatattataatatctgttctaacagatcctgttaatatactgccaaatatagtttttcaagtttttatgtttttacaattgctaaatggcaccattagaaatggttaagttttagagaatgcatggttgaaaagtaatatgttgttatgttgttttaacctaattcctgagagtaaaggatttcatgg

SEQ ID NO: 215187 - DNA, 468 bp, Homo sapiens
caggtggaattttgatagaattgtgttgaaactgaacatgggatgtctttctatttatatagttatttaatttctttttttttaatcaattgagtaccaaaatagactttaatttcttttaagaatgttttgtagtttttatggtatgttttgtattacttttgttaaacttacacctaagtgttttattctcttggatgcttcagaaatggagttattttcttaatttcatttttggattgttcattgttattgtatagaaatgcaattaattttggcgtattgattttgtaccctgcaaccttgttgcacttgtttacttaattattataaaacattactattaataaaatcttaagtattaaactgctatgtaaactgttgtatattttcaagtctcctgttgacttatcttgtatctagttgttgtattcattattgacatggagtattaaaagtctcccaacc

SEQ ID NO: 215188 - DNA, 430 bp, Homo sapiens
tccatctttttgctcttccattctcagtgtttcggttgagctcccttccaaggtgtagcctggctgctccagtgtccgacactgtatacagacatgacagtgtccagcctaataagatgataggagtggtccacccatatggaaaaaataattcatcactgcattattgaaaattgttgatacccagtaatgataaagagccatctgactcccagctggttccattatttcaaaattctccctacccctaccctgagtggacacctcctagcctccctgcatccaaacatcttccaacaccgtttctgagtcagactacctggatttgaattccacctctgtcctctgtaagtgatgttcttaaaaagacacttaatttttttgagttttaatgtcctcatctaaaaataaagatcataaatacctccct

SEQ ID NO: 215189 - DNA, 332 bp, Homo sapiens
atttccgttcctttggtagcgggggtgggttaatgggagactacagtcggccatgttcacacaatgtctgaaggccacttattttgagaaatgtgatctcaaagccgcctcttcaacaaagttcaatgtttgtaacagactaaagacacctgcaggccatccctcaaatcctgcgccagtgagcctaggttcagtgacctgaaatcatcatcgaacccaactgtcagtttcagaggccctaaaagtaggaagccagaagcctagtgctcagcccagctccttaggctatttctggaaagttctggacacagctgaaattaaccacactagcc

SEQ ID NO: 215190 - DNA, 364 bp, Homo sapiens
caaggcaagtcacccttcttccgaggcacagtttcttcacctgtaaaatgaagggactgggcaagacggtttctaaagttcctagggccaggtgcagtggctcacgcctatcttcacaatactttgggaggctgatgcagaaggatcactggagctccctcaagaccagcctggggaacacaggaagaaccttgtctctacaaaaaattaaaaatattagctggacatggtggcaggacctgtggttccagctactcaggaggctgagtggggaggatattttgaacctgggaggtcgaggctgcagtgagctgtgatcacaccactgcacttcagcctgggcaataaataaataaacaagtaa

SEQ ID NO: 215191 - DNA, 391 bp, Homo sapiens
attctacaaacttcacctactggaattgaacaacatgaactagtagacacttctctcatttgaaaagaataaaggtgacaaagaaagaattcccaagtcaatgcagacaactttcctaaaactcagggtgagaagaattgagggctattttctcctcagttttctactggttcaaacagatgaagctacactaaaaatttctatcttttaaggctgttaatagatgaactttcatactgtagatagaaaagagagatgtcttgtctgaaggtgaagctaacagcattaggaaaggattattctactttatacacggttcctattatacaaaatcctgagagtttttttgttgctagtttttctttttccttttttttttttttgagatgag

SEQ ID NO: 215192 - DNA, 477 bp, Homo sapiens
ccatgttggcttttgcattatacagctgtcgcttccccctgggtggagtgcatgtgcctctgtgacacctgttccctcattaccttgctgtgacatcggatgacagtttgtggactgttgggaaaaggtgctatataggaggactctgattccctaggaaccaacccctgtggagtaggtgatactgcggttcacagaggttgggggatttgccaagtagacacaccttggtcatcatgggtcagaatctgggtatgtctgccccaaagaccacgggcttctgctggagtgaagggccgcaaggagctccagcccagagcagagggacatggaggagattaagccaaattgtgtgtgtgtgcatgcatgtttctgtgtgtgcatgtgtacacgtctgtgtgtgtgcatgtgtacacatgtctgtgtgcatgtgtaaatgtgtgtgcacatgtacaaataaacacattgatcaacgta

SEQ ID NO: 215193 - DNA, 450 bp, Homo sapiens
caacagcagggctggggagctctgcctgagcgtagggaagcgggaggggacctgttcttgtcactggtgcgtggtgtcctcatcagaaaagtacagggagctgaggcaaggcctgtttctgagagctggggatagagctagatgattaactttatgattttctaagtgttttcccacacatagtctcatttgaagttcccagagaccttgaggggtggtcagggcagctattgtaatctgaatttagcaagtaatgaaactgagatgccgagaactgaagcaatgtgccgtctgtcagctgagaagcaaaggagacatttagaacccaagcctctggactgatgtccctagaccacggctgatgaattaggaacagaccccacgttcctcagtagaaatgcttctctgatatggccactcatgctttgaattaaatatgtccttccaatc

SEQ ID NO: 215194 - DNA, 476 bp, Homo sapiens
aatgaaagtcccagtgacaaactgcacaactgatgagcttctctgtgcaagggtgcctttttggagcaatgtccccattcggtccattgatatgaaccacttcattgaatgtcttagacggaaagaagactgaataatgattggaagaacgccggagtcatcaagctcttttgataactgcatatgtgaactaggtcaagtcactctccctcaacggatcaccagtttacccaactgtaaatggcaacaattttgaactgaacgttcttccttctacagccaaaattcttcgtttgctaggtttgtgaagtgcttttatatgtatgagcgctttcttaactatgaagatatctgagtcatcgaacttttggtgggggcaatctcatgatcagtcatgactagattttagagttttctcatccccatactcaaagttttttttttaagaataaaaatgaaaagaaacaataaaaaaa

SEQ ID NO: 215195 - DNA, 447 bp, Homo sapiens
aatagtttcagaaagaatggtaccagctcctcctcgtacctctggtagaattctgctgtgaatccatctggtcctggactttttttggttggaaagaagactgaataatgattggaagaacgccggagtcatcaagctcttttgataactgcatatgtgaactaggtcaagtcactctccctcaacggatcaccagtttacccaactgtaaatggcaacaattttgaactgaacgttcttccttctacagccaaaattcttcgtttgctaggtttgtgaagtgcttttatatgtatgagcgctttcttaactatgaagatatctgagtcatcgaacttttggtgggggcaatctcatgatcagtcatgactagattttagagttttctcatccccatactcaaagttttttttttaagaataaaaatgaaaagaaacaataaaaaaa

SEQ ID NO: 215196 - DNA, 451 bp, Homo sapiens
tcccacccgatctcatctcgcactattgtgggaaacctgtgaaccacctccagccctttgctggatataaacgaccaagtacaaacccttctctgagccgttgtgccagcacctccaacgctcttcccaacgctgaccactgggtgctggcccaggcccatgtaagaaagaacacttggattctgtggggccgtgggaggtggaggataacatttggagagtgccagcggtcagcagggctctgtgccaagtgtcttatatttggagtctgggtcagggccctgatttatcactgcatgtatggcttggccctggaggactgttcacacagccttgatgtagattttcatcacactccccaagtgagggaaacttgcggccatacttgtgtgtgttctatgtaaaatgtgataaatgttaaatatactgcaaatctggtaaccgtgtttta

SEQ ID NO: 215197 - DNA, 547 bp, Homo sapiens
  misc_feature (58)..(59): n is a, c, g, or t
  misc_feature (62)..(62): n is a, c, g, or t
  misc_feature (86)..(86): n is a, c, g, or t
  misc_feature (99)..(99): n is a, c, g, or t
  misc_feature (119)..(119): n is a, c, g, or t
ctgtggaccccactatcgctaagaaaccctcaataaaatactggcaaccaaatccacnnttnatcaaaaagcttatccagcacgancaagtgggctttntccctaggatgcaaggctgnctcaacatatacaaatcaataaacataatccagcatataaacagaaccaaagacaaaaaccacatagactgaaaaggatggaaaaagatattccatgccaatggaaaccaaaaaagagcaggagtagatatacttatatgagacaaaatagatttcaacaccacgcccagctaagttttgtatgttttgtagagacaggattttgccatgttgtccaggctgatgtcgagttcttgggctcaagcaatccttctgccttggcctcccatagtactgagattacaggtgtgagccactgtgccccgcctacgtggaattgttttatatgagaacagaggttctaccatcattcagtgatagcagggctgaaatatatttcaggcagactagtgtgatatattagaaaatgagtgtttcttagcgatagt

SEQ ID NO: 215198 - DNA, 454 bp, Homo sapiens
ggaagattattgagcttcataaatagcctagtcaggtacctagcacatagtagtttttcataaatgatagtttttcataaatgatagctattattattattaaccattatcactagccaaacaagaaatagcatagcagcatagccagagctaaacaatcatgccaagagaaggaaaggtagtcattatcctgcaatggaactagtcagagaaagtttcttggtggaggtgagccatggaggagatgcgactcgaagcagaaaggtaaggatctagggtgaaaaatacttgtattcccttattaacaaccttggtttcaggcctcaaagaccatccttttgaaaggccaaatgtggtcatatcgcacaccaaactgttcgcaaaagtagttatggaaaatttttctgctaagactctaaattaagcatttaaaaaaggaaaacaaacaagaatc

SEQ ID NO: 215199 - DNA, 335 bp, Homo sapiens
gagacaggtttttgccatgttggccaggctggtcttgaactcctgacctcaggtgatccacccgcctcggcctccgaaagtgctgggattacaggtgtgagccgccgtgcccggccagttgtcttttttatgactagtgggttcaggtgttggcagcctgacttcttccttttaaagttccccatcagttttttcctaatgactttagtaagaagtgattatagtgtagatgggctctgtatggttttgtttgtttgtttgttgttttgagacacagggtttctcagaaagagtacagtggcatcatcatagctcattgcagcctcgacttccca

SEQ ID NO: 215200 - DNA, 406 bp, Homo sapiens
tggagatgaggtctcactatgttgcccaaactggcttcaaacttctggactccagcaatcctcctgcctcagccttccaagtagctaggactacaggtggaaatctcaaacttttgtttgagggtaataggaagatattttttgatttgtttcctgtagtctctgtataatgctgaaccaggctaactgcttttcaaggaatcctttccctatataggttaatggcatattcatatgctgattattcaaattaaaacctccaaaacttctttaactccctcctttcctgcacacccaaatacaattaatctcaagaactatcaactttaccttttaaacattttgaaaattcttccaccctctctattatcattgtctttgttcaaacctatctttgaagtcttct

SEQ ID NO: 215201 - DNA, 473 bp, Homo sapiens
tatgctccagacacgttccttctttgagatttgaccaagtctttctctctggcttgagaatgccgtccctgtgctttgcgtacttcttataacagcacctatcccgtattgctgcacaggtgccccttgagctactgtcttcagccttgagttttccagaatgatggtgtctgaggattgtccactgacaggcacctgaagggctttcctgggttggcatgctgccctccccatctccccattcctggaggggctgtggaaaaaagcaccggaacctgaactgcaggctccatgagatgggtacctggccggtcatgtgtactcctgtgtccaacccccaacacaatgcctgaccactgcagacgcacaagaaatagcactgaatgaatgaatgaatgagaagttagtgttgctctccaggtcacactgttatttcttgctatttaaaagtaaaatcagcagcctcttttttg

SEQ ID NO: 215202 - DNA, 180 bp, Homo sapiens
taacttatgaaaaatggagggggaagtatctctgaaactgaatagaaacagaaacaaatggagttaattttggtgggtaataactgggtgggggcatataggaaattttggggtgatgataatgttctgtatcttggatctggatggtgggtacttgggtatgttaactttacgcttatg

SEQ ID NO: 215203 - DNA, 454 bp, Homo sapiens
aatgagatctctatcctacttttacatttatttactctaatgagtttgtctaatgcttaacattttttaacaaatgcagtgttttataggataaagaaattaaaaaaatttttttgttgtttgaagactttttgtaccttgtttagtggttgagcattaaccaccatgttcttcagaagagaattctgctgtaacatgttttatacttccttgaaaaaatatagaaaggagaatacagaacagagcgaaggaaaaataaaaatcacatatattgctgctacctaaagataacctctgttaatatttttatacttgtcccttatttaggtatgtagatacatacgtgtgtgtaggtagattggttttgatttagggcatgtgttttctactgttctgcaatctgcgtttctcaaaactattacttgtatttcaaggaatgagtaaatacgtaagt

SEQ ID NO: 215204 - DNA, 478 bp, Homo sapiens
agacttcagtgctaaaaccagggaagtcctgggctccatgacagtggctcaccctatcagaaggccacgtcaaagagaactataataataagccctggggggcaggatgtgtgaaccaattgcctaggtgttagcacatgccagaaggtactttggaatggaaagaggtgagagtgtctcaaggtttaaaaatgagcaagtgtagcccctcttttgtagctcactcatcccaccttctcagggtgttgaaatgcaaatgcaaaaaggctgaaaccctgtttctttctactcagtgccctaatattatatactaccttgaattgtgcttcgtctttttatgcatgtgtcctgttagtctaattagattgtaagctccttgagggcagagactctttctcctttgtctctgcagcctatacctagtatagtgccttgcacacaataggtgctcaataaatgtctgttgttgatcatgacc

SEQ ID NO: 215205 - DNA, 346 bp, Homo sapiens
actttgggaggccgaggaggatggatcacctgaggtcaggagttcagaccagcctgaccaacatggtgaaaccccgactctactaaattaaaaaaaaaaaattagccgggcatggtggtgcatgcctgtaatttcagctatttgggaggctgaggcaggagaatctcttgaacccaggaggcagaggttgcagtgagctgagattgcgccattgcactccagccttggcaacagagcaaaactctgtctcaaaaataaaaaaaataccccaccctctgctaattcagtagatctagtctaggacccaggaatttgcatttctaactagttctcaggtaatgctgat

SEQ ID NO: 215206 - DNA, 536 bp, Homo sapiens
atagacaaatagatgacagatgaggaaatgaatacatactaaacaaatgtatatttcccagctctgtccactcagagcatctggaagcagtgacaaaccagtagcatagggtacacccaggtccatgtttggtttctgataccattctacaatgaaatgaaccaaggctccttggagaaagggcttgatttctaatgctgatacaaggaaaatgcaagataagcctggaacatcttgtaatgtcagaaaataaagaagtgctaaaaaaataaaaatgaaacgaagaggaaggcaagttcagcctgcaagacctgaaagagggtcaacaggaaagagctcataatggccaaacctggaacaatttgagcaacaaaacaagaaatactggatcggaaccccaagaataaaataaatatccacgagtctaatctgataaataaatgattaaataaataaagcatccttacagtgcttttccaaaaaaattgtaggtatgcccccaaaacttctatacttaagaaaacaacccaatagaa

SEQ ID NO: 215207 - DNA, 423 bp, Homo sapiens
tagtcatcaaaaacagcaagatgctagaacaaaggaactggataatccacagaatatattgcagtccaaaagggaatgcagcctaattagatatggatttatgatgctgtgaatttcctttttgcttttttgattatttatttttaagaccaggactctctctgtcacccaggctggaatgtagtgcatgatcccagctcactgcagcctcgacttcccaggctcaagcagtgctcccacctcagtctctcatgtagctgaaactacaggtgtgcgccaccacacccagctaattttttttatttttagtagagacaaggtctcgctgtgtttcgcaggctggtctcgaactcctgaggtgggtggatcgcttgaggccgcgagtttgagaccagcctggccagtggtgccccgtctctactt

SEQ ID NO: 215208 - DNA, 396 bp, Homo sapiens
tgaccacattccttttaatataagttcttattttatgctggatcctacaactgatttcttggcttccaagtagtcgccggtccatatattccagaattctgccatgcaatcatttggtctatatctctccccataaaacattacaccagttcctaagatcctatatagcatgtcactacttagtaccattttaattcccaattatagttaactcccccgcctcccggcaactacaagaaattatctcagttaaatgactattaccaaaggattctttggtggttgtaccataagtcatctattgcatgggactctaaagcattttcatcttacaatgatttttctataatggtatctgccctataactaaaaatacttccaaattttcttttttat

SEQ ID NO: 215209 - DNA, 433 bp, Homo sapiens
ggcatgcctagctgaaagccgatgcaccgaggcctgctccatgctaaggctgtaattcttcaccccaagaatcttcattctggtcttcaagtattcaagcaatctggtttccaatcccagcgtctgtgtaagaggacactaccaaagtgaatgaaggcagagagtgagagcaaattggagtcactgctgccatcaacctgcctctgcctgcactaccaaagtgaatggagacacagagtgagagcaaattggagtcactgctgccatcaacctgcctctgcctgcactacctcatgagctgttctttcagcactccctcctgcatatccgtagagcaccacttcctgatttctagagctgggttgtatttgcgaatatttcaacagcctttgcctaattcctgataacaaaataaaggtacatttatgaaaat

SEQ ID NO: 215210 - DNA, 590 bp, Homo sapiens
gaaatacagagaatttacaagaaacaattgacatttattgagattgaacttgtactatattcaagataccatttgagacatttcacaaaggaacagtgtgaaataagacacggcaccagtcatatatatatataatttcttcaaagcatcagtcatggcctgtgtggtttggggaacctggagctactctgtcccccagactgggtgcccttgtgggggctgtggagcctctaggatttcatagagcagactttgcaaacctgctggttctaatctcacccactcagttttcagtgtagtcggggaaaggtgagttgtacatgagacaatgtcattattaacaggaaaaacccaagtggcaggagcaatagttgttgttggagaaatgctgcctccacattttgattttctgtctttttcttatctacttgctacttgatggtacttggtaccatattcacaacgaatttgtgaattctaggaggaaactaaaattaggagaatgtccctgaattttttcttcctttgtctctgaaaatgctaaactgaaaagtataactaaattgaagaaaagctcaaagagaaatcaa

SEQ ID NO: 215211 - DNA, 247 bp, Homo sapiens
ggccttgggcctacttaactaaaatgacctaaaaaatcagtgaaaaatcaaggctgggtctttgcttgataaggtagcatccacacaccttggctcttgtccatggcagtcaaaatattctatttagatgagaaaagagctgtacattagggtaactgctaggtttcctgagatgaagacgttgtacctgctatgtctcctgctcatattccttacatgaatctaaataaaaatagtattgaagcca

SEQ ID NO: 215212 - DNA, 602 bp, Homo sapiens
gaggcggttgactagaggaaacactttaaaaaaccatccagtagaatgcttgctcattcctaaggacccacttcctggcccctcaactgcttctgatatttttttctcacctaaaaaaataaaacacacaaaacacagaattgtaggtggagagtaaaggcaagctgttgtttgttgttgctgttaatagctgatatagatattctggcgctgctactgtgctgcttagatatcctgaacacattattttttcagtgtattaatggtatgctatattttttactgttaagaacttatgtgtgaattcgtgtaagagaatggttgctgttggtagcatataaattcagtgtcaggaatgatgatgataacaaacacagattgtccacatgggttgagctagtgacacctttgctttctgatacttcaatgagtataaactttgtttcatgcacaaaattatttaaaatattacataaaattactttcagggggtatatagaaggtttatatgaaacataaataaattttgtgtttaaacttgggtcccattcccaagatacctcattttatacgcagatattctgaaatgtgaaagacttctg

SEQ ID NO: 215213 - DNA, 343 bp, Homo sapiens
acagactgctgataaaatgatgccatcaaagaaaggccaattgaagattgcttgtattatcctcttttttcattggtcctaaaaccttttatcacattttaacatctctgaatttgggatgcatcttaagaattaatagcatattatagattatttagcaacgttttttctcttaattatacttttagttgcataactcttaaggggacataattcttactagcaacccctggagttgtgctgtgtatacactgagtgcccttatggggcagccctcatagcgataaggtggacattcattgtttttcctaccttttaacctcatatttgacctcacaaattg

SEQ ID NO: 215214 - DNA, 228 bp, Homo sapiens
ttacttaggccacgatatttctgggtctctttgttacagcagcttagtatttatcctagccaattacatctcccacagaaaggacagggagttttgcttgtatttttaacatctataagggttcctggcacacagctggtgcctgataaatatgtgttaaatgacggaatgaatgaatgtctatgaaataaaaggaaaaatcccaagtattccagaaagatgacttaa

SEQ ID NO: 215215 - DNA, 460 bp, Homo sapiens
gaaaagggtctgacttcttactattgcatatgacttactgatataaaatatattttgctttccattgtagtagagaagagacaagctccgaaggcccctgaacatgcctgtatattattactgagtgtgccagactgcaagccgtatccatctcctgatgctaagcagtttctgtagttagtcatataggcacctaagtaggtcaaggcaatcacagcattactaccatttaactgctgctccctgggggagagagactagcttgtttgttgtttgctcaaaaactgcttgattcttgatcctggattcttctgtaatgcaaccccccatgtgcacagacgtcatccggccctctgcatcacactgtgggaattgggctacgggaactgatgcaaatatgcggacactctggcttctattttgctgtaataaagctgttttgtcttttacccaggaaaat

SEQ ID NO: 215216 - DNA, 142 bp, Homo sapiens
tggtagagatagggtcttgctatgtagcccaggttggtctcgaactcctgggctcaagcgagcctcccacctcgtcctctaggagtgagccagtgagacccggcctcaagcccctctgagataccccttctgtcgtcttctc

SEQ ID NO: 215217 - DNA, 388 bp, Homo sapiens
gaactatttctaacatatgcaaagtaaacagaatagtgtaagaaaccacccaggtttaataaggaccaacattctgctattcttgttccgcccccaccttttcggaatcattcctaacagaaaatttcacgattttccctgttttcagtctgtcaatcttgtaccagaatagggtcaatgattttaactgctttcttccaccaggtaagaagagtcatttttgtgagaagaagtaacacccagacatgtctgcaaagactgaaaacatcagctgggttttgggcaggaacaaaagcaattagttttctaagaaatcctaatgacttaattataaacatcagacccttcatgcctgctcaatcggctctttgtcccattacagtgtcct

SEQ ID NO: 215218 - DNA, 390 bp, Homo sapiens
gacagcaagattctgttttagaatcgatttctaaaggttttctgaaatctccaaacttgtaaccttcaggctagatggctcagacctcagcattgagtcctaatgctcaccctgagttgagtgtggcagagatgctgatgtttatacagaagactgagacctttcctcatgcagaattcatcctacctccaaaaaattccttccacatttttccagttctgaatagaaaggaaaaaatatgcacactcctagggagtgctgcttaggcccccacttccataccccacatggaggaagatgcttagaaggaagaggtgggcttcctcctggcacagttccaattttcctttagatcagctgtttctgggtttaggcaaagagaacaaagtg

SEQ ID NO: 215219 - DNA, 1227 bp, Homo sapiens
actggtcatttgtttgcttccagtttttggcaatgatgaataaaacagctataaatatttgaatacaggtttttgtgtaagcataggttttcatttcttttgggtaaatacctcagagtggtattgtattgctgcactggatgctaagtgaatgtttaacctcatgagaaactgccaaactgtttttcaaagtgattgtaccatttgtcattttccccaacaatgtgtgagaattgcatttgctcaaggtcatcgtcagcatgtggtattgtcagttttttggtttgggtttttaaccattctaatagcagtgtagcaatgtgtactgtggcttaaatttgcatttccctaatgactaatgatgttaagcatcttttcatgtgtttaattgtcatcctatattttgtttggtgaagtgtctcccaaaatcttttgcccatttttaaaactggagtgtttgttttattattattgggttttaagggttctttgcatattatggatacaagtcctttttcacatgtatatcatcaaactattttctccagtctgtggcttgtcttcattttttaagaatgttttctgggctgggtgggcagctcacgcttgtaatcccagcactttgggaggccgaggcaggcggatcaccaggtcaggagttcaagaccagcctggccaacatagtgaaaccccgtctctacgaaaaaacaaaaaaattagctgggcgtggtggtgggcgcctgtaatcccaattcttggcaggttcggccggaaaatgttgacaccccttagagagttcatttgcccaattggcctttggattcaacccatgcaccgtggacactttttccaaaaatccttctactcctacaacagtgggcctctttcccacgttttaacctgacagtttactttgccccatctgctacttgccacctcccctagggaggcttaaatcatggcgcgtttcctcgtcgtaaacctgtgtccacattatatcttggggaatacttcttccctggtatcacaaaggccccccattccttctacgttctctctcttacctctcactgtgggtcatattgccatctcatcaattctcatgccttcttacacacgtcgacgtctctcccttaacactatctctgcctcgtgtctattctcacacacttctctcagcgcgctctcgtcgtgtcctctctgcgcgcctctcctcctctctcttct

SEQ ID NO: 215220 - DNA, 814 bp, Homo sapiens
agaaaagaaaagaagaaaaggagctatttaagaccttctcgtaataaccaacatttctcctttagagcttttacttttggctaccctgacttgacttagtaaacactattttattgtaaggatgattcttaaaacaacagtggaatgctatcatttctgtcttctggtgaggttaattattggcgcacacagcataacagagttagagctcaaatccaggttttctgaggccagactcagtcgccttcccactatgctgtgatgaggggctgacagcatgcttcaggtctgtcttaaaagacagggagaggccacataagttctgtgttcacagagctggagccccctgcttggtggtgggcagcgagaggaaaggatgcaagctttccagccaacaaccctgctcaggattcctggcagccctgccctaggcaggttatgaaaactctatgagcatacacttaggaatctgtaagctgaggctgattatagccaccttaggaagttgtggggacaattatgagaagacaaatatgaacctcccagcacaacgttccagtatactgataaatagatgctgcatatccagtttctcttgctgtaatcattctgttacttaatgcagaatctcatttccatcccagagcttctcgatcagggcttgttacagaaaacggagcacctataatcccagcacattgggaggccaaggtgggcagatcacctgaggccaggagttgaagaccagccttgccaacatggcgaaaccctgtctctactaaaaatacaaaaactatccaggcacagtggcgcg

SEQ ID NO: 215221 - DNA, 523 bp, Homo sapiens
  misc_feature (4)..(4): n is a, c, g, or t
  misc_feature (6)..(6): n is a, c, g, or t
  misc_feature (25)..(25): n is a, c, g, or t
  misc_feature (47)..(47): n is a, c, g, or t
tttnancccccttgcctgcagcccnctctagaggatccccccttccncatctcatttctcacagttaatagttttacatttcaccctcttctctgggttacagaggaaaactgagtgagaacaaaaataaaaaggtgtgtgtaaaagtcacggtgtgggagagaaagtgaaagtgtgggggagagaggtcaagtaaaagtatgtgtaagaaagaaaatgaaagtgcaagagagagaatgtaaaactattaactgtgagaatgaagtaaacatggatataagagagaaggtaaaagtcagtgacagagaaaaagaaaaagtgttgggggaaaggagaaaggaagacagcatgcatgagaggaaaagcaaaaatggcttagagaaaagaaaaatggtcagtaagaaggaaagtaaatgtgagtggaagggggagatagaaggtaaaaatgagagagagtgaaaatgggctgagagaaagtaaatgcatatgtgggagaaagaaaggaaaaatgtgtggagaagaa

SEQ ID NO: 215222 - DNA, 392 bp, Homo sapiens
acgggaagaacagactggatgtgtgccaaaagtggcaaggtttacttgaaacatttttgacatcacgtaccttagactgaagagtgcagagggaaagaaaggagaaacgtctgatgatgccatattcatgacagactcatattttagtgactgcagctgctttacctacttacagcttttgcctccattctgtcctctgttcttctcttgggagttttagcattggactgggaatatagagatttatattctatttctatcaaaactaacttgtgctgggcatggtggctcatgcctgtaatcctagccctttaggaagccaaaacgggaggattgcttgagctcaggagttcgagaccagcctgggcaacatagggagaccctgtctgtac

SEQ ID NO: 215223 - DNA, 449 bp, Homo sapiens
agtgaaggccaaaaactacagtgatatgttcacaccttgatcactctgtcgtctatacagacagctattgacatatttgttgcattgacgaagctaacatcatctgactgtatcgtgggtctggttatccatttgtgccctagaatcctgggtcacctcagttgaaagtgaccaaggccaaatatttcgtcccatgcttcccagggacaacataatcatatcccctgtctttgaaaaacccaatctgaaactgtgtcactaacctccaaattaaagaatccgagcatggaagctctagaacgtatggtccagtgtggcagccactataatatctaagtgtaaaatacatagcagttgcaaagacttagtacaaaaagaatggaaatgtattaacagttttttatattgattacatgttgaaatgatattttggtttaaataaaatatta

SEQ ID NO: 215224 - DNA, 660 bp, Homo sapiens
gcatgagtgagtgctattcattttaagaagcactcaagcactgtgaaaattagcagtggaacatggttccaaatgaaagtgacaccatgagcctaatgagaaattgaataccatctatttatctcctctagcccaagatctttctcttctgtcatttgaatgtttctgaaacgccttttcttcctgggctgagaagtgcctcatgccttcttcccctgcctctctggaaatgagagtccttgtgctgttttcctttctacgctcatgaagagtcctgctaggtgcatggaaactttgctttctgtttacatgtgcttctctgtcttgctaactcgttgtcctaagttttaggtgtgatagctgtagtggttttcatgaagccaaatcgtaaaggtctgagaaatacacactgtgtgttgcttggcttgtcttagagcaaaccaaaatttggaaaattgtctgggaagggtaagatcacttagctgtgaagcctctgcttttaggaactggagaagtgatttgagggtgaaaatagggtaagcgtatttactctttagctccttaaggaatgcttcttcaccttcttcaactcactgagtttgtgtttgaaaaatattccaaagcctttgcttaaaaataatgtattatataatatccttc

SEQ ID NO: 215225 - DNA, 289 bp, Homo sapiens
ctgcctgccttcctcagaggcaagagttaggtccacatttcctggcacgcagctctgggtaattcacaattccgaagctgcccctagagagaccagcctatgttggccagggcaagtccttctgtgattgctctctgccctcttggggcctacatgtccattgggcatgctgggcacagtgcatggggcccatgatactgttaggggcctgcaaaagtgttttaattttgatttattttaaaatcagaggaaaaccacaaataaacgataatgaatgtataataatgaa

SEQ ID NO: 215226 - DNA, 450 bp, Homo sapiens
aagccagggtgtttctagaaaaagagattctacacccttacaagcatatcacttctctgagctggaagcctttgcccaactaagtttcagtatcatcagctctcctggaggctgtccgatttggctgagaaaaagctagatgttgatagagaccctttgcagaaaagcaggcaaacaagtatattggacacataaccaataattttgctcatgaatttgaaaaatagaacttttactgctgattatctttttcaagatttgacattacaagatttgacatcttttgggaaagtgtttccttttcataaaaaaattcagcctggcgacagagcgagactgcaatctaaaaaaaaaaagtcagaacttgaacctaagtcttctaatgctaaattccattaatgcctctaattctgagagtctcttattattgtctgccctgaccggcgtggt

SEQ ID NO: 215227 - DNA, 390 bp, Homo sapiens
ggtcaaggctgcagtgaattgtattcatgccactacactccagcctgggtgacagattgagactctgtctcaaaaaaaaaaataaaagaacgaaatcatatcttttgcagcaacatggatggagctggaggccattcacttaagcaattaacacaggaacaaaagaccaagcacctcacattcttataagtgggagttaaaccttgagtacatatggacagaagggaacaacagacactgaggcctagttgagggggtgggtggtgcagattgaaaaactatgtatcagtactatgcttatcacttggatgacaaaatagtctgttcgccaaaccttcacaacacccattttccctgtagtacagacctgcacatgcactctgaacctaa

SEQ ID NO: 215228 - DNA, 247 bp, Homo sapiens
accacccttttaaaacacaatcaaacggtggtgtcgtgtttaacttgctgagaagggtaagttacctgcaggtagagttgggcttcaaactaggcagtgaccccatatggtctgaaataaaactgacctgataacctcatctctttacacaaaacactagccaacagtcatcattcccaccagatgctatttgtccccacaggtggtcactacctcaaaggtgacagcctgttttgggtaatgggga

SEQ ID NO: 215229 - DNA, 530 bp, Homo sapiens
attttcttatagtaatttccagcaattcaactatgagagtgttgttcagcactagaaaacaaggagctgtctttctctgtctgtctccctctctctcttttgccaagtcacagtgcatgtcacaagagtgcaatgtctaacataatgtttgggtcagctcttcgggtttaagaaaaatggagacgtggaaaggagagcaaatagatcctaaatggaattccgtagacaaggtggtacaggcatcaggcacttgaggtgagaggagaccctgaggtcagagacttcagtcttcttctgttttccccttaagatcagctcctcttttcctatgacagcaattccttccctctttgattttgtgaaatctaacatttgtgagggtgtacatttgattgaggccttttttttttcttaacggcatctaattttcattccacaggatgcatattggcacataaatgtaattgtacttctcatgcaagccacagggtgtcatgccttcctctcctgttgccagaaggatctctgag

SEQ ID NO: 215230 - DNA, 452 bp, Homo sapiens
aatttttgtatttttattagagagggggttttgccatgttggtcaagctggtcttgaactcctggcctcaagtgatccacccatctcagcctcccaaagtgctgggattataggtgcctggcctaaatcagggatttttaaatagctctgagaaaaatctgttcaaaagattttttttttctgttgaagaactgttctacaatattcaagatctccatcctgcagcctctggaacccagctctgttactgccctccagcaagcccctgcaagctggctaggtggcatagttcctgcaagaggaactatggcaatatggttagaaaccaccggatttgaacatcagattgcctctgaccttgggtaacaacttaagttcttgcagtctgttttcccatctttaaaatggggataataatgatagaacttatttcaaactgccattgaagaatg

SEQ ID NO: 215231 - DNA, 429 bp, Homo sapiens
gtgcttagctaagactggcacacagtaattgtctgatgcttgtagctattattaagttagaaaatgaagctagctcagaaaagaataacaattaggcaattatcggcctgttatcaccctagtgtaaatgagaagtcaaataatttccttggaacaggttttgattgggataaggatgcctgagattccagaaaatgaaaggagaatctggggaactgaaggaccactagggaattcttcctggagtcaattatatgtggagaggagcagaaaatcccatcctaaataatcaggtgttacaggccgggcatggtggctcacgcctgtaatcccagcactttgggaggccaaggcgggcggatcacgaggtcaggagatcgaggccatcctggccaacacagtgaaaccccatctctaccaaaaatacaa

SEQ ID NO: 215232 - DNA, 678 bp, Homo sapiens
atagttttatggttttgaagtcatctccaccttgtccctctaaccttcccatctagtcaggttttctaatgacatcttgaggaaatttctgctcaattttgagggcatactgccgatccagtatttagggacccacgtgaagcttagttaattattgattatgaagacttatcctctccctgcccctcaaggctttataaagccatggctcctggaactaaggcatcagccatttgtttttccaacctcatttcttgagccaggactctccattcaagcagagcctggctctgattgctcctttctcatgtggagctcttttagagccattactacataggagctgcgcatctggccttgacctctgcttttgtcccttgggtacagcaggacattgcagaaacctcacccacagccttcagcttttggctccctgctcattcatcgaaatggtcagctagcttcttgtgcctagctgtgatttacctatttaatattttatctatcattgctatgtgtttggagcagtggggtgttgtccaagtgtggattcaccaaaccaccttggccaaaagtccaaacttgtcggaagactgtgtctgatggatgttgccttatgtaaggtccagacaccaggcaatctggatgtgcagaaaagtttcacagcctctgcattaa

SEQ ID NO: 215233 - DNA, 874 bp, Homo sapiens
tgaagatgaacagagttcatagctacattcatctttttttttttaacccccacaggactgaggtgcagaactggagtgagctgtttttctaggaatttgaatgttatactgaataaaagccccaggccataaggcaaacacaaagtttgagagaacccatatttcaagttggcaaacccctgtgtctagcttgcccctggtcgctatctctttgggttggtgtttcacccagctcctctgggctttgctgtagactactttcccacacacaggtgcctaggattcactttcattttgccgtgctaaagaaatatgtagcttaaataattccagcaacaagattactcttactggtaaaaaaaaatgtggactagtatcctaagacaaagagttaatatttgtctttttgagggttttgaaactgaacactttgaacctggcagcatcgagttctcaatactgttttaaatggctttttaacacttaggagaaattctccaatggctctaagagatacttctcaattttttcattccctctctatgctgtctgctattattcacagatatgcatattcctacacgtaaatacacatggggtagattgtttgagggataattaatctaaaatttagtaagatcttatctaatttattatttcttttttccaaaataaattcaaatgctctattgccatctcagctatactagtgtgtcacctaaaaattacacttagatattacacttacaccaacatactaaagggatgctgattttacagtagtcacagtgattgattaaacaaatttatcttatatcaaactagtgcttgacttgtaagtctactatgtagaataaataagattcttaaaaga

SEQ ID NO: 215234 - DNA, 298 bp, Homo sapiens
tcccagctactcgaggggctgaggcaggagaattgcgtgaacccgggaggcggagcttgcagtgagccgagatcgcaccactgcactctagcctgggtgacagagcaaagactacgtctcacaaaaaacaaacaaacaaacaaaaaaaactaagtagcagtacatcttaataattaccaaagaattggtgccatgtagatcaagggttagcagactatggcccacagtccaatctggccagccacccgtttttgtaaagcaagctttattggaatacagccaaccttatttatttaca

SEQ ID NO: 215235 - DNA, 154 bp, Homo sapiens
ctgtccaccaagttaaagacaccaatgctccaccctcctcgctcccctcctccccatccccaaatattttcgtaaagaatcagcattttgctacttttcgtccatccattcctccaagacccatttccccttcctcccttcttgaacctcttta

SEQ ID NO: 215236 - DNA, 1007 bp, Homo sapiens
ttgttctagcgccagtgcacgacagttgggtgagttttgcaggttccccctgcagcattagccatgttcctgacaatagcagctaatcacaaacactgcagcacttatatccctcccctgttgatgtttcttttattagcactcagggcttccaggtgtgagcaagtagaaacggtctgtggcattacagaagtccaaggacacttcctgagtggacaaggtgggtgggtgatccagttgtccactaagaaagtgcccttgggcttctgagctggttgggtgatctgcctgccatatgtggcttcccatgggactctgcaaaggtagcaccaggtcaccaagaggtgtgaacagaaggaacagtccactgccactcactgtcttactgtggctatcttgaaatgtggcattcatatctatccccaaattcaatgccagaagctgctgataaagcatagtcagaagctgattacgtttagaaatatgtttcctggtgtgtaggtagaaatatgtttcctggtgtgtaggtgcagggggcatctttcagtgtgccttgtgctttgcccattgctgcagcagccaggggcttacaggtgtgtcctggcgcactggcctcagcagagcagcctttctcttgctcactgccctgaactctctgtcactgctcaatgggaggcctgcagacaccatccagccaccctgccacatttgtgggcctgggactgggacaggagggagtcaacacctttgggacaatctttgagcaaggaaagttgagcctgggaataaatactcctccttctcttgtgaataatcttcaagtacacttgagaaggtttctcagaggatctgcagtgggctaggtccctaactgacaatgagagaaaccagctcaattgcactctgttgagttggcttcccttcttccccacgtcgctctcccaaacacctcctcccccactgctactccttgggtgcattttcctaagtgcactgcagcctcacca

SEQ ID NO: 215237 - DNA, 302 bp, Homo sapiens
attgattttatggagcagaggctggtgcatgcatgtgtgtgtcaggtgggcagtgatgggggggtgggggatgaggcatggtgataattcacaacataccctctatctagttgggatccgtaaaggaggaggttaggggagggaggatccatgcctacttgtggagggtatcaagaagggcttcctggggaggtggaggtgagccgagctcaccaggagcttcaccttcctggggaggcgcagtgagccaagactgcaccactgcattccagcctgggtgacagagcgagagtctgtctcaa

SEQ ID NO: 215238 - DNA, 211 bp, Homo sapiens
tcagcacaagtttaatatgtttgatatccaatatattatccagactctaaaatttgtttatcctcctgttgaattccttgctctgttaaaaaataactccacgctcaataaatgctaaatgaatggatgagaggggaaaaatttttctaataatccagactatcaatattagggtaacccctctttccctcctcccatgaactgccaaatc

SEQ ID NO: 215239 - DNA, 385 bp, Homo sapiens
ggtgttctatgttggaatgttttcactgtaaactgtatttaagcaataatacgtacccatttttttctttcattatttttatatatctgtgaattaaatatgaagaaatagtttttattttttgttttttttggggggacaggttaattttaatgaatcttattattttatgattttatcatatgacttttatataggtagggaaaactgggacttcgtctactcaggtcagtcattggacaccttggttgttctgattcattgcttgatactcttttcaggagtgattaccacactttggaatattaaatatatatattagtgatgtttaggaggaaagattatgactgatgaaatttgttgaataaagtgtatgtggtaaaca

SEQ ID NO: 215240 - DNA, 194 bp, Homo sapiens
ggaggagaatcacttgaacccaggaggtggaggttgcagtgagctgagattgtaccatggcactccaacctgggcaaaaagagtgaaactctgttggggggaaaaaaaagaaagaatgaaaactgagaaaggtaagagctgaggctctctggaagcttgaggagctaaatgtgtgtatgtcaagagacttcaaa

SEQ ID NO: 215241 - DNA, 806 bp, Homo sapiens
tctgtgttgtgataattggctttggaaaggttacgagaggttgactctggcctgacacggaggctctagccaatgccagagaggtaggcttggtgccagagctcacctcagacccacatctccagggagtgacaggaacagaaaatcagccaagctactgtgacccagtcgttcagcaaatgtcggagcgttgcaatgcctgcccccaccctaccccagagcaaggctgggcacctgaacactgtgtggggtactctgcgtctgtgctctggggaagggggctgtgaaattcacctggagatctgttttaagacctgcgctttcgaaatgctctcaaactcttttatcaagacagtacagcttggacaaatgtccacaatagagaagcagtgacatcccttggacctccgggaacagcagccctgtctgtctctgaacgggccttcctccctcaggctcctctcacccctcggggctgccctcaggggaggatggcctcacccagtgaaggttaactgggccctttgtttgcaaatggcaggacaggagctggtgctagctgatcatgaggctttttacagcatcaaagtgctgcagtttactaagaaatcaggaaagcatattccaaaacagggttgtcttctaggaaggaacagagaggactctgcctttctactttcaggcatccagccctgtatgctccaccagggtatctgtgaggagaggcagcgtgagcaggcccagtggaagcagggatggagaaggaggggtctcccataactcactgcagatgctgagtataatta

SEQ ID NO: 215242 - DNA, 434 bp, Homo sapiens
cagcaagttctgtccagattcttcttggcctctctatgcagcatttcttcctctggggcatgggaaggaccctttctgaaatgagggtcttattactcacaatcagaaagtcagagaaagattagagtcctgctttgggcaagcaaaaggagggcagcaaaagtttagagagagagaggttatgttttcgaaggcctccttctggggcctaaagtgcccccaacattacaacagactgcaacaagggctatggaagttatgagccaggaaccgtggatgaaaaccaatatatataaccatatgtcatgggagggaagggaatacatttagttctggacataaggtagtggacatccagacataaatggactaaatggaatgttatttaaacctaagaaataaataagaattacaatgtaagttggaagagattc

SEQ ID NO: 215243 - DNA, 831 bp, Homo sapiens
  misc_feature (2)..(2): n is a, c, g, or t
  misc_feature (525)..(525): n is a, c, g, or t
gntccgcgcgccattgtgttgataccccggaattcggccattatggccggggctagcactttctccaggcacagctgcatctctaagtgccttctaaatttctccttcctgctggatttacataatgtaattatcaccatcatccattttcttccacactgaattctctaccgctgtaagagaagagaaattttaatgggatggagggcaggtgataaaacaggcaaatctctcatgcccccttcctccagcataaatgcacacgtgcctcagaactgtcaggctctatgatggggctacaaaccctgccctcttagagaagtcacagattatttcccctgccataaatcagaaggcagtgggctatgagaaagcgtgtacagggcactacagaggagcaaagggaaggagcatctaatcacattagactactcagactcaaatctgagtcaggaagggcaggtaggagtgcaggtgaggtaagaaatgggagacaggaaaagagcattctagacagggtcgccncgtctcgccccttgcacacagcccagcctgccgatagcctccctctcgcactctggatgcctccaatactgcttcaactctcgacgcctcccgccgtccccacttctcctgttccactccggctcctcgcactcctctgccagtatcgcccccactccccattgctctcaccgccgccacgccttattccgccacactctctgctcattcgcggccacgccctcccctccctttccatcccccacctctgttcctcaccatcccctcttcctctcctcccctaccctcctcatccttcgctccccc

SEQ ID NO: 215244 - DNA, 529 bp, Homo sapiens
ggtatgtagggaaacctcaattctacaaaaaagttaaaaattagccagatgtggtggtgcacacctgtggtcaatccactgagctgctcgagaggccaaagtgggaggatcacttgagcccaagaggtcgaggctacaatgagccatgagcagtccactatactccagcctgggcaacagaacaagaccctgtctctaaaaaaaaaaaaacaaaaagaaaaacccaattgtttcttcagagtagctgcagtagaaaaaaagaaaaaagagacccaattgttgacaaaattatgaaaaaaaaaccaatattctcgtactttattggtaggaattttaattggttaaacccttctggataaaatcttaatagtaaatatgcgctttgatccagaaattccaggacgaaccataaggaaataattaatgcagtacagtgctcaggagtttggttctggagttctgcaacctgaattggatcttgctttaactactaattgaaggtatgatcatgggaaagtaaccacctctt

SEQ ID NO: 215245 - DNA, 672 bp, Homo sapiens
tctttattcatatgttgataaaatactaaatgggttaaggctggcaacagggtcctttggttccttaatattatttaaccagctgtgactctacctaattcttctgtcacctgctcatatttctgtctctcgtgcctaggagagctttttagtatttactcagattttttcatcaggaactcaatttttttattgttacctgttctgacccttgattcttttgctcacagctttctattcattacctctgtaaaaagcctttgttctgtttgagcagaaacttagcaaagaaaagcctactagcaaaagcttccagtttccagggtttctttaccagttcattgattctacaaatatttattgtgttttctgaatctttattaatttatcaaatcagtctttattaaatgaacaaatgagttttagaacgggggaaaaaattgcatataggccgggtgtagtggctcacacctgtaatcccagcactttaggaggccaggatgggctgatcacttgagcccaggagtttgagaccagcttgggcaacatggcaaaaccccatctctacaaaaaatacaaaagctagccaggtgtagtggcacgcacctgtactcccagctacttgaggggctgaagtgagaacattgcttgagcccgggagtttgaggctgc

SEQ ID NO: 215246 - DNA, 399 bp, Homo sapiens
aaaacttttttttaacacttttaatctcctctttatctttcctacagattttctataaataatacatatttgatattactgaagcaaaagaagtctaaagggtcattctttcaatatttataaagtacctactaagtgttacgcactgtgctggatgcttggctagataatatgctgtccttcttctggtctctgtatttttgtgtgtgtatgttttaagaagatgacattcttcaacattgtaaggtcagtaatctgacaaatgtaatttagtagtattggggctcggaaaatgacaccccaaaacatgctgagagctttgaacaaaggagattaaaatgctccagaacgaagcctcagaaccaatgtttctctctgaccttctgctccttccacaac

SEQ ID NO: 215247 - DNA, 454 bp, Homo sapiens
ggcaatgtctggagacagtttgcattgtgacatcgtggagacaggttgctgctggcatctaatggtcaagaggttaagagttttctttggctggtggcagatgaggaggtcagagagattcaaagcatgagaaggatttggcatgtccttgctggctttgaagatagagggaccacactcaaggaccagagagaagccacagttgctgacagtgacccttcaccaacagccagcaaggaaatggacctcagccctgtggctgcatgaaactgaattctgccagcaacccccaaagaacttggaagtgtgttctttcccacagcacccagatgagagcccagccaagctgacaccctgatttcagcccctgagtagagaatccagtagagtctgcctgaacttctgacccatagaaatgtgagataataaaagggtgttgttttaaaccattaaa

SEQ ID NO: 215248 - DNA, 160 bp, Homo sapiens
accgcacccggctaaggtatgcatctttgaatgaatttttgatgtcatagtagtccttaccttttaaaaaaaatcaaaaatttagtttattttcttattcaggtttatttcttattagcttagtactcttcattaaatgtcttttgaacacagtattttt

SEQ ID NO: 215249 - DNA, 212 bp, Homo sapiens
catcttgaaacaaacaaaaaacacccagccagcctcctgaagatggctttataagcaaactcccctgggcagtagattaccgcatgattcactgtttttaactacagttaatagctgtgccaccaccacaggtgacaccgtctcacctccaggggctgggagttgaacacttgctgcatgcctgggccctggcaaggaggccgacggccagg

SEQ ID NO: 215250 - DNA, 380 bp, Homo sapiens
gcataaatgaagaatttttttattctcgttagactttttataagattgtcagatattcaaataatatgtaaccaagccaaacttcaggttgataggaaatctagagccaggagttttaatttttttgttgttttgtttttttctgtgacatgttggcaaatgataaaagcaattcactctgctaaccagagatgctgggcagaattcccccaacactgatttcatgccatgaaaagcacatgaagtctggcctggcaaggcatggtgaggagcacaggctttgtgtcctactgctccaatttgaattccagcttagtccctactagctgtgtgaccaaaggatatttacgtaacttctctgaaccttaggattcttatac

SEQ ID NO: 215251 - DNA, 385 bp, Homo sapiens
  misc_feature (273)..(273): n is a, c, g, or t
ggcgcagtggctcatgcctgtaatcccagcagtttggaaggctgaggcaggtggatcgcttgaggtcaggagttctagcccagcctggctaacatggtgaaaccccgtctctattaaatacaaaaattagtcgggtgtggtggcaggtgcctgtaatcccagctactagggaggctgaggcaggagaattgcttgaacccagggaggtggaggttgcagtgagcggagatcgtgccactgtactccagcttgagaaacagagcgagactccgntctcaatttaaaacaagtaaatttaatggcttatctcaaaataaagctgtttaacaaaagggaaagaaaaccaatgtggctggagttcagagagggtaagaagtgggagatg

SEQ ID NO: 215252 - DNA, 164 bp, Homo sapiens
aaagaatgcttattgagaaaagacacctgagtatccctgatagagtaaaggggcttcccctgaaaatcccttatgactcttctatttggggccaattaaaaatgacaatcttacctcacagtatttttggggtctttattcagagagtcacatacgcaagacca

SEQ ID NO: 215253 - DNA, 251 bp, Homo sapiens
ctggacaccacagctcataccctgtggttcaaacaacaatctaatcgccagtcactgttatttctgtagaccaatgagaattcctgaaaaacgacgtttgcaattgtccctctcctgactttgtccttttttctttaaaaaatgcaagcctctcacagaagactaaagtgaacttcaattgtcccatgtttgataaagtagaagcctagccatcttagtctcttagtttaataaaaattgatgtaacagcc

SEQ ID NO: 215254 - DNA, 527 bp, Homo sapiens
gagatgtatctctccatgtgtaagcaattatacaaagatttagctgcagaaatgttcacgtctatgctacttctattagaagaaaactgaaacaactcccatgtccatagtataggacaggttaataaatggaaatatatctatatgtaaaatactataccactattcaaaagtatttggcaaatgagttttcactaacatagagtgttcatggtctgctgtatgggaaaaaaggcagtttagaaaaaagtacatttggtatacatgcatagagatgtgcatagcaaatggtctgaatgaatggccttagaccacagttttcataattgttctccttcagtgagaatatatataaaatatatatttcatatataatatgttatatgtaatatatttcatatgtgatatatatttcatatataatacatgttatatatcatatattttatatttgttatatatcataaatttcatatatgttatatattatatatttcatatgtaactaaatacaccaattaaatttg

SEQ ID NO: 215255 - DNA, 380 bp, Homo sapiens
gcaggatccctcttcctaactccactttcattcaaatgccccactggacagttagtgataagaagataatggattccaataaaggatgtacatggggatggattcttggggaagaaaatgtaccccctggccccacagctgttcagcagcatcaaaaccggatctggctaaagaacgaggttaagcctcaaatatcatcctgtaccaccccctccactgaagtgcctgcgggaatttaatcattgaatttattcactagcaattgttgcagtttagtgcatcatatttagaaacaaaataaattgttgtcatattcttttgtattgatatataatgaaatataattcacattccataaatgcacctttttgaaggataca

SEQ ID NO: 215256 - DNA, 210 bp, Homo sapiens
tcctgaccttaggtgatccacccgcctcagcctcccgaagtgctgggattacaggcgtgagtcaccgcaagacacctttaaaagattagcagaataacatcggatcaaaactgtctagcctgcagttccccttaattttgtattataaaaagaaaactaaacagagaaaactttaaaagacaatataatgataccacgtagattccagta

SEQ ID NO: 215257 - DNA, 661 bp, Homo sapiens
tatttccttttttttgagacggagtctctctatcacccaggctggagtgcagtggcgcgatctcggctcactgcaacctccatctcccgggttcaagcgattctcatgcctcagcctcctgagtagctggaattacaggcacccaccaccacacccagctaatttttgtatttttttagtagagtcggggtatcaccatattggccaggctggtctcgaactcctgacgtcaagtgatccacctacctcggcctcccaaagtgctgcgattgtaggcatgagccacggcgcccagcccagcttttcttcataactctcaactctttgcagtcaggcagttctcagagctaattagggcatttcatgtcacagtataagtttggtatgttttttctattgcttaaggaaaagcaagatagtaacgtataatactttttgtccaaaagtgcaagatattttggtctgtgagtctcataggagcccctagaaataaatatagtttgccttttaactgttagaaactgcagcactctgagtgtcctatgcccaaagaatggccttctcttggttgcgtcaacatagcaggcttgcttctttctgcctcacggctttacatgtgctgtttccccagcctgaaaccctgtccccttgttcttgtctt

SEQ ID NO: 215258 - DNA, 352 bp, Homo sapiens
ccaaaattatctgcagatttaatccactgccaatcaaaattctagcaggattttctgcacataaacagattctaacatttgttaggaaaggcaatgtaactaggatagacaaaacaattctaataaagaagaataacttgggagaaatccctatctccaattttaagaattttaaattataataatcaaaacaatgtagtgttaaagacagaaacacagatcaatggaatagagtccagacacagacccacagaactatagatgattaatttttgacaaaagtacaagtgcaattcaatggagaaaggataatcttttcaacaaatagtgttggaattagacacccatttgc

SEQ ID NO: 215259 - DNA, 343 bp, Homo sapiens
ctgtgcatgtatattttgcactgtatcgtgggaataatttagttatttgtttgcaaaggacagtgcaggtctttttgttctctattgacataagtaccagatccccacagtgcagtgagcaccagtgcaggcacccttaggtcagacgctcctctctttcttttcagccagccccactgccaaattgttgtcaacccccagtcggccttgggttaagaatgaggaggtggagaacggcacgtgcagccttaagggttccttctccgatttaggtttcttccactcctttgccctgggagagcaaaggggcgaagggaaatcaaaaaccggttgaaaaagaaaa

SEQ ID NO: 215260 - DNA, 811 bp, Homo sapiens
gaaaaagaactaatgtttgatgccaattttacatttaaggaaggtgaaattgttgaagtggatgaagaaacagcagctatcttgaagaattcaagatttgctcaagattttctgatcagaccaattggagagaagttgccaacatctggaggctgttctgctttggagttaaaggatataatcacagatccatttaagcttgcagaagagtctgacagtatgaagtccagatgtgtccctgatgctgctggaggctgctgtggcacaaagaaaagctgctaaatctatagccaaccaggggaccacagtagtgggcaagagtgatctgcatgttttttaacctgcttttccccatagcacagaccataagaaacaacaaatgggccactgcgcccggccataaatgaattatttttaagaggcattgattaaagattcacagcaaatcactagttaagcagattttttttctatttcctacttcaaagttctggtgccacatagtggtcagaaatggaacagagaagctgtcttaagccttgttcaagaagcaggaaaggcatcagaagaagtaacagttggcagagggtctcaggaaaaacatcttccttctgatcttttgcatagcaccttttggaattttcatcatgtttgcttattaaacaaagctcctactgccatcatactaatcatgcaaaaagattgccaaatcatgtttggtaggaggacttttgaggtagcttttgaacaaatgtttttttcttttttctttttttttgcaataaagaaaacaaattaatcataaacatct

SEQ ID NO: 215261 - DNA, 589 bp, Homo sapiens
aaaataaatgtggtaagatgttatggcagagaagactgtatttcactgtgtaatttcacagtgaaacatacataatacaaaattagttttgttattccaggccttcattacagactatctgaaggtagtactgtgtgcattttttcaacaactttttatctgaatacaaaaataatatatatatctgttgtagacagtttggaaagagcagaaaaatataaagaaaataaaaatcattacctgtaattctagtatctaatgataatcactgttaatattttggtatatagtacttttttcagtcattagtataagttctttgttgtgtttttaatagtggtataacttaattcatttgtaacctacattttatacacaaatgttactttcagatttaagtatccttctatagcataatttttattttttatttttatcttattcatttatttgtataaatacaaatgaatgcaggtgcagatgcagtttggttatatgcatagatttcatagtgggaagtcagggcttttagggtatctgtcacctgaataacacccattgtacctattaggtaatttcttattcacct

SEQ ID NO: 215262 - DNA, 604 bp, Homo sapiens
gcataggatggaaccttgaggaacaccagcagcatttactgacgggttagagatagatgagcctgcaaaggagtctaagaaggactagttggagcagtaagtagaaaatcaggagaaagctgagtgctagaagctgatgaaataaacttttcttgaaggaaggagttcttgatatcaatactgctaggcatataagatggattgctaacaagaaaatcattggtaacttcaataagaattgtttttgtgggggagatgctggaaaagatggcagataggagacaggactaatgtgcagctcccgcttagatggacagaacagggtctggagactcacactgtgaacttttactccaagaaccaccacaggaacatatcaggaaaactgaaagaattcacagaccctttgtaagaagtggcttgtcactgcaaatgctgtgagacagcaaaaaactgtgagttcccaaagtgtgaggggggaaaagttggcttccgaacacacatacccactggggaaatgtgtcaggcctctgagcccaagctaagccatcatatcccctgtgacctgcatgtatacatctagatggcctgaagcaagtgaaga

SEQ ID NO: 215263 - DNA, 597 bp, Homo sapiens
cttgaactagtgggtttttgtcagatggaaaataagagtattggccaggcatggtggctcatgcctgtaatctcagcactttggaagtccaaggtaggagaatcccttgaggcaggagtttgagaccagtctaggacacatagcgaaacactgtttctacaaaaaaaaaaaaaaaaaaaagaaaagaaaaaaaaaaaaaaaaaaaaaaaaaaaaaaaaaaaaaaaaaaaaaaaaaaaaaaaaaaaaaaaaaaaaaaaaaaaaaaaaaaaaaaaaaaaaaaaaaaaaaaaaaaaaaaaatttgggcccaaattggggcttatttggccaattcgccctttaggggggccttttaaaattaaagggcccgggttttaaaaacgcgggcctggaaaaaccctggggttccccaatttaaacgcctttgaaaaaatccccttttctccaggtgggtaaatccaaaaaggcccctccctattgggcttttccaaaaagtggccacccttaaagggcaatggaatatgtaccgcgaaaatttttggacaaactcgggtttttgataaaccgcctattttttaaccaaagggcccatcggttct

SEQ ID NO: 215264 - DNA, 1821 bp, Homo sapiens
gaggccgcgagagcaccgggaggaggtgcatttggggttgcgatcgcgagcagcagcgcccattgttgcaagacctgagaccttgggcgagcctggcccctacctgggcctcagttccccttcggcagagcgaagttggactagaaggtctctgcggccgtgcagacgaattctcccggacgaatcgccgagccccagcctgcatgggagaccgtggccagcagggatgtccaggctgggttgggggaacagaggtagcagaagagttttcaggagaccagaattttccgttttcgcacagccaggactttcggctctcttgggggatcagcagggcaataacgataagtctccttaaggcccaggacctcaggagggggtgcacgacttcttttcaacccagccccggactctgatctcggattctggcccgcggctctgggtcaggccgcggaactatagcagcctgcagtcctggtcttgggtgtaggggtgcgctcctggtcccgcggctcagggatatgcagtgaccatgggttgttggcctgatgggacttttggcttgctaaaccaaagctcggttcggatatcccgggcgaagacgtccgctgctctgggccaggctggcagcgttcaggctggggcagagacgcggagtcgggcgctggctccaacaggcctggctcccacatcgaagacagctgggccatttgctgttaggaggccccgcgctgacagtgtgcaggatttgctcttacacagctctttctctctgtccctgccggtcccccgcagacgaatcggcagccgaaacaggccagagcttcctgttcgacgtgtccagccttaacgacgcagacgaggtggtgggtgccgagctgcgcgtgctgcgccggggatctccagagtcgggcccaggcagctggacttctccgccgttgctgctgctgtccacgtgcccgggcgccgcccgagcgccacgcctgctgtactcgcgggcagctgagcccctagtcggtcagcgctgggaggcgttcgacgtggcggacgccatgaggcgccaccgtcgtgaaccgcgccccccccgcgcgttctgcctcttgctgcgcgcagtggcaggcccggtgccgagcccgttggcactgcggcggctgggcttcggctggccgggcggagggggctctgcggcagaggagcgcgcggtgctagtcgtctcctcccgcacgcagaggaaagagagcttattccgggagatccgcgcccaggcccgcgcgctcggggccgctctggcctcagagccgctgcccgacccaggaaccggcaccgcgtcgccaagggcagtcattggcggccgcagacggaggaggacggcgttggccgggacgcggacagcgcagggcagcggcgggggcgcgggccggggccacgggcgcaggggccggagccgctgcagccgcaagccgttgcacgtggacttcaaggagctcggctgggacgactggatcatcgcgccgctggactacgaggcgtaccactgcgagggcctttgcgacttccctttgcgttcgcacctcgagcccaccaaccatgccatcattcagacgctgctcaactccatggcaccagacgcggcgccggcctcctgctgtgtgccagcgcgcctcagccccatcagcatcctctacatcgacgccgccaacaacgttgtctacaagcaatacgaggacatggtggtggaggcctgcggctgcaggtagcgcgagggccggggagggggcagccacgcggccgaggatccccagctgatgagcagcagcgggc

SEQ ID NO: 215265 - DNA, 370 bp, Homo sapiens
agcttgggcgacagagagagactctgtctcaaaaaacaataacaacaacaacaagttatattctactcggtgtcttcaggcaactttattgtatcctcaaatggccagcactattttgctggtaccttgcctagctttgttatttcccaaaccttgacctggtctcatactaggtctttagtatgcccacttattagatttcttgatatgttcgtagtcaaaaccacaacagccagattccctgctttctgggactcttctaggagatctggtttcagggtagagttactgaaaacccagggcttctgcagaatggttttgagtcactatggttcccttgctgatttgattatcttcttgtctttgacca

SEQ ID NO: 215266 - DNA, 402 bp, Homo sapiens
gtcacttccccatcctgccccttcccaatgaggccctgcacatgctgctcttccccagtccccagggaaccccatgagctcaagacactaccatgttctccaaacaaaatcaagtctgatgcactttaatttttgagtgcacagagcctccatggctccttgaggagccagcagcagataatataatctgggccacgggaggaggctggtgcagctcccaggaggctgcaggacatggcttctggaggcacagcctccactcccaaagtacctactgagtgacaggccctgtgctgtgggctttgtggccctgagccatcaaggcctcatgcggtttccagctattggtgtcaacagcgtcttcccagaaaccctgtggctggcagtgagtgggtgttgtgt

SEQ ID NO: 215267 - DNA, 668 bp, Homo sapiens
tcctttgcagatccagtggtacccttgcctcgccttgcgcgagtctcgctcctccctttcccacaatgttatcatgagctatttttatctacaacttgtgccaagatgcttttggggggattctagggaggccactccaaatccactgtctttgcgctgcgctccgagaaacagtctcctgttagcatggagcagcctcaaggagtggcggggagggtggccgagaacggaaggagccagtccgccctcttctcctccctcagccctagccccggagggaaaccccgccaccaccagctcggctgcgcctcccgccagtagccccggaagagggtccccagacgagtccccacgctcccgctttcaggcgctgggtgcttggacactgctgaggcagcagcctggcacaggcaggatccttcattcccacccgtgcgttctcgctttgcaggcaaatctcattttattttgttgaaatgcttccacccaagggttaattccaggaattccatctttaaaaaaaaaagaaaaaaaaaggagggagaaataacccaacttctgcctccctgcatttctaaagcaaagcgcatcctttgacgttcggatttttttcttgctttctgcattcctggtaatattgggtaacactgggtgcaattagaataagc

SEQ ID NO: 215268 - DNA, 434 bp, Homo sapiens
caggattgtatgctgagcccagaactatagctgggcaatgggaaaaaacactgaaataaacacatctctgaagcctagaaatatcatgtctgcctaagactgaaacttatctacaacaacaaagattactcatcccaccactaggctaaaaacattaaataataaggtaacaagggaatactgaagggatatttactgtggcacatagagattgttttctaatgtgcaccacaaaacaaaacctagagcttagtgtagagtgaacattgagaaaaatcctctgccaaactaaaattcgctacaaatgaaatatatcacaaaagtactttgaggttttgcatgcagcgcagaaagccaaaccagcaacaaatcctaaacatagcccaatccctgacttgattgagccaaactctgacacaagaagcctagcagaa

SEQ ID NO: 215269 - DNA, 688 bp, Homo sapiens
gggggatttttgggaaggttcaattagatatgccccaagaaatgcttaatttttctgaaaaataccactgtttttaggcatctgttatactgtaggggtcataatttaattatttctattaggtatttttactatacaccaagatttcattatgcaatcacacatctgttgttctgagctgtggttcttactggcatcttttggagatgtatttagaggtaaagaatcctttaacaacttttaggatccaaaatctcctaacacaaactttctccttctgccttctctttagcccttttaaaattggtgtatttcctacttaaactcacatatttcaacttcttgcaacactattaaaattacagctactatttgttaagcacttactgtaatccaggcacagtcctggatgctgcttgtattatttaatcttcacagtagtagtgcagtttaggtattatgactatttaaatggagtctgagaacacagaactcagtaattgagacagcatcttataggtatgatgctgtgaagaacagaaattattttaatacctggatatctgtcttcaagcccaagttctgtccactataagctattcccataactttaatacagtcaattttcccaatatgagaacatgaatttctcccattggcttcctaatggttttctgtcactcagagt

SEQ ID NO: 215270 - DNA, 529 bp, Homo sapiens
caggacacaaaataacccatcgtttgaaagccggggaaataacctcgctgatgaaatagctaagcaagctgcctcttcccaagaggcacccatttgccatctaaccccttgtccctcctatccagctgtgatccccatcttctcccttgcagaccaagagaaactaaagaaaataggagctaaggagagcccagagggaaagtgggtactaccagatggaagggaaatattgtcacagcttcatcaaggaactcactggggtccacaagctatgtgcgatgcagccctcagagtctacgggtgtgtagggatatataccctcactaggcaagtggcggatgattgcatagtgtgcagaaaaactaataagcaaaccctaaagaagcaatctcttgggggaagaaacccagggttgaggctgttccaaagcgtctaagttgattacactgaaatgcccccaataggccacctcacgtatttactagtaatagtagactatctcacccactgggtagaagccatccccttc

SEQ ID NO: 215271 - DNA, 200 bp, Homo sapiens
tatatgaaagagaaaggaagcttcattaaatgaaacattggaatcaggaagactccggcttggctccctgagcattctaacttgttctgagcctagtctcgacagaagtagcctgacacaagtggctcagatcaagggtccatattacgggcagagtaaaaataggtcccagtttcattagacttctcatacatttaagg

SEQ ID NO: 215272 - DNA, 385 bp, Homo sapiens
tatcctcatatggtggtctcttcctttcttttcctctcctggttcatatttgggccagagtgacctctggcatttacctccaactaactttgaggtgcaggaccccacaagccatcatttatcctttggcaaatatagcagcagttagccagcctgtctgtcacttttaggattctttgggggatagagatcagactcccatgcctgccaaatgcaggggacaaatatcctgttcttcaggtggcactgccggaacccttctgccttgagtaacataaagaagaggaaagaagatcaaagaattatgaaacaaatgagatgcttgtaaacttcattagttatatgaaaccacaaaggggcatttaataaactattcctctcaaaa

SEQ ID NO: 215273 - DNA, 237 bp, Homo sapiens
tatccgaggattactatctatctatcactctttaatggtcatttcccagtacaaaaaaataaaattgaaataactactttttggcactattaatgttagtttttgtattgggaattgaccattaaagagtgatagatagatacctgttttgtgattatgtgcataaagtcaaataatgtaactgagttctctgcttgagatcaaggcaaaatatatttgatagattattagaatata

SEQ ID NO: 215274 - DNA, 393 bp, Homo sapiens
ggatgaagcgggtattatggaccattttattccagtcagtttgaaaacagtgaaaaaggtcaccaattgctaggaaaccaaacccgccaaaactgacacaagaaggcacagccaacctgaaccgttccagaatcattacagaaagatatcagtagtcaaaggctttccacgaatgaactccaggattcaccaccacattctgacaaacatcctaggaatacatatcttccattttacacaaactcgtgcagaaaattgaaagtgaggggccaggcatggtggctcacgcctgtaatcccagcactttgggaggccgaggcgggtcgatcacgaggtcaggagatccagaccatcctggctaacacggtgaaaccccatctctaccaaaaatta

SEQ ID NO: 215275 - DNA, 425 bp, Homo sapiens
tcaaatttttgtggtgaattgattacaggaacaagtcacactctgtaagtgaattactgggtgttgtctgatgaattaatgaagtttaagaagttctttcaaagatccgtggcttcgtgtgttcatttcagttctaccagcaatatttctgagagcagaacaagtcttgcgtcttctccctacttctcttctctggcagtttcttggatctacataattgataatctcttaagaagaaaatattttatccttttggaaattcgtttttgaaagttggagtttgtgaacctctaaaactgcatcatggtttttctctccccttcacccccctcccccagcccccaagaaagccccagttttagcctttgcttggcttccttggaatttcacttatgaatacgcacacacaccatcttttgagactg

SEQ ID NO: 215276 - DNA, 373 bp, Homo sapiens
tagaacctgtctgagaatctttctggtccggggctattttgttagatagaattttttattaacgattccattttggaactcaaaatttggctgttcagggtttttaattttttcctgattcagtcttggaaggtttttatcatacagggaggttggattttgttgaaagctttttctatctattgagataatcgtatagtttttgtttctaattgtttatgtggtgaatcacatttattgatctttgtatgttaaaccaaactttcaacccacaaggaaagcctgcttgatcatggttaattaactttttgatgtcctgttggattcactttgctagtattttggtgatgatttttatgtccatattcatcag

SEQ ID NO: 215277 - DNA, 467 bp, Homo sapiens
ttttgattgaaagggcaaattttatgtaatgtatattttaccataataaaaaattataatcccccaaacttgtaatatggttatatatgtgcttctttattaaatgcattaaagaacagcaacaataaatacaatggatgtgatcagctattcattttgtttgtcttgttttgagacagaatctcgctccgtcacccaggatggagtgcaggtgtgtagctaaggagccttgggaatacccaaatttaatcaaggttctttagggcttgctgatcttattccctgaaactgaaaggtcatcctcgtctgctgtctctggtctctttcacaaaattgaaaacctaacccagtttacactcaccataaactcagaggtttattgcttggagggcccttagctcaggccaacttttctccttcctgatgaggcttaggcagtcttaagccaggtaggggcagcagagtgc

SEQ ID NO: 215278 - DNA, 655 bp, Homo sapiens
tggaaatggtaaatgtagctacctgtgagtgtttagcatatgcatatattatatataaggccatggcaatagctgaatgaggatgatttttatttgttggtaaaggcattgtacagttgcaaaagagaagcagatttaaaatcagctaaacttggatagactttttactcttttaatattttgacattttagattttctttttattttgtgggcattttattttcaggccagagccacgcattttatggaaaatgtaactagaagtaaggtgctgaactgctgctacagcaccttacctgaggcacaaactttgttgcatgtgagttatataaataagtagaaactcataagtactattgtttattggatttttccagcttcaaaaattctaatgtgaattagcagtttattttctgttagatcatgatttttttttatttgtaatagtcttagctagaaatgttaaaagttagcttttgtgggcaccataatactaaaatatttactttagtgtttcttgacattcaaaaatgtcattggatttgtaattcaggtatcatatttgaaaatgagtcttttaaaagataacataaatatctttattttgacacacaaggtcaagactagaaatgtgttcctgggtactttcagcct

SEQ ID NO: 215279 - DNA, 580 bp, Homo sapiens
gctgacatgtggtggtttatttaatctatttgggccccaatatctgcatgtgtaaaagggaatgatgataatgagtattttccaaaaaatatggttgaaggattaactgtatttgagatagagtaggcctcagttcgtgtcagctattagccttagtctgtctacaggaaccagaagtttcaggttgggagaagcctggccttttagtgagaagctttcttgtggtgggacaagatgttggtgtgagaccagaaactcagcctctcaggagcagaaaaagaggggactcgatgttctgctggtgattctgagatgagtgttaacatcagatgtggctgttagtccccagaaggacaaatataaatgtttccttcatgctcttctttgtttttgtttttggtttttgttccttctgctgataaatattcttactcagaggttattactgcaaataataataaaaaatactggtaaaccaggcctctgatgtgttattgttaaaaaaaaatcaatgttttattcacagtctgagtacagacttggctttattgttctgaaagaattctgcatggcagggcag

SEQ ID NO: 215280 - DNA, 421 bp, Homo sapiens
aggcatattattctcttcaaaatttggataaagttgaatgggtcaacttaaagtctttgaatcatttggatcgatgttgctacctatgctcaaagaaaaatgagaatgggaacatatattaatttattataactgtttttctatatttctataatggaatgaaaggaaaatagcatatttcttgtagaattacaagacgccttatgtaaaactggctttgtgaaaatcacattgatttactccttgacaagttggcgtctttgaattgcataaattccttctccaacctctgtgtaagtctagagaatcaagtgacaccaagacagaatctagctaatttaagtcaatatttccttgtgaataaataaaatgctaagagttatgaagctcagctgttctcctaagctctgctgacacttga

SEQ ID NO: 215281 - DNA, 421 bp, Homo sapiens
tgcagtgagccaagatcggtcgaacactgtactccagcccagtgacagagcaagattccgtctcaaaacaaacaaacaaacaaacaaacaaaccaaaaaaaaaaggagactaactcagctcagctcagttactaacagactaactttactcagatggtaaattcatgagattaaaaaatccagtatttgacatttttccaccttccttagtactgtagttcctgtgatttaagataaaaagatggattatctactgaatttcaaaatctgcctcaaaacctaagaaaatacacctgattcttcttaaaatccacctgaacaattaacaactaaaaagtcaagaaggttctagcaagcagctagaaggaatgaaaaggaaaaaatgaggttacccaaagtacagtgatcgaccacttcctga

SEQ ID NO: 215282 - DNA, 428 bp, Homo sapiens
acatttcacccccacccactccgtttccctttgtgttcaccaagagagcagagcagttcaaggagagtagctcaccagcgaccatcttctgtacagcagtggcgcggcaagggaagcctggactggcaggagagttgagttcttaccaggcaccgccacgagcttgctgtgtgagcttggtccacttatgttgcatatctggggcacatgtgcagagcaagggtgggattagatcatctccagagtctcagaaggaaggcctcataattaaaaacatgtctgcatgtgacaaatcaagagtgtatcacatgattctctgtgtgtctagctgggtaatgacatgtattggttttatgttgataaaagtgatgtccagtatgcttcatgtggaaacttttgaaaacttcaattaatctttaaaaaattaa

SEQ ID NO: 215283 - DNA, 529 bp, Homo sapiens
gataattataaaatcacaagtattatacttttctcagagctatgtttagataaaagtttaaggaacacatcatctgtgtatgtatatttagatatttttgaaacaaagtatgtatttgataaatttaataattcatttagccattccagtatttctttgttgagtgcctagtgtttgtcaggcagtggagaagctgtgggtaattggcactctcccactgcagttagttacactctggttctttcagtctacccagcagtgtgtgctgataatgtggaagtaaatgaataaacaggaatggaatacagaaggattcttatgaacttgctcatatatgcatagcaatagaaagagtacttcctaattgcaaacttatagcacatacatctgctagaaactccttgtgctaagtacatgaattcaggcattaattccacacaaaaataaaagctaaaatcccttgtaccatgtatacaaatgagacaagtgagcttgacattcaagcttttcaattcatgcaaaactaaaa

SEQ ID NO: 215284 - DNA, 434 bp, Homo sapiens
tgttatacagtaccttgaacagaggggaagagtaaaccagcagcagaagagaagaggctttgctcagactccaaaatatcccacatcagggacattgcaatggacagaggcaaacttgccaggaggaggcagaaggggccatagagtggatactttctgcaccttctagagttgatctcagaaactcaactgaggaatcttaagcaaggtccagtgcctccatttcatcagctgcaaaatgggtaatttggtataaatcagcagttctcctgacatggggtccttggaaccttgggtgattgcataaaggggtctgtggtgttgtctgtagacttgaaaagcaacatatctcctatagatttgtactatttttcaaacgccactgttggagtaataaaaacaattcagttaaaagcttaactgaacttatagtt

SEQ ID NO: 215285 - DNA, 384 bp, Homo sapiens
caccaaatatctagggataaatccaatgaaatatatgcaagcataagtcttccacaaagaagattcaacacctacttcccttttggcagtctggaattgaggtatgtgctaagcagagtgcctacactaccagtccccaataaaagtcctgtgtgccaagtctctaatgcacttcacaagatctcaactagttgctggaggtgcaagtacccactggaagaggactcttaggcgcttacacctggtttcctccagattccaccatctgtgcttttccctttgctgattctggtttgtattcttttgctacaagagtacaactatacgttggtgcagaagcaattgtagtttttgccattacttttatgacaaaaaacataataa

SEQ ID NO: 215286 - DNA, 474 bp, Homo sapiens
cagcagcgacagcagtttcctccataccactgattcccgctgctattcgtatgtctttatcaggatttccattttgtagaaagtcttaaaaaaaagagcccccaaacaaagatgcacattccagagcctgtaagtcatcatttcaggaagattgactctaaaaattaaaattgaaaccaccacactataacctgaaagttccctgaaataaaagtcctccctccccctttttaaaaaaaaaaaaaaaaaaaaaaaaaaaaaaaaaaaaaaaaaaaaaaaaaaaaaaaaaaaaaaaaaaaaaaaaaaaaaaaaaaaaaaaaaaaaaaaaaaaaaactttttggcccctttggcccaagtgatttttaacttgggcaaattttttcattgggcccaaatttgggcccatttggccaattcccccttatggggggcggtttaaaattatgggccgggttttaccgtgggccgggccc

SEQ ID NO: 215287 - DNA, 524 bp, Homo sapiens
ttttcatatgacgtttgcatcaatattctgcgtgctgtccctcccccaccccaaccccaatctgtttttaaaaatccacctccgcagaagaggagaggagtgcttcagggaagggtggaggcatccatgtcctcacctttcccagtgaggaatcgagacttcccgccttcgcgatggaactagaaaagggtatgtagtcctggactttaaaagacaattaacagaagtggaaataaggatgtaactatattccgaggaagagcgggcaggaaattcttagctgtcgtagcagaaagtaaatgtctaaaactcataagcctaaaattagccatgcaggtacattaattaattaaccactagacaagcagaattattaatgtaggtaatgcccagtagggggaagaaaaaaggaattgattctgacctgtggcactggggctggggagagatggaaacttctgacaactttgtttatattacaagcccgtctgcaatgttgtttgagttgttgtaagcgtgtgcat

SEQ ID NO: 215288 - DNA, 410 bp, Homo sapiens
cgtcacagggatgccttcatctggtcccagctctctccctctcatagccgtgtactctgttgggagcaattggcatgaagtttggcagtggcatcctgaaccgggatgacaggaccatcagtcagcaccagcctcccgcccctcctggcctcggcctgccaaagcctcgtattcccacagctgtggctccagcctctgccctgtcacactcgcacacctgtttgccatcctgcttctggcccgccagcccaagccacagcccccaagcaggcttaaagggccgggcttgtgggaggaatcggcacaggatggtatttactcaaaatcacacaggacggtgaaacttggttaaaagaaatccttttgtagctgcttcattaaaaacaccaaagaggctgaccattcaaaaa

SEQ ID NO: 215289 - DNA, 515 bp, Homo sapiens
cagttagtctgttatatgccttggtcattttgttggccttcattcagagtatttaaaatgatgatttctgtaaaagttatcacctggttaaaagattgatggtataataatataagcagaacttttacaagatgtgaatttttagtgagcattaacatttggagtcatctatgacaaaactccacagtagcccatggtgtcctctgtgtcatttaccaagaacatgtcaactcaaattgtttttcagggttcactgaggtagtagaaaaacaagggggtagggggagatttagcttaggaaaatcaatggttagaatatgtatctttttagacaatttaataataaaaaaattcattttcagaacatgctgtagtacatagatgttggcttagacagggaagatgtttgcatttggaattcaagattaaattatttttctgtatggagagcaaaggcattgtggtaaagaataaaaagctggattaggtgaatgaattcattttccttactgatt

SEQ ID NO: 215290 - DNA, 437 bp, Homo sapiens
aattaatgaatagagcagcttggagcagctttatttgtaggtccttctgtttgaagcacaatcagtctacttattcaatgatcaggcctgggaaacttagcctgaaaaccaaaacatccatagctgagcagtttctaaacaaaaatcctaaagagagatgaattcctatctcacagcgaaaggtagctctgaaatgaagctccttgatgacatctcatacttgtaacagagatttcaaaaatctgttcatttcatctagggaacatttttctgcaaaggctggtttgagtggttatgtgatccagtatatcattctgcactacacacaatgatgggcaatgttaaaaacagatgaaaatggctgtcttccaagtccagctatgaacctccccacgggatgttgctggacagtacttcggtagcacagttattctaca

SEQ ID NO: 215291 - DNA, 360 bp, Homo sapiens
tgaactatatatggacagcctcaagtgctgaggcaaagggcgttgccgaggacattccgtctgccccagagaaaagaggagggtaactgagaactttgcactgatttctcatgaccttttttcttttggaaaagtggcatgctccataatatgaaaaaaatgtacatttgaaagactgagtgataagtgatatatcatatttattatatgttgtccaaaaagagtcacttatatacgttagtaaaaacatgatttttcttttcatgtcttttcgattcagtaaaataaatgcttagacaaaaatatagatttttttgtgattgaaaattacaaaaataaagtttatctttttttaacaag

SEQ ID NO: 215292 - DNA, 511 bp, Homo sapiens
gtgagttgagatcatgcctctgccctctagcctgggcaacacagcaagaccccgtctcaagaaaaagaaaaaaggaatgaattaataaataaaatgcatttagaagagacagaattgtcattacttgcaggtaatataattatctacatcaggggggcaacccttttctgtaaagggtcgatagttaagtagtttaggctttttgagccatagtgtctctgtcacagctccttaacaatgccattctagcatgaaagcaccaaacagtacagaaacaaatgggtatggctatcttccaataagaataggcagcaggccagatttggtctgaggttcataatttgccagcccttagcctacatagaaagtcatgatgatcaactaataagataactcagctaaatagccagattcaagttgaacatacaaaatcagtagctttcctatgtatgccagcagcaacttattttaaactgtaattaggaagaaagatttatcttgcaagacaaaa

SEQ ID NO: 215293 - DNA, 415 bp, Homo sapiens
cgtctgaaaaagaaaaaagccaacataggaatttttaaaataatatataattaccaaaaattggggaaaatagagacagggaaggcagttctataagcgagataaatctttatcttttgtatcagaaagtcaataaatattgtctgaatttgattggttatttccatttttatgaaatgtctacaataggcaaatctatagaaccagtaaagaaattaggaattcctgtggctgggactgaagagtgaaatcactgcaagtggtcaagagggatcttctgaagtgataggtgtgttctaaaattgggctgtggggatgcttgcacaactctgtaactttgctaaaattcatttcattacacatttagtgagttttatgatatgtacattacccatcaataaagctgtgttaaaaa

SEQ ID NO: 215294 - DNA, 415 bp, Homo sapiens
ttcgtcatcagcttgttatctccactcatagaatgggagcctcttgtcatctccactcagattgtcgggacctattaatacacttggctctaagaggaggagggccgtggacgaacgctaatgccggcagcgccttggtcgtttaggctcaggttaagtgcggaacttgctctatcagttactgttatttcgcgttacatcagcaaaggagatcttcaaacgctgtctgctgacaaggtggaatgggagcttctttcgttacctccacgcgtttgcatcggatcttcggggcctgttagcacacttgtgtataagtcagcagcgcgtactttggagagtgtggctgctttaggtttcacttggtttagtcacatgcggtgtgacggtcattggattaaatgttactgcacccaca

SEQ ID NO: 215295 - DNA, 295 bp, Homo sapiens
ctccagccccacaaggttggttcagctgtctgatcttcttacctatagctttgctgactttaattttcaacaaatatctgctcatgtccttctcctaaagggagtctctttaatagtccctcaatgtattaatgaaaaattccaaattccttccttcacataaacatgtaagactcttcctgacctagtccagcttgcctttacagctgatgtttctttgctcattctcactttcaaagttctacccatattgagccacatgccatcacccggagcttgccatgcactcccacct

SEQ ID NO: 215296 - DNA, 339 bp, Homo sapiens
ttattgtgttgtcatcattgtttttcttttatagattatgagactgaaacttgtgcaggttgtgacttgcccaagtttacatcaataataagtagtaaagaagttattaggaattctgttgaatcagatgaaaacaaaaatgaagtaaagttaatggtatatggaataattttgtgaaatagtattgatttgttaaatgaatcagattatgaaattattggctgtcgatttggggaaaattaaagtttgcatgtgtttacagatatccacacattccagacattatttgttagaaaagttgtttctaaagcgtatatcaataaagaaaccacattttcc

SEQ ID NO: 215297 - DNA, 309 bp, Homo sapiens
ctccagcgctgcagtgcatctcctgggtctgcccttatactccccaggcctaggtttgctgatttttccctcgctgcccataaaggtgttgtggggcccagagatggcagtgtctgctgcactcacacaagttgttgctgaatcgagtgtgtgtctgagctggaggtgcagtgaggagatctattattgccattggtttaataaagaacaaacaacacctctcgccttacagccggtcggtccccccccaccaggtgtgtagcatgacacctgagcaccctcaccaggcccaggatgggcttgtgtctg

SEQ ID NO: 215298 - DNA, 394 bp, Homo sapiens
tcttcccttattcttatatataagcagagaatttttgcaaggtatttattttttaatatgccctgaatgtcttttgctattatgtgtacattttgcatatgaaagtctaaaacgaaacttcctttactttttatactgtagtgaaaattttctattcttcccaagaatgttgtcccaaatctgaaattactggttcaatttcctgatataaacatttacaattagaagctagatagtactggcagagtctgcaaatcagaacacttaaatatatcatggcagcaaaaagaccaagggaaacaaaatgacaaatgtatttatcagaaagcaagcaatgctgactgcttgttagaaacccatctagctatcttaggtcaccagaacttcagccaac

SEQ ID NO: 215299 - DNA, 520 bp, Homo sapiens
ggttctaaattctcattctgctacttctgatcttggctaatgtatttgccccaatttattagactctgtttcctcaaatgagaaatagcataatatttacacggcagagttaagcattaaagaaaatgtgccctaagtttccaacgcacacctggtctgaaagaggtgctcagtaagccagcagttagtgccttctcctatggctgatggagtgtgtgtctccatgtggagaagaaatgtagattaatcttcctccattttctctcacttgtgtgctctccatctcttcattacttttatttttcattgcgtattctcactttctgctttctttcctattctgtatcttttcattcaaaaatgaatttattatcattcttatgtttatttagagatagtgtcttgctatgttgcccatgctgaatttgaacacctgtgctttaagtaattgatcctcccacgtcagcctcctgaatagctgggactatagacgcttaccacaacactcagctttcactca

SEQ ID NO: 215300 - DNA, 423 bp, Homo sapiens
atgaatgagaattttattatctcttggctttaaaaaaaattctgtcctttgccagatctgaaaatgctgccaacctggaagaaaaagaacccatttttctaaacaacctcatttagtaatttccatgaaattgacattttagaactatgacaaaaagccaaattaaaactcaggggttcctaatccctaaattctgagtccgttttaagaaatacctaaaatacactttaaaacgaaccaattaatataattaccgtgggtttaaataacacatacacactggatttgtttctgtaaaacacagctgttctgttatttacattttgctattttttaaattagaaatatggctttatatattgtacatatatgtaaagtaactttttaaaaagagtgaatctgttgtcttctgccatcattaca

SEQ ID NO: 215301 - DNA, 242 bp, Homo sapiens
cacagtggctcctgacatccaacttccccccaacaagaacttcctaggtaaagcagaagacgtgatacttccctgaccttcctttgtctaaatatgaaacttccatgactggggaccaacggtgagaagcggcagtgggcagggcctagccctcacctgtccctgtctacaggcccacctgacctgcaattaggtttcctcactgtcattctctcttgggccatgtcttacggcatgatact

SEQ ID NO: 215302 - DNA, 546 bp, Homo sapiens
cggtggccccagcatccagcacagagcctggggcacagcaggtgcatggtgactgggggctgggtgagtgagtgagtgaatgaatgaatgcatgaatgaaggagtgaatgcacagaggcccctgccttcctgcctccccgtcgccatgagagaaaggaagcaaaatttcaaacaactcaaagatgtatcagcctggagccgcgggaaacaccagctcccctggcagggtgcatcgacccacggtggggcgggcaggcgtccggctttgtgcaggcggaggtaggagggctcgagatggggaggggggctgcaccaacccgctcggtggcgatcaaaacgcgcccccactccctgcctgggcttcagcggccaagtgcatggggtctgccgatggaggctgcgggggctggaggggggcgaacagcttctgcagcggccaggacagaaaagctctctctcccgacacacaaaagcaggaaggccacattaagcccattatcaatattttgcctggaaaaaatacaaaaagcattttcttctctgaaa

SEQ ID NO: 215303 - DNA, 534 bp, Homo sapiens
acctttcccatctgtgggtcatattttaaaatatttattgttcaagtttaaagatataaccaaaggtataaagaaaaataccacaaacatctgatttaagaaacaaaccagccgagcgcggtggctcgtgcctgtaatcccagcactgtgggaggccgaggcaggcagatcatgaggtcaagagatcgagaccatcctggccaacatggtgaaaccccgtctctactgaaaatacaaaaattaactggtcatggtggtgtgtgcctgtagtcccagctactcgggaggctgtggcaggagaatcgcttgaacccaggaggcggaggttgtagtgagccaagattgtgccactgcattctagcctggcgacagagtgagactccgtctcaaaaagaagaaaaaaaagaaagaaatcatttcctacaccttcgaagccttcatgagttagattttgaaacagtgcaaatgcttcacgtgagaatcgagagtcccttctggtgctctccatccctgcctctatgcattttcggtagg

SEQ ID NO: 215304 - DNA, 612 bp, Homo sapiens
ctagatgcagtggctcacgcctgtaatcccagcactttgggaggctgagacgggctgatcacttgaggccaggagttcgagactagcctgggccaatgtggtgaaaccccgtctctactaaaaatacaaaaattagctggacatggtggcacatgcctgtaatcccagctactcctactcaggaggctgaggcacaagaatcacttgagcctgggaggcagaggttgcagtgagctgagatcgtgccaccatactccagcctgggcgacaaagcaagactctgctcaaaacaaacaaacaaaaaacaagtggacgtgctcttaggaactttcaggaagtctcctagaaagcgaggggaagtgttcctcctctttctttctctaccctgctgcatctccaatgccaatgtgatggctgtagctttaactatcatggaccataagaataaaggccacagcctagggatggcaaagcgatgatcagaaagagactgaagccaggcacggtaaatcatacctgtaatcccaccactttgggagaccaaggcagaggaatgcttgagcccagcaggtcaagtacagcctggacaacaagcaagaccccggctctcca

SEQ ID NO: 215305 - DNA, 246 bp, Homo sapiens
atgtaactaatatctaccagactaaaaataaatcataataaatgcccataaagatgggggtatgaaatgtgaaattgatcctagactttgcccatactgaccatgtgtttatggcactgagagaaaagtccttgaaatcagtcggccttgatttttgtcatcctgcctgtatctctgtgagtgatactattttaaggacctgtaatgaagtaaagatagtgtaatagtctatgtcataaaaagtga

SEQ ID NO: 215306 - DNA, 930 bp, Homo sapiens
gaaacttactgagtctctttgcttttcatggcaacgtagttttatgtaaaagctcaataagaatatcttctccttcttactaggatataattggatgaatcagttgtacaaccagggccttacctggagtgtcctttttgagaatgatgcttattttatcagaagtaaccagccacttttcagaagctaaagttgacgttacttatggagccaatgcatacaaagccctcctaggaaaactggctggtgtctggcttataggatcccagccttacaggaggtgaggaatattattcccgtcaggccagaaactcaagaaatttggaggaatttaagaagaaagaaattcacccaaacatatagatactatgggtgatattttttggtaagagtttctaaaagatcatttgggattccttattaaaacttctagacagaagttaactttgtaagtgattaatactatatggacctggattttgcaagccaaacttaagaataatcttcctttgaaattgttatgatcacgaaaggaaagcagacgctagggaaaaattgtgaaagactgaaatagaccgaaaggtggactggtgtcttcaatggaaaactatgccttgttttagggcacccccttccaagttttctgattctataaatgatgtgcctttcattatctttgagctcctatatagaacacttataggaatgtaaaaagttcttgtctatagaaataaaaattgtgttcagtgaatagcaattgattattgtcccatggatattaaccaattttacatctatttttacattcatttcagcattcctgattcaacgataaaagtgtagtacattgaattctcctatatagcatcttactggttcccttatgagttaattaagaagttaaataaaatctttgatgtttcatcctat

SEQ ID NO: 215307 - DNA, 576 bp, Homo sapiens
aatttcagcaagaaacattaaggacaggactgtatggaaaattaagagtagtcatgaggaagcaaggtcacacgtgggtacttctttggtgtcactgctggagcccttctatgatatcagtttcttcgaaggcacaaccatggcatgatctactacatatgtttgtacctgatggcagtcatcaaaatgccagcgcaagtacacaaggcaattcggagccaaaactgagtggggatggctgtgttatttacgtgcactaaacacagaaatgagaacaaggagttctaatctccaatctattgctgacttacttattgggaacagtcacttacacattttatgggtcagttttccttgacacataaaggtatttcaaaggttactagtaaacaaccccagcacactttccaaacagtcaaagctgtatgactttccccccttagaggatggagcatgggccaactccacattcttcactacctagcaccttgccatcatggaaggtatacgtaaatacgtttgttgttgatgaacctgagttctgggtcattcttagctttagaagtttcctgcaat

SEQ ID NO: 215308 - DNA, 423 bp, Homo sapiens
ttctggcagcttttgagctcaccggaaaaaaaaaattagactttggccaggtatggtgctcctccctgtgatcccagaactttgggaggctgaggcaggattccttgaggccaggagttcaagaccagcctggtcaacatagtgagatctagtctctatttgaaaaactttttaaataaatttaaaagttagacttttttttggctgggcacggtggctcacgtctgtaatcccagcactttgggaggccgaggtgggtggattgcctgaggtcgggcgttcgagaccagcctgaccaacatgatgaaaccctgtctctaataaaaatacaaaattagctgggcgtggtggcacatgcctgtaatcccatctacttaggaagctgaggcaggagaatcgcttgaacccaggaggcggaggctg

SEQ ID NO: 215309 - DNA, 485 bp, Homo sapiens
agcttccgacttagtgatgtcatgctagctgcttgaaattggctatggtgagagtatttacaccatggaaattggcaagtgctacaaaccagggtttccgctgcacccagagagccagttgttaaacataccagcataccactgaagaagcataagcgaaaccagtgatgagggtacgccctgcccccagtaacagggtattgttggcaagagtaaattggagtagcataaacaggggaacttaacgaaatgtccaaaagattgttttcagatacataaggagttgctatgaggttaagaactttggtgtcaaccagaaccgggcttaagacccagttctacctcaaagtgagtctacttcacgaccctaggcaggtcatttaacctttctgggccttagtttccttatctgtagcttgagaataatttaataacttgagttcttacctcatggacttctttttttgagattgagtctcactctg

SEQ ID NO: 215310 - DNA, 392 bp, Homo sapiens
cacctggccagaataggtttttaaagtgtcaggcatagtataaaactttttcttccatcttttgttcagctccaggagctcttcagttgctgtagtattttagctgtcccactgggtatacactcccaaatgtgtttgcattatggcattttaggatggaaatcggtcttatacagcactgtatctatttccttccagtccccaactgccccaccaacctagataagcaaggcctcctcgtcccccaatagcactaatcacattctaacatactgttaattacttcttatgtttattgtttatttgtctcttcctctggaatgcagcaagctcagtgaggtcaggaatgtttgtgtgtttatcagtacagcctcagcaccccgaccagtgcc

SEQ ID NO: 215311 - DNA, 209 bp, Homo sapiens
ctggactagagatttaaactttggagttgccaactttcaggtggtaattaaagccatggggctgggttacctaaagggaagcatgtagaaggctcgggattcctgtgagaattccaacatatgtagatatacatatattttgagacggagttttgttctgttgcccatgctggagtgcagtggcatgatctctgctcactgcacctctg

SEQ ID NO: 215312 - DNA, 407 bp, Homo sapiens
cagttgcaggaactgaggaggagtagaatgatagaatgatttataatatcattgtaaaaataatgttagaaagcaaaaatttttgactctaagcattttagattatatgcctgaggaatggtggtgttagaaataagggtaagaggagtaactttaggtgaggccgattctgggaccttttttttttttttaacttaaaaaaaaatgttcttcttctctcatgctgccttgtctaagatgggacaccttgaggttgaggtgatggtggagtatccagctgtgatatctgtcctagaaagttgcagatactggattaaatcttgactgaggttcaaatcagagatatagattagtaatacttagcagagaggttacagtcaaagtcattagtcaagcagtaaggcaaa

SEQ ID NO: 215313 - DNA, 466 bp, Homo sapiens
ggtggaagttttaactcaacacagggccccagctcagcctttaatatcccctgagcagtttaaacatttgaaagaccagcaaaagattatcattcagcagctaaatacccctggaaatgatgaacttccgccaaatctatcaagagcccatgactccatctccaactcagctctcctcagacattgtcttgagacaaactcaaccttaattgtcaatcagaaaatgtttaaattcacctatagcctgaaagcccccaactccactttgagttgttccacctttctggaccaaaccaatgtatttcttaaatgtatgtgattgatgtctcatgcctctctaaaatgtataaaacgaagctacgccctgaccaccctggacacatgttctcaggacttcctgagggctgtgtcatgggccatggtcactcatatttggctcagaataaatctcttcaaatattttaca

SEQ ID NO: 215314 - DNA, 234 bp, Homo sapiens
ggtggaagttttaactcaacacagggccccagctcagcctttaatatcccctgagcagtttaaacatttgaaagaccagcaaaagattatcattcagcagctaaatacccctggaaatgatgaacttccgccaaatctatcaagagcccatgactccatctccaactcagctctcctcagacattgtaagttcgtttaattgtaagatggtattttcatctctagatgtgtctt

SEQ ID NO: 215315 - DNA, 486 bp, Homo sapiens
gtcgggccgcgcgggagcccccgaggcgcagggtcccgcggcgcccggcacgacagccccggaggggggcgaccgctgccgcggctactacgacgtgatgggccagtgggacccgcccttcaactgcagctccggagcctacagcttctgctgcggcacgtgcggctaccgcttctgctgccacgacgggccgcggcgcctcgaccagagccgctgttccaactacgacacgccggcctgggtccagacaggccggccgcccgcccgcgcccgcgacaccgcagcgccccgggaccccggccgcgagcgcagccatacggccgtctacgctgtgtgcggcgtcgcagcgctgctggtgctggccggcatcggggcgcgcctgggactggagagggcgcacagcccgcgcgcgcggcgcacagtgaccagggcgctgacagagcttctgaagcagccgggcccccaggagccactgcctcccaccct

SEQ ID NO: 215316 - DNA, 416 bp, Homo sapiens
caacacagttaggtttcctagtgagtattaggaaaaaatgtataaccttcacgtcaaacccatgacttcacagcttattaacattgcaacttcagtactttagagtagcagccagtgtgtagttgatgtgcccgcatctgttgaatgtgtgtgtgagttagcgaatgagcttcctagcttcttcagcaaaatgctgtctctctctttttttttttttttttgagacggagtctcgctctgtcacccagggtggagtgcagtggcgcagtcttggctcactgcaagctccgcctggcgggttcatgccattctcctgcctcagcctcgcgagtagctgggactacaggcgcctgacaccatgcccggctaattttttgtatttttagtagagacagggtttcaccgtgttagccagg

SEQ ID NO: 215317 - DNA, 340 bp, Homo sapiens
ccagcactttgggaggcagaagcggtggatcacctgaggtcaggagtttgagaccagcctagccaacatggtgaaaccccgtctctactaaaaatacaaaaactagctgggcctagtggcacatgcctgtagtctcagctaggcaggagaatcacttgaacccgagaggtggaggttgcagtgagccgagatcatgtcactgcactccagcctaggcaacaagagtgagactcaaaaacaaaacaaaacaaacaaacaaacaaaaaaagtgcttagagcaatgcctaaaatatagtaagcactcaatacatttaagttttcttttctttttttttttttt

SEQ ID NO: 215318 - DNA, 366 bp, Homo sapiens
tctgttttggtaccagtaccatgctgttttggttactgtagccttgtagtacagtttgaagtcaggtagcatgatgtctccagctttgttctttaggcttaggattgacttggcaatgcgggctcttttttggttccatatgaactttaaagtagttttttccaattctgtgaagaaagtcattggtagcttgatgggggtggcattgaatctataaattaccttgggcagtatggccattttcatgatattgattcacttctaaaacatataccatttactaagaaatctgttaaatgttcaggtggttttgcacagttttctaggcagaatatttaaaccatatgttcagtaataggcacattt

SEQ ID NO: 215319 - DNA, 501 bp, Homo sapiens
ccgaactgctgggattataggcatgagccactgtgcctggcaggtagtttctttatctgtaaaattgtgataataatttttacttttcagggtttttggaaggattaaaaatgaattgaggtatataaaatgcctagcatatgctaagcattcaataagtggtagctatcattgtcaatattagcagctttgctatagagtgaatgtttgtgtcctcccaaattcatatattgaaatcttacaccccacagtgataggatagtggggtctttgggaggtcattagttcacctcataggtgaagctcttatgattgagattagtgcccttataaaagagaccctagagagctagcttgccccttcttccatgtaaggtgatagtgagaggttggtatctgcaacctgaaagagggccctcaccagaactcaaccactggcaccctcatgttggacttccagcctccagaactgtgagaaataaatttccattgtttataagc

SEQ ID NO: 215320 - DNA, 260 bp, Homo sapiens
aagtctctaggaaaggggcaagaacaacccaaaataccagttcagactaagaaatcgaagggtttttcatcttagtggctggggtgagaatgcgggcttcagggctggcttgatccagtgacttagcaatgtcaggagagacccggtctctgttctgccttctaccagggtggcctctttggaaacatggtcacctgtggttgccagatggtggctgtttctgtggctccatctatccctcctccctcaatcgtgtagag

SEQ ID NO: 215321 - DNA, 606 bp, Homo sapiens
catggtggctcacactataatcccagcactttgggaggccgaggcaggcagatcacctgaggccgggcgttcgaggccagcctgaccagcatggagaaaccctgtctctactaaaaatacaaaattagccaggcatggtggggcatgcctgtaatcccagctactcaggaggctgaggcaggagaatcgcttgaacccgcgaggcagaggttacagtgagctgagatagctgccattgcactccagcctgggcaacaagagcaaaactccatctaaaaaaaaaaaaagacaaagagaagtagatggactgatgcaatgttaaagaggtattaggaggacaggatcatgaaggagatggaagaattgaatttcactctgtaattctggtttgagatcctggactaatgggagtaccactcatggatatgagaaaaggtgagaaataagaagaaaggtgagagacataggataatataaattagagatatgttgagtgtagctgctaggattgcattcaagtgaatgcaagaaaatctaatgtagtggttaattcttatttagtcacacagcaaaacctgggagtgtgcaatccaggctggattctgt

SEQ ID NO: 215322 - DNA, 371 bp, Homo sapiens
cagttggaatgcagaatggtacacctactttagaatatagttaggcagtttcttacaaaaccaagcatacccttatcgtgtgatctagcaacctggctccttgagtcacatgagttgaaaataacatctacccaaaaacttgcacacaaatgtttatagtagttttgttcataattgccaaaacttggaggcaacccagatgtctttcagtaggggagtgggtaaacaaagtttggtacatccatagagtaacgaaaagtaatagtagtaaaaacaaaaaaaagctatcaagacctgaaaagacatgcaggaaccttaaatgcatattgctaagtaaaagaagccagtctcaaaatgctccacactgtatg

SEQ ID NO: 215323 - DNA, 140 bp, Homo sapiens
tgagtcacaagacataagatctctctctatggcaccaacacaatttacagcatcctcccttgacttttgggtattgtattctctgacattctaccttttcaaccacttcttctaaatctatcctaagccttagtgtcttc

SEQ ID NO: 215324 - DNA, 212 bp, Homo sapiens
gccgggcggggcgaggcgaggctgtgggcggctgctgcgctcggcttctcccgtagcccggaggaaagaaacttccgtgggaggcttccatcggtgcgcacacctcccgagggcgaggcagcgaccgggagagggagagccggccggaggctgccgggctcctgtgggaccgcgctgcagccggggaggcggagaaggggaaccggggcgag

SEQ ID NO: 215325 - DNA, 641 bp, Homo sapiens
ttcaaagtgtaaataggaatagaaaaggcttggaaggacgggagaagggggaggtattctggtttatgagtacataaataagtacttggaagcttagaagtgcctggaatatctgatgtgagttgaagcattgagtgcattaaagaataataatttgagccagagtcaaactaggcttgattcttcaggcctgatattgtttcatgccagcagaggtgggagagagagggtttctcagctcattgatgtaatgagccactgtgactaatggaaattgcgtattcttcaggtaggttggggtgaagttcaggtagttgagaaattcacagctcagagagcctgtcttccttagagagagtataaaaattgactctcagccaggcacgggtggctcacgcctgtaatcccagccctttgggaggccgaggcaggcggatcatgaggacaggagattgagaccattctggctaacatggtgaaaccccgtctctactaaaaatacaaaaaattagccgggtgtggtggcaggcgcctgtagtcccagctactctggaggctgaggcaggagaatggcgtgaacctgggaggtggaacttgcagtgagccgagatcgcgccactgcaccccagcctgggcgacag

SEQ ID NO: 215326 - DNA, 504 bp, Homo sapiens
cttcactgctgagctgccgccactgtcctccgtgcgcggagtgtcgctgaagtcactggcgtcactaaccaaggcgtgcccgcccaaggtgccctggtcctggtcgtccctatcgatgacccttcgtcaatacctcaggtctaaaatgctttcctccgagcccgagttcctcctgtcgggcaaactccgccctgtctgtgccttgctgcttggccagggcccgccgtccttcttcgccagcaagtgtgggcttccaaagacagggctgggcccggcctgggcctccctgaaggcagagaaggacgggccctgtggaggcagccccatgtcgggctgaagaggctggcctgcctgcccccctgggagacaccctttccaaaatggaagagctgggtggacagcgcggggagaagcccacaaggggtaggctgggcaggccccaggcggggccctcggaccccttgtctttcccgctcccgacgccccgcctccactccgcatctc

SEQ ID NO: 215327 - DNA, 342 bp, Homo sapiens
atactgcatgccttgttttgaactaagacatgctaacttgaatgtgcttttgtacctcaagttgaatgattctgtgagaaacaaaactttgaaaaatgcagtttctgcccacctctaggaagtaactaagtggttctagacattctttcactgagatggtgtgaatagtatgagatagtgtaggaaaaagctatgaatttgtctttcatgagttaaaaatcagtaattgtgttcactccaatgcaaatgaatttggtctcctataggaatgttaaagaaaacagtatctcaattgtattttgcttgtatgtactacattgtgtatggttgaattaaatacca

SEQ ID NO: 215328 - DNA, 755 bp, Homo sapiens
ctcaggcaggagaatcgcttgagcctgggaggtggagttgcagtgagccgagatcacgccactgcactccagcctgggtgatagagcgaaactgtctcaaaataaaaaataaaaaagaaagcaatagaactcagacttcaatgaaaggcttatatctaattatgagtccagtgctgcttccactttgcagttggtagaggagacagaatctttgagtattttttctaagactgataggtttgacgctcaggcaaagtctagagtaaaattaacattaaacatggaatgaaagcaaagcaaatgatttgaatcatgtgataacccagtgtccaaacagtgctcaatacactctgccatttttgaatgatagtaaactaatccgattgcattgcctcatttgagaaaactaaagctaagtttaaaaaaacaaaaaagtgagccaagaccacatctggcaagatcacatttatatgcaatggccagaataggcaataggcaaatccatacagacaatgcagattagtacagtttcctgatactgggggaggggaggggaagattggtgcacatctctgtgaatgtactaaaaaaccactgaattctacagtttatataagtgaattatatggtatgcgaatatgtctccataaagctggtaccaaaagaaagtgaactaatagttacagtttgaaaggtttcacatataaatttggatgccttgctatttggggaaaataaatgtgagctctggcaat

SEQ ID NO: 215329 - DNA, 316 bp, Homo sapiens
gttgtccaggcttgtctcaaactcctggcttcaagcagtcttcccacctcagctttccaaatagctaggactacaggtgtgtgccaccatgcccggataattttttttgtagagttgaggtcttgctatgttgcccaggctgctcttcaactcctggcctcaagcgatccccctgccttggcctccaaagtgctaggattacagatgtgagccaccatgatggcctgtagttttcaatgtagaagtctttcgcctccttggttaggtatattcctaagtattttattgtatttgatgctatcataatttgttttca

SEQ ID NO: 215330 - DNA, 403 bp, Homo sapiens
caggcctgggggtcgccccgctctcaggcaatatttagggaaaacccatcttcagctttcacgtgttcttctgctcccagagccgattggactgggaccggacggcccggaatggggacgcactgaccacaggcggaacccgcagcagaaatcccctctgccctcaagccagggtggcgggaaaggcggggccccgtggtccgagattcgagctgagacctcagcagaactgggtttgaaccttaaaaacgatttcctggttcttattccccgaccccaacaatttctgctcagagagcggcagaaccaaggaaccttcttgactgcccgtggatgactatttgtagacacaagtgtggcctgggactttcgcacctgcctgggagggagacctgcgcggccg

SEQ ID NO: 215331 - DNA, 588 bp, Homo sapiens
gttgaacataaagtttatatgaaaaataaacaagtaaaaaaatccaggaaaacccacaaaaaggagtatttgaggagggaaggtagacctaccagatataaaaacatattataaagtctacacattgtcaggtgcagtggctcacgcctgtaatcccagtagtttaggaggctgaggcgggtggatcacctgaggtcaggagttcgagactaccctaaccaacatggtaaaacctcgtctctatttaaaatgcaaaaaattagccaggcgtggtggtgcaaccctgtaatcccagctactcgggaagctgaggtgggagaattgcttgaaccagggaggtggaggctgcagtgagccaagatcgcaccattgcactctagcctgggttgacagagtgagaccccatctcaaaataaataaataaataaaaataaagtctacataattacaaccgtgtgattctaatgcaagaccagaggaacagaatataaataccagaaagaggttcaaacacacagggaaatttcatatatgataagtgtagcatttcaaatcactgggtagaaaagttaatagtttttaatgaat

SEQ ID NO: 215332 - DNA, 379 bp, Homo sapiens
acaccaagttgaatatatgatcccagctgtttcaggaaaaggacccccaaaccctgtgtatagaaaaagattataaagggctgggcacggtggcccacacctttaatcccagcactttgggaggccgaggcgtgtggatcatgaggtcaagagatggagaccatcctggccaaccaacatagtaaaaccccgtctctactaaaaatacaaaaattagctgggcatagtggcacacgcctatagctactcaggaggctgaggcagaagaatcgcttgaaccggggaggtggaggttgcagtgagccgagatcgagccactgcatccagcccaggcaacagagcaagactctgtctcaaaaaacaaacaaacaaacaaaaa

SEQ ID NO: 215333 - DNA, 719 bp, Homo sapiens
agtatacatgaaacaatgttggttatgagttgataattgttgaagctggataataggtatgtgaaagtttataccattctctctacttttgtatatgtttgaaatttttcattataaaaagtaaagcttccattcttcgcgatgatgaagtaacaggaaccatatttactgtctcactggaaaccactaaaagatgtgagtatgtcaaatagaggttttcagacattggacaacaggcagcacaggacagtgatccttgagagaaggggtagaaaacaaagtgagccctatgattgcctcatcttactgcttggaaagagtttccacaccacaatgcacgtagcatgacagaataacactacagatcctatagacattaaaggatattaagagaatatgattaaaaacctcatgccaataaatttgacaactttgatgaaatggacacatttcttaacactaaactaccaaaggtcactcgagaagataataggtgactagactaaccttatatttatttaaaaaatttaatttctcattaaaaactttaccactaagagaacttcagtcccaaaatcttcactggttaattctaccaagcatttataaaataatcccagctgagtgtagtgcctcacactgtaatcccggcactttgggaggccgaggcaggtggagcccttgagtcaggagttcaagaccagtctgggcaacgtggc

SEQ ID NO: 215334 - DNA, 444 bp, Homo sapiens
gtttcagaaaacaatagggccgctcccagctgggacgtgagtctctggattaggcaggcagaggcagttatgggcttctgcagtggcgagaaaggaagcgcctgaagggtcgtgaggctggggcgggacccggcaccgctggggcggccaggccgtgaggacgccaatggctagttccccatgccctcagccatgggggaatctgtcccgggccgctgaggggctcccctgcccctcctgggagcttacctgggacccacctcggcgacggagaccgcagcagctggagaggaaggggtgaggcgtgggatcgccaggagtagggaggacatcgacgatgtgcccgtagcagtcgcccctccctcctcgcgcacggggtactgaggcggaaggtttgaaggttacggctcagggctgccccattaaagtcagtgttgtgttcta

SEQ ID NO: 215335 - DNA, 1585 bp, Homo sapiens
gtttcagaaaacaatagggccgctcccagctgggacgtgagtctctggattaggcaggcagaggcagttatgggcttctgcagtggcgagaaaggaagcgcctgaagggtcgtgaggctggggcgggacccggcaccgctggggcggccaggccgtgaggacgccaatggcgagcagcgtggacgaggaggcgctgcaccagctgtacctgtgggtagacaacatccctctgtcccggcccaagcgaaacctctcccgggactttagcgatggagtccttgttgcagaggtcatcaagttttacttccccaagatggtggagatgcacaattatgtccccgccaactctctccagcagaagctcagcaactggggtcatctgaacaggaaggtactgaagaggctgaacttttcagtaccggatgacgtgatgcgcaagatcgcgcagtgcgccccaggcgtggtggagctggtgctcatcccgctgaggcagcgcctggaggagaggcagaggcgcaggaagcagggcgccggctccttacaggagctggctccccaggatggcagtggctacatggatgtgggtgtatcccagaaggcccgaggtgaaggtgtcccggacccccagggagggggtcagctcagctgggaccggccgccggcgcctcggcctccagcgtataaccgggcgttgcagggcgaccccagcttcgtcctccagatcgctgaaaaggagcaggagctgttggcctctcaagagaccgtgcaggtcctgcagatgaaggtaaggcgcctggagcacctgctccagctcaagaatgtgcggatcgaagacctctcccggcggctccagcaggcggagcgtaagcagcggtgagcggcggcccgggccgcgcggggacgcccgggtacccgccagagccccgacgccgcgccggacccacccaccgatggatagaccattgggagggcggagcccgctgctctcacgagcctgctggggcccgagtgccctccttccttgggatgggtgagcgtgggaggagatgggacaggaactctaggagcgcaggcccgggactgagccgcctcctaccactccggagatccgggtcaggagaatggaccgctttccagagcccagaagccacgtgcagagacctagcctgtcccccaaagcagtgtccaacaccttgggcccggccttgcatctcccggcgctgggccttggggggcggtcccttggctctgtccacacccccagaatcaggtccccgcccagctccgaggacggcggcgtctccatccaggctagttccccatgccctcagccatgggggaatctgtcccgggccgctgaggggctcccctgcccctcctgggagcttacctgggacccacctcggcgacggagaccgcagcagctggagaggaaggggtgaggcgtgggatcgccaggagtagggaggacatcgacgatgtgcccgtagcagtcgcccctccctcctcgcgcacggggtactgaggcggaaggtttgaaggttacggctcagggctgccccattaaagtcagtgttgtgttcta

SEQ ID NO: 215336 - DNA, 1729 bp, Homo sapiens
gtttcagaaaacaatagggccgctcccagctgggacgtgagtctctggattaggcaggcagaggcagttatgggcttctgcagtggcgagaaaggaagcgcctgaagggtcgtgaggctggggcgggacccggcaccgctggggcggccaggccgtgaggacgccaatggcgagcagcgtggacgaggaggcgctgcaccagctgtacctgtgggtagacaacatccctctgtcccggcccaagcgaaacctctcccgggactttagcgatggagtccttgttgcagaggtcatcaagttttacttccccaagatggtggagatgcacaattatgtccccgccaactctctccagcagaagctcagcaactggggtcatctgaacaggaaggtactgaagaggctgaacttttcagtaccggatgacgtgatgcgcaagatcgcgcagtgcgccccaggcgtggtggagctggtgctcatcccgctgaggcagcgcctggaggagaggcagaggcgcaggaagcagggcgccggctccttacaggagctggctccccaggatggcagtggctacatggatgtgggtaaggtggccttttccatttctccctcccggttggagctttccttctgtccttcttcctgtcacttgtaagagtggaagtagggagggggaagcaggagaatgagactccagcacagtcattcctccacttgccttgtctcaggtgtatcccagaaggcccgaggtgaaggtgtcccggacccccagggagggggtcagctcagctgggaccggccgccggcgcctcggcctccagcgtataaccgggcgttgcagggcgaccccagcttcgtcctccagatcgctgaaaaggagcaggagctgttggcctctcaagagaccgtgcaggtcctgcagatgaaggtaaggcgcctggagcacctgctccagctcaagaatgtgcggatcgaagacctctcccggcggctccagcaggcggagcgtaagcagcggtgagcggcggcccgggccgcgcggggacgcccgggtacccgccagagccccgacgccgcgccggacccacccaccgatggatagaccattgggagggcggagcccgctgctctcacgagcctgctggggcccgagtgccctccttccttgggatgggtgagcgtgggaggagatgggacaggaactctaggagcgcaggcccgggactgagccgcctcctaccactccggagatccgggtcaggagaatggaccgctttccagagcccagaagccacgtgcagagacctagcctgtcccccaaagcagtgtccaacaccttgggcccggccttgcatctcccggcgctgggccttggggggcggtcccttggctctgtccacacccccagaatcaggtccccgcccagctccgaggacggcggcgtctccatccaggctagttccccatgccctcagccatgggggaatctgtcccgggccgctgaggggctcccctgcccctcctgggagcttacctgggacccacctcggcgacggagaccgcagcagctggagaggaaggggtgaggcgtgggatcgccaggagtagggaggacatcgacgatgtgcccgtagcagtcgcccctccctcctcgcgcacggggtactgaggcggaaggtttgaaggttacggctcagggctgccccattaaagtcagtgttgtgttcta

SEQ ID NO: 215337 - DNA, 643 bp, Homo sapiens
aactactctcttttaaacaggaccctccacttttccaccagtttgtccaccggtgaaaaggagaagccagccaagaaccagcagcttctggctaccttgatcagaaggttgatgaaggcaatgaaacaaagatggaaaaacacatcacacaggcccttaccagatgccagcatcttgatattggacttcccagccttcagaactcaattacaaagatatgctaatgctctgcaccaagtggcagctacatgcttgagaccaacactgaaaatcagtcatggaatcactgcatatctgaacaagggccacgagaggaggcacagatgggtcaactgacttgagcagagccacccagcaaattcagcgtcggagtatgcttcccttgcctgagaatcgttacaaagaggagcatctgatgaggaaatgagaactccagccagaaaccagcaataaattgagggctcctatatgagcaatgcattctccagccccaatcaagcctttggataactgcagctcctgccagcattttgactgcacttcatgaaacactttgagtcagagccacctacctaagccactccaaaattcctgaccgtcaaaaactttgagataataaatgcttgttgttttaaactactac

SEQ ID NO: 215338 - DNA, 497 bp, Homo sapiens
aactactctcttttaaacaggaccctccacttttccaccagtttgtccaccggtgaaaaggagaagccagccaagaaccagcagcttctggctaccttgatcagaaggttgatgaaggcaatgaaacaaagatggaaaaacacatcacacaggcccttaccagatgccagcatcttgatattggacttcccagccttcagaactataaggctccagtcaagcaacccaccttatcaagtggaccaggcacagctcctacttatccctgagtagtgggtatcagtttcctgctaacctcggaattgttcaaagcccatcacattctcctgcaggaaccagggagcacctcaccctcttgttgctacaaagcttgccacccacagcccctgcctgttcaccctgctcctgagggcaacccctgtatggccagcatcccatgctgtgttcacctctcccaagctgcgagtgtatgtgaataataactgccgtcaatcgca

SEQ ID NO: 215339 - DNA, 2166 bp, Homo sapiens
aaatgtttaaaagttagctatatttatacaaggaaaaccaaaagaaatacttaaatgagacttttaaaattcgaggctctccactgagacttgttccctggcgccacgccgggagttccgcagagcctcgccccctgccagggcgcccgggggcaaggaccgcacgggcatgccgctcctccagcagtccctttccccttcttccccaagatccagcgcgtgctcggttgcccttctccgttccttgcaggcccttgggtcaggacccaccacctgccggaccatcattttccgagtccctccggcctagtcggagtgctcgctcgcgcctcctaaagctctcagccgagcgcgccgagacccctcagggcggccgcaattaatggatgcctcgaagttgacgtacatatatattcagaaatgttttgccacctgagacctatgaggaggttatgtctagagaagatatttccacactggtttcccttttcaagagctttatcgggagctgaagcagtcaatgccttgaggcctttctattttgcagtacatccagatttctttggacagcaccccgtagaaagggatgatacatggaagagttttcaatgccctagtgatttttccttatgatgcatgctgctggaccactcccctacaacatcagttacatgtgtgctccaggaatacaaactgatatgaaaaatgacttatggtagatgtagttaagacagtcaatatattttaacattagaaaatacagtcagtccttcatatccatgggttttacatccatggattcaaccaacctcagactgaaaatattaggggaaaaaaatacatctgtactacacatgaacaaacttctctttcttgtcattattccctgaacaacacaggataacaactacttacatagcacttacattatattagatattataagtaatctagaaatgacttaaagtatatgggaggatacacataggttatttgcaaatactacactattttatatgagagacttgagcattcgcagatttcggtatccacgggaggtcctggaaccaatcccctatggataccaagggactgctatgtattacaaagccacatgctttggaattacttcagtgttccttctattttcattaacactgatatctagtttaatatgaaaaggaacttgaaatcttgaaaattagaacatcgttatttttttctacttgcaatggaaaatctattttgcttttttgcttctaggaaaatattctgattatgatatgtgatatgttggctactcaaagtcagaacttttcaaagtaatcagtaaattgaatcaacagaaaaatattcattaactcggggatgcattaataaagtttttaaattcaaaatgtatagaaaaatcaagcttagtaatactttaatattattctaccaatgtattttttttaattaagacttctgtatgcagcagggcatggtggcacacctgtagtcccagctactagggaggctgaggcaggaggattacttgagcccaggaattcaagcctgggcaacatagtgagtcctcatctcctaaatttaaaaaacaaacaacaaaaatttctacgtgtggtaaagggttaactcagcaagcttgggttgcttaaaccttgcacattccaaagaaaggtctgaccccagtgctgacctttgactggctactgggaaatgagctctgagcccctggataggaatgtttctgtttgcctgaggcctttgaccatgccagatagtttatgctaacaatgtgatttatagtgaatacctgttttcctgtgtctaagaccctgggctgcactgtattaatttgaccttgggtatttggggagctgagactgagtagctgaagtgagtcacataagcactaaatgcttacctgactgacccccagtaaaactctggacatccagacttggatgagcttccttgggtggcaacacttttacgtattgtcacacaccattgctggggggattaagcactgtctgtaaaactccactgtgaaatgacaactggaaacttgcacgtggtctctcctgattctgctctattcaccttttccctttgctgattttaatctctattcttttgttgtaataaaccataatggtgaat

SEQ ID NO: 215340 - DNA, 1060 bp, Homo sapiens
  misc_feature (604)..(604): n is a, c, g, or t
aaatgtttaaaagttagctatatttatacaaggaaaaccaaaagaaatacttaaatgagacttttaaaattcgaggctctccactgagacttgttccctggcgccacgccgggagttccgcagagcctcgccccctgccagggcgcccgggggcaaggaccgcacgggcatgccgctcctccagcagtccctttccccttcttccccaagatccagcgcgtgctcggttgcccttctccgttccttgcaggcccttgggtcaggacccaccacctgccggaccatcattttccgagtccctccggcctagtcggagtgctcgctcgcgcctcctaaagctctcagccgagcgcgccgagacccctcagggcggccgcaattaatggatgcctcgaagttgacgtacatatatattcagaaatgttttgccacctgagacctatgaggaggttatgtctagagaagatatttccacactggtttcccttttcaagagctttatcgggagctgaagcagtcaatgccttgaggcctttctattttgcagtacatccagatttctttggacagcaccccgtagaaagggaaatcaatgaaaattctnttaaaaggttaagtgtctacctagaaaacctccagaaaccaggcttcaagtctttgaaaccaactcagcttacattttatgtaagagaaacagaccagagttcctccgatggccaggaaccttttagtacttccgtttatctgttgaacatatccaaagcttgaatactaatatgcatacccagcctctcaaagaagctaaaaggatgcatgacaggcccatcaaatgggacaagtcttattactcctttactggattcaaggaccctgactgaaagaccttgaacaagtctcgagagtggaaacaattctcacatcctggttagagtagcatgtggaaaagtggctgttaaagctaaagaacgtgttgccctttgaaaagaagctagatcgcttaaagatgtaccgtcttcatcattgcacctcacattccggtggccaagacctgggattgccc

SEQ ID NO: 215341 - DNA, 466 bp, Homo sapiens
cttgaacactgaagggggaaccatgtgagaatggtcctgtgagaatggttagtttttgatatattaattctctcaacaaaccatttgaatacttaatatggtccaaactctgggctaggagctggaacagcaaagacgaaccaggacaaaaatccctgactcatggagttcttcagtttaattatgagacagacacatgagcagatagttaagatatgtgataagatggagatagaacacagaagcgaggcgtctaaccaaggagaggtgtcagaaaaaagctcttcctagagcaatctagggttggatctaagagccacctgagtaaaggcatggaggcaaaaaatagcacaattgatgcagagaaatataagaagttgagtgttacctcatttattcaacaaataatctgtgtaatgcctgtcatgtgccaggcactattccaggctcttgaaaaatactagtg

SEQ ID NO: 215342 - DNA, 404 bp, Homo sapiens
gatgggaggactacttgaggccaggagtttgagacaagtctgggcaacatagtgagactccgtctctgcaaaaaaataataataataattagctgggcatggtgatacatacctcctagctactagggcagctgaagtggaaggattgcttgagcccaggaggttgaggctgcagtaagctacaatcacaccactatactccagcctgggcgagagagcaaagccctgtctcaaaaacgaaaagaaagtttgttatactcacagatcctcagagaaggagcacaccatgcaggaccaagcagagaagcaacagggtcaagcaggaagagaaggaaaatgtgggcaagaggcttgattgtggtttccatgggacggaatgggtgaggcagagtaaacagctcgag

SEQ ID NO: 215343 - DNA, 469 bp, Homo sapiens
gagtccatggcagagcatggaagacttactagctcatggcattaagggaaacttctgactaatcattggctgacaactaagctaaccaagcagagatttcagtggctacacaattcagcatcctgtaggataccactaaacatagtcaaatataaatgagcatgccagagacagatgagagagataaggatagagagaatgtttgaacatatcatgtctaaaaattttgaaatctgacagaaaattcgatggcttttatctatacatataagattctcaacaaactccattaggatgaaatcaaagatattcaaacctagacatatcatggttttatttacagacactatgctaattcatataaaaatctatgaaatctacaaaaaaaactactaaaactaataactgtattctgcagctctactgaactcagtgtcgacgcggccgcgaatttagtagtagtaggcgg

SEQ ID NO: 215344 - DNA, 129 bp, Homo sapiens
agtagaccatggtctggagccccaagaagaggttaaagatgtaaatttgggatgatgtgcttatttagccccttttaaatgaattttatattctgtggttaaaaagaatctttgatttgttaatttaat

SEQ ID NO: 215345 - DNA, 329 bp, Homo sapiens
gcagatccacatcttcccctcaggaaatgcctggtgcagatgaccacaggttgttggaaggcagagactggcttcaggaagagccttgactgggctgtttcagtagtccagggagatggtgagaagggcccctgttgcagccacaggacagggagtgtgaacctgcaaacactggtggctgagtggatagagggtagaaagagcatgatcgaaggaccgggatgatcatgcctgggacgaagctagtgctgtggggtttccacatgcggatggcaaggaactatcagaaatgtggacgcgaggctagggagagagaccaggagtagagg

SEQ ID NO: 215346 - DNA, 463 bp, Homo sapiens
tggtggacacctataatcccagctactcgggaggctgaggcaggagaatcgcttgaacctaggaggcggaggttgcagtgagccgagatcgtgccattgcactccagcctgggcaacaggagcaaaactccatctcaaaataaataaataaataataaaaaaaaataaataaataaaattaaataaaagccatacacagccagtggtgagaatgtgtcatctatgaggtataatcactatgggcactggagtggagggaggtagataatgctgaaatttctcttttaacttggacactggataactcacgaatcctcttttgggaagcatacatgtactatacagcctcaaacgtgtttaggatgaatgattccagaagctgaaaggtcttgtaaataatgcctatgtaggctttaaatcatggcttatgcgagatggaccatgatggggattcaagacctta

SEQ ID NO: 215347 - DNA, 527 bp, Homo sapiens
ctgaacctgggaggtggagcttgcagtgagccgagatcgcgccactgcactccagcctgggcgacagagcgagactctgtctcagaaaagaaaagaaaagaagagaagagaagaaaagaaaaaatcctgaagcaaatggagcaaattttgaacagcttgaatacctgagacaggccaggggtgcggggcaggtggatcactaggtcaggagtttgagaccatcctggccaacatggagacacctcatctctactaaaaatacaaaaattatctgggcgtggcggtgggcgcctgtaatcccagctacttgtgaggctgaagcaggagaatcgcttgaactcgggaagtggaggttgcagtgagctgaaatcgcaccactgcactccagcctgggcaacagggcgagattccgtctcaaaaaaaaaagaagcatgtttcctagcaagccaattcagaataaaaagaaaacaaaggagaaaatataatcccaataaaatatattgaaataaatatgtacacacatatat

SEQ ID NO: 215348 - DNA, 493 bp, Homo sapiens
atataggtggggaaacaaaataagtaagatctttatcccgaagataatagcaaatattaaagatactgagacaagagaagacatgaagggagtggattgtaacaagaaaggcctttgggaaaaggggtggataggagagaaactgaagaaataattattgtgcttttgtgagaatgggggtgtatcagaactttctctactttctattcagttttgctgtgaactgctctaaaatagtttattaatttaaaagaaactaaaacaaattttaaaaattaagggggattaactttgtcagtggttgcttaatacctattcttacgtatcgtaaagtttttattgctattgtaagttatattttaaaaatttggttattgaagtacagtttgtttttatataatgattttgtattcattttttacttctaataagttcataggttctcctaaatattctgtgtaattaatcgtagagtctgcaatggatgacaaga

SEQ ID NO: 215349 - DNA, 584 bp, Homo sapiens
ggtgaaagaatgaaagctttctctttatgatcaggaacaaggcaaacctgactctttcaccacttgcattcaacatagtactggaaggcctagcaaaggaaattaggcaagaaaaagaaaaggcactcagattggaaaagaagaagtgaaattatctttctttgcagatgatatgctcttacatgtagaaaaccctaaagattccacacaaaatactgtaagaaataataaatgaattcagcaaagtaggaggccacaaagtcaacacaaaaaaatcagttacatttccataccctaacaataaatgatatgaaaagcaaattacaaaaacaattccatttaaatagcatcaaaaagaataaaatacctaggcattaaattaaccaaggaggtggaaacatttgtataatggatactacaaaacattgctgaaagacattaaaaacatgaagaaatggaaacatatctcatgttaatggattagaagacttaatattcttaagatgtcaataccactcaaggcaatctacagagtcgatgcactccctatcaaaatcccaatgaaattctttgcagaaatagca

SEQ ID NO: 215350 - DNA, 480 bp, Homo sapiens
catcgtggctcgcacctgtaatcccagcattttgggaggccagagtgggagaattgcttgaggccaggagttggagaccaacctgagcaacatagtgagatcttgtctctacaaaaacaattactaaaattagctggttgtggtggcatgtacctgtaggcctgtagtcctagctacttgggaggctgaggtgggaggatcacttgagcccaggagcttgtggctgtagtgagttatgattgtgccattgtactccagcctgggcaacagaggcaaccttttctctaaaataagtaggtagatagatagaaaacttttcagatgcaggaactgaatctacagttcctaaaatttctaattgctaatatcattgttaatacaaattttcccacatagttcaataaatgttgttgaattattcagttttgtattaacttgtggtatattttttttcttgtttttcaggaaataatttgccag

SEQ ID NO: 215351 - DNA, 253 bp, Homo sapiens
ggtgttctttgtagcgacagggttttgcgatgttgcccaggccagtcttgaattcctgggctcaagctgtgtgcctgctgggcctctcaaagtactgggattacaggcatgagccactgcacctagcccagatactttcttttttaaaaagcatatcatggaaattttcagacatgaagaaagtaatagattttaaaaaatctattagtaattttttttttaacctatagccctgcccttctgtcgtcttctc

SEQ ID NO: 215352 - DNA, 423 bp, Homo sapiens
ggcccctgtacctgccgctcccacccaggttcccaggggtgttccagtgggggacgcaacctgcgggctactcgctgggcatcaggtccagatcccagagacaggtccagtggctgtggcccaggcctccttccccaccacagacaggccaggctcagcatcaaacttcctagggaaagaatttggaattgaaaaagtagcaaaatcacaactttgtgggacttttcttatgcatattttgcagtttggcattgtttgtaattacgtatttataatttcagtattttgagataccagcgagcttaatcaggctaaaataattctcagaatttgctttctaagggctgccaaacacaagaggcctttgaaaaaaggatccttttcaaaagaacgttctcacaataaaaattcctggcccaattg

SEQ ID NO: 215353 - DNA, 417 bp, Homo sapiens
tgcagtggctcacgcatacgatcccagcactctgggaggccaaagcaggcagattacttgagcccaggagtttgagaccagcctgggcaacacagtgaaacccgatctctatcaagaaaaaaacgccagatgtggtggtggtacatgcgtcacttgagcctgggtggtagagagtgcaatgagctgcgaacacctaagcgcacttcagcgtgggctacaaagcaaaagaccctttctcaaaaacataaaacaaaataaaataaaataaaaatggctctaagtcagaggagccacaggtaagttcacaaaatttagaagccttggctgggcgtggtggctcatacttgtaatcccagcactttgggaggccggggcaggcggatcacctgaggccaggagttagagaccagcctggct

SEQ ID NO: 215354 - DNA, 578 bp, Homo sapiens
caggaagaacagagcaataaatcctgtgtgattatttttaaaagaaaaataattcctctgatagaactgtgtgtacataaatctcacctggaagtcaccaaaattaaggggcactttcagcatatctagtgatgttgctactgtatatttaaagaactatacagtatttccttaaagactatctctaccctgatcaaaagcactgtctgcaaatctgcttctctccctgctgtattaaatgacttggatctcagctaacttcattctaacaaccttaaaactgagatgttcatagacactgagggttagcagaggattgtggtcatgttatgttagaggtatgcattctgtacagtgttgataggttagtcattataacctaaatggaaataaaacctaaagcaaaagagagcaaaaatggaaataaaacattttattatccagaaaagagacaatgggaaaaaaacaaagaatgaggatggtaagtagaaaacacaagagggtagggatgtgtcacaacaaacttaaatgggttgagcttgcctattacaggacagagactatcggtttagattaaa

SEQ ID NO: 215355 - DNA, 510 bp, Homo sapiens
tttgtttccaattcaaagcctttcctttcctcacattgtcatgcctcttccatctgctactcctccttcagctatcccctctttttgctctgtcactgagggcattcgacattttcaaggtggaaagatcaattgggtcttatgttcacatatactccagactcctggagacctttgttgggctttcctgccatgcactacttggatggcagctctgggtttggcccagtttcatgcagctctgcattcaactgagggatgagatgtcacctcttcttctcataggaaccctacactctctagggagctttcttggagcacccttcatgtggcttggggcagggggtcgagactccttcccctctcctgtggctcagctccccaactttttgacatcattgtacacactggatatgacaatatttagaaggcaagttagggtaaaaagataaggctacttgaggctgttgggtgcagtggttgggcaatcaaggccctgggtggcctgcc

SEQ ID NO: 215356 - DNA, 448 bp, Homo sapiens
gacggggccccaggaggtgaggggggcaggtggggggcactggttcagacccatgtctgacccctgctcagccccttgctggttatgaggggcccagatgagctgcttctcctcggtcccaagtccccctctccctggtgagtggtggccccacacactcctcctgctcagcacagaatctgcctccagctcttttacacaggaattcatctcaggcatttggggggcctctctgccgttacacatagttaagagatgggtacattaatcaaatcaaggaaaggcatttttccttggttgaaaataattattacggctgggcgcagtggttcacgtctgtaatcctagcgctttgggaggctgaggcgggaggactgcttgaggccaagagttcaagacgaacctagcctacatagcgagagaccctgtctctgaacataaaaaaaaa

SEQ ID NO: 215357 - DNA, 129 bp, Homo sapiens
caatttgccctcacaaagcactccatctggtgagaaaaacaggtatattagcaaatacaatatagcatattaagtgctctgggcacagagaggaggaacatctaataaactttggaaggggtgagtaaa

SEQ ID NO: 215358 - DNA, 303 bp, Homo sapiens
cctgcattttttccagaaaaggccactggtctgagcattcagggccccaccatcatcccacagtgagattggtggctctcagaggttggtgacaagtctctcaagatacagggccttcagagctgcatctgcgtggtggccttttcctgatccttctccctcagggttttaggccctggttcacccaggcctctgctaagctcccgcactttcttgccagaggtgtcttaaagggaaaaacctctcttttgtcgctcctgtcccttctttctttcttccccctcctcattcccctcctccttc

SEQ ID NO: 215359 - DNA, 753 bp, Homo sapiens
gctttggtaacaggatgatgctggcctcataaaatgagttagggaggattccctctttttctactgattggaatagtttcagaaggaatggtaccagttcctccttgtacctctggtagaattcggctgtgaatccatctggtccttgactttttttgattgaaattagttgataacgtcttccaggagacctacggccatcctactgatatgaaccagatcatacctgccctgatgggatgccagagaaagactgctgcaaggtacgcgccactcacagacctctccatttatctcactgatgcaaaggaccctgagggatcctctggaaacagaacagagggaagaagataccttccctgaagcccagatgttccagaagcctgcgcctcattcacaaagtcaccccaaaaatgccctagagtttggagttttgaagaagcgggaagaaggcctgagtaagggcctgggaaccaagttagatcctacttcagcatcagcacatgccagcgatggtgcacacaggtggagagcggcctgcccgtcttttccatggtgcccacagacccatttaggatgaaagatcagaaaattctctccatgtcaccgcttctgaaacatgtgaatattaatatttggtgcctaaaaggccatggcaaattttcattggttttatcttattcatgattatagagttgaaagaatacatattcccatggggatcaatgaagacattctcattttgaatgaagt

SEQ ID NO: 215360 - DNA, 698 bp, Homo sapiens
gctttggtaacaggatgatgctggcctcataaaatgagttagggaggattccctctttttctactgattggaatagtttcagaaggaatggtaccagttcctccttgtacctctggtagaattcggctgtgaatccatctggtccttgactttttttgattgaaattagttgataacgtcttccaggagacctacggccatcctactgatatgaaccagatcatacctgccctgatgggatgccagagaaagactgctgcaagggatcctctggaaacagaacagagggaagaagataccttccctgaagcccagatgttccagaagcctgcgcctcattcacaaagtcaccccaaaaatgccctagagtttggagttttgaagaagcgggaagaaggcctgagtaagggcctgggaaccaagttagatcctacttcagcatcagcacatgccagcgatggtgcacacaggtggagagcggcctgcccgtcttttccatggtgcccacagacccatttaggatgaaagatcagaaaattctctccatgtcaccgcttctgaaacatgtgaatattaatatttggtgcctaaaaggccatggcaaattttcattggttttatcttattcatgattatagagttgaaagaatacatattcccatggggatcaatgaagacattctcattttgaatgaagt

SEQ ID NO: 215361 - DNA, 571 bp, Homo sapiens
agaaagatttcactctgtgagacgaatgcacatatcacaaagaagttctcaggttgcttctcttgagcttttatgtgaagttatttccttttctaccattgaccgcaaagtgctccaaatgtccaactgcagattctactaagagtgtttccaaactgctcaatcaaaagaaagattcaactctgtgagatgaacctgcacattccaaagaagtttctcagagttcttctgtctagtttttatgtgaaaatatttccttttccaccgtaggcctcaaagcactaaaaatgtgcatttgtagattctataaaaagagagtttcaaaactgatcaatgaaaagaaaggtttcctctttgagatgaatgcacatataacaaaaaatttatcagattgcttctgtctagattttatgtgaagatgtttccttttctaccataagccacaaagcgctccaaatgtccacttgcagattcttgaaaaagagtgtttccaacagctcaatcaaaagaaaagttcaactctgtgagatgaatgaacacatcacaaacaatttctcagaatgcttctgtc

SEQ ID NO: 215362 - DNA, 264 bp, Homo sapiens
ttattttaaccttggcaaaataaacctctaaattgattgagacttgcctcagataccttttggtttacaagggtgaggtgagtcactgggcagttttattgagactgagaatttggtggttcttggggttccaaaatccataaagactttttttagacctatgtctacagaaatagccaccctcttctaggttttgggtgaaagcagcccttcctggtggaaaagaatttcagcagtagcaaattgtttcttaacatggtaaaa

SEQ ID NO: 215363 - DNA, 458 bp, Homo sapiens
agatgaagccggcccactggggtaggggaaactgaggaaagatgacattgtgctctggcacaggctgcagcgacatccaactgtgctttgctggattttcaagagccaccctggagtctgtcacaagtgtcttacaaggcacagccctgtgccccactcccgccagtgagcctggtgttggagcaagttaaatcacctcttcacgtgcaggattcaggtgaggagggcaggagaaaaagggacctgtaggtccgcagataagagctcatttccttccgtctgtcacacagaaaggatgttcaccaacaaagctgccgttgtgggtcttcatggtgtagtccataaaatgtcaagaagcaatttctaagaatttcagagcaccaactcaacttgggctagtagagaacctctgacttccatcagcgtgcagtggcacctcgttctgaagaaatgcagcc

SEQ ID NO: 215364 - DNA, 122 bp, Homo sapiens
aagagagagaatgaggtgtgaggtgccacacacttttaaatgacaagatctcaagggaattctatcacaatgacagcaccagtccatgagacatctgcccccatgatctatacacccaccag

SEQ ID NO: 215365 - DNA, 427 bp, Homo sapiens
caaaaaacatataaaaaccagaatgacccaatacaaacagtcattgctaataccaggaaactgatgttgatacagtactgttaactcaggtatagattttatttcagggtgatatttcacaggctgaaaagcactactaatgaggacaggaattcctcagtcttgcttggtccatgcacccatttaacatgggatattttaaaagcagtgctgcatgccggggaccatggatggtagagcttaaagaactactttgtttaataaaacctatcccagactgggtgcggtggctcacaggtgtaatcccaggactttgggaggccagggcgggtggttcacttgaggtcaggagttggagaccagcctggccaacatgatgaaaccctgtctctaccaaaaatataaaaaattaaccgggtgtgcttgc

SEQ ID NO: 215366 - DNA, 598 bp, Homo sapiens
tgcgatgttgaggtcccccactattattgtgtggttatctaagttacctcataggtatgtaagaacttgttttatgaatataggtgatccagtgtctgactgtattgtgaaattcttatagtgagttatttagctctatcagatcagtttggttgagctcttgtttcattttattggattccttagattccttggattgggtttcaactttctcctgaatctcaatgatctttgttactatccagatactgaattcaatgtctgtcttttcagccatttcagcctggttaagaaccattgctgaagagctagtgtgattgtttggaggtaagaagacactctgactttttgagttgccagagttcttgagctggttatttctcatctgtgtgggctgatgttcctttagtatttgacattgctgtccttcggatggggtttttttgcttttgtattcttcagtgcccttgagggtttgacccagttgactggctttgttcctggattatttcagggtgccaagactcagctcaccactcctaggctgtgtgctctaaccctggagggttggtaccaagcctacagctttactctctgg

SEQ ID NO: 215367 - DNA, 241 bp, Homo sapiens
acatccttaacgggcttatgagtaagctctttctttctctttctctctttctttctctttctttctttctttctttctttctttctttctttctttctttctttctttctctttctttgtatctctctctctctccttttctctgtctctctttctttctttctttcttttcttcagagtcatgctctattgcccaggctggagtgcagcagcgtgatctcggctcattgcaacacggtct

SEQ ID NO: 215368 - DNA, 468 bp, Homo sapiens
ttgaaaaggcagataagactagttatttgaccaaatactttaaatttaagatgcttatttgatactaaaatggaaacgttaagaaggcaattggagaagcccagcatttaggcattaaaggtgagaggaatgtactaaagatataaatttggaacagagtatatatatataaaggcatgaggctgaatgagaaaccactcagtaagtctatgtaggtggaggagagagaaaatgtgaggattaggccccgagcccagctcagcaaagaaggctggggaggaatggccaagcggatggaagattccagagtgctgctatctagacacaaattcaaagaagtttttcaggccaggcacagtggctcatgcctgtaaccccaatactttgggaggctcaggcaggtgaattgcttgagcccaggagttcaagaccagtcttggaaacatagagagactccatctctattta

SEQ ID NO: 215369 - DNA, 422 bp, Homo sapiens
ccgctagtgcaaagggataggcgtatttcccatgattaaagattccagctcctgaaggttagggtttctctcctataatgcaacacactgcatgtgcaggtggcctgtggccctattcaggttgctctgtgacatttgggacttggggaactagagcccagtggtcacaagataatgttgatattctggctgcccctgttagtgtaagtaataaataccttgtctctcacccaggagacttctttcctctgccagcattttattagcttgtgacaggctaacttgttagtttgaaagtagtgtaaatctcagatccttcacaggtcttgatagtatgtaggtaacacaaataaatgcataaacagctgagttcagctcagaaatgtccgtttttacccatgtttttcattaaaaactgtatt

SEQ ID NO: 215370 - DNA, 450 bp, Homo sapiens
  misc_feature (439)..(439): n is a, c, g, or t
  misc_feature (442)..(442): n is a, c, g, or t
gaaagccttcaaatcagccattgcttggtcgctgtgaattttaaattagaagtgtctgaactcaatgaacctgcatcacagaccgaaattcatcatttcatcgtctaccataaaacctgcacacatggccaagcctcggttacccacttctatagccactactttgttggtgcaataaggctgatttccaacctccatctgacttcttccttgattcctcctcccagcttccataccttgagctactgtaagctcacaaaatgcaaattaacatcaatattagcctaaacagaacaagtaagtctcatcaataatggattccagaggcaaacagggattttttttttttttttggcagagtcttgctttgtcacccaggctggagtgcagtggtgcgatctcggctcactgcaacctccatcctgggggacagaataanacnccgttaaa

SEQ ID NO: 215371 - DNA, 450 bp, Homo sapiens
gctccacagctttctttaggacttaagagtctttatatgccaaggtataagtggatcccctgggtaaaatgatagtattcagttttctaaacttatttggccacagaaagctatttttgagaagcatttcataggactgtatatcatagagctcgctgctgtgggatacctttgatatcctccagaaccacctaagtttgctatggtttaattgtagtcatatcttctaacttaaactcaaaacagtccttttgagttccacattagctctcctgaaaatccctctatgaaactgggcactggcaggttcagcagtcaaactttctgttgtcattcaggtcattcatgaaaatatttagtagtgtcttgggattaaaacaaaatcgggaaaaaaaatgctctgtcaggatttgctacttgagtggagaataaagtcaagtataaaacctt

SEQ ID NO: 215372 - DNA, 376 bp, Homo sapiens
gatggggtcagaaagatgtataagatctagttcttgacatctgagagtttacatttagaagagagggagactaattataagacaaggcataggctgggcacggtggcccatgcctgtaatcccagaactttgggaggctgagacaggtggatcacctaaggtcaggacttcaagaccagcctggccgacatggtgaaaccccatctttactaaaaatacaaaaattagttgggcatggtggcatgcgcctgtagtctcagctacttgggaggttgaggcaagagaatcgcttgaatccgggaggtggaggtttcagtgagccaagattgagccactgcactccaacctgggcaacagagtgagactccatctcaaa

SEQ ID NO: 215373 - DNA, 519 bp, Homo sapiens
cttttgaggaaccagtgcacacgtaaagcaaattccaaatcactgtttacattaactcaatgataaagttgtctgggaggaaggccattgcattctccacagaatggcactggtatcacactaggacagtgcttttcaaagtccacagcccctggaaccagaaccccacagtactccccaacggcacattcctgggtcctaccctcccatctcctgagctagactctttagggcaaaggctgagagtctgcattttaataagttgcctcacccaaagaaccactgcgctagggttagtacgatgctgggttctctacaaggtgcctcttaggtcagtttctttaactgagtagcccaacgagagcttccatttacttctttgtgtggttcattaaacattcatttcatgaagtttagacaagcctttcagatgagtaggatgaggcatggttaggccttggcctcatctgactttgcccagatgtaggggcccacctgggacgatggacttcccaccac

SEQ ID NO: 215374 - DNA, 1063 bp, Homo sapiens
gagggtgccgtgctgggcaaggggggcaagccacagtttgggctgggcgagctgtctgcccatgccacaccggccttcactgcggtgctcacctcgcccttccccgcctcgggcatgcccgtgaaatttgaccggactctctacaatggccacagcggctacaacccagccactggcatcttcacctgccctgtgggcggcgtctactactttgcttaccatgtgcacgtcaagggcaccaacgtgtgggtggccctgtacaagaacaacgtgccggccacctatacctacgatgagtacaagaagggctacctggaccaggcatctggtggggccgtgctccagctgcggcccaacgaccaggtctgggtgcagatgccgtcggaccaggccaacggcctctactccacggagtacatccactcctccttttcaggattcttgctctgccccacataacccgcggggggggtcctgctgccctggcctcctcccctttagtggtagagcgaccttttcaattacaaagaacctcctggaaaaaaaaacaaaagctgaacagaggcggccgtggccttggcccgaggagactaacttgctttctccctgcatgcaggctgagattgtttctggaaggggctggcctgagtttctttcccccaaatgtctgtgcagtgtcagggctgcaccccataggccctgaggcacacagcccagccccttgtgagtcctggcctctgctgggccctgaaggagctgagagggagctcaactccccaccccgccacgtggggagacagcccttcccactggctccctgatggcacctgctggaggaaaggggcacggcctccctcacagcccttggctggggctcctccagctccccctgggacctccagcatatgacagtggactaaggactgtggggttttcctccaaggggaagggagaagaggggaccatcgaggtggcgagtgtggacaccctgccaggactgcagcccccatggtgatgctgtggcatcagacatgtccgtggtgggcacagtgcctgttgccct

SEQ ID NO: 215375 - DNA, 221 bp, Homo sapiens
ggccatcaaaatatttatcaagtaaacccacttcatctactcatggtcttcatatagaccactaacaaaaaagatctagagctggttgtactttgaagttctttgactccaaaagtatacttactgtgcacaaagagcatgggttgatgtatacattataatttataaagctattcacttctgataaaagaatactgctgttatttggatacatacacagt

SEQ ID NO: 215376 - DNA, 160 bp, Homo sapiens
agtaacaaaatacttggaagttaaacagtacacttctaacacacatcaagaaatcccaagagaaatttaaaatattttaacaaagtgaaaatgaaaatacaacataaccaaatttgtaagtttcagtgaaagcagtgtaaagaaaatttatagcattgaa

SEQ ID NO: 215377 - DNA, 433 bp, Homo sapiens
aatttacctatttgacactcacggaacattctacccaaaatagcagaagctgaatgaatgttcttttttttctcttttcttttttccttttctttctttttttttctttgagacagagccttgctctgtttcccaggctggagtgcagtggccctatctcagctcactgcaacctctgcctcccaggttcaagcaattctcctgcctcagcctcccaagtagctgggattacaggggtgtgccaccacgcccggctaatttttgtattattagtagagacggggtttcaccatgttggccaggctggtctataattcttgacctcaagcgatctgaccacctcggcctcccaaagtgctgggattataggtgtggcccactgtacccggcccagaatgaacattctttacaagtgcacataaaaacatttatc

SEQ ID NO: 215378 - DNA, 381 bp, Homo sapiens
tgacagagtttcactcttgttgcccaggctgaagtgcaatggtgtgatctcggcttaccgcgacctccacctcctgagttcaagagattctcctgtctcagccttccgagtagctaggattacaggcatgcaccaccacgcccggctaattttgtattttcagtggagacagggtttctccatgttggtcaggctggtttcaaacacccaacctcaggtgatctgcccgtcttggcctcccaaagtgctgggattacaggcgtgagccaccacggccagcctatggtttatttttcatgtgagaatatgttttgcttaacaaataaatttctagagcattatttttttttttaagagagagacttttcatttctagtctta

SEQ ID NO: 215379 - DNA, 262 bp, Homo sapiens
aagaatggtttggagatgactgaatggtagtaaagcacaggtactaatgagtactttgcagggatccactggagaataaataccctgcttagggcagagtggttattgaagtcttgtgagaaataagacctgttggggttggaaaagaagggcttggaaactccattgcattaatggttagatttgatgcagtagaaattaagaaggctttgcagttaggaagtgacatgtctgaagtggtgttttaggaagactagacaga

SEQ ID NO: 215380 - DNA, 680 bp, Homo sapiens
aagttggacaatggctgcagtgcaaagctgtcagagagggtgtttctgtgagatgagaagcaaactttctagccgcaaacacttactgccatcctgcctgccatccacctctatgatcatttgactttgtatgccttggtcatctcatgtttgaaactggaatcacatttagcctgtcctctgctgtcaacgctgataagtatgctcatccaaaatcagccattggccaggcatggtggctcacgcctgtaatcccagcactttgggaggccaaggtgggcggatcacttcaggtcaggagttccagaccagcctggctaacacggcaaaactctttctccactaaaaatacaaaattagctgggcgtgatggtgcacgcctgtaatcccagctactagggaggctgaggtaggagaattgcgtgaacccagagggcggaggttgcagtgagccaagatcacgccactgcactctagcctgggcgacagagtgagactcctctgaaaaaaaaaaaaaagtcagctgttgccattttcctattgagagcatccagcaagatggtttagaaaattttgttctacagtctcagcacaagaaactggcagacccagacaccatgccaagacccctccctgcctgctgagcttccattttagcctcttgcactggctggtagccg

SEQ ID NO: 215381 - DNA, 525 bp, Homo sapiens
ttaggtaaaagtaaatgtctccagacctttaactatatagtactttatttgctaaattatgcaaatcaatataccctaaatcaaatacatacctcctctaaagagagttccccttggttttgaaactcactttaacaagctatcaatcagaggctgatatttagaggtagcataactgattggtagcagtgggatttctggccatttttagtgataaccaccgaaatacatgagcagggtttttaaaccctaggaaggaaaaagcctgaccaaaaaccctgacagatatataatgccatgatagaaatgctactcattatgtcatacctaataatccacatgtacctcattactcagctgtttgtgttacaccctgttgccaaaggaagctccctgcttctcctcctgatccagcaattaatatgcatatcaggcacagtggccagacttctacggagaaagaggaggcaggcaagagatccatagtcataaagacctaggcgagtaatattctcagcattattc

SEQ ID NO: 215382 - DNA, 395 bp, Homo sapiens
gcacacgcctgtaatgtcttgagcccgggaggcggaggttgcagtgagacgagattgcacccctgtgctccagcatgaatgacaagagtgagactctgtctcaaaaaaaaaaaatgctaagagggtagatcttacgttaagtgttattatcacacaaaataataaagagtgcagaaggaaatatttggagatgatagataggtttttatgacacagattgttatgatggtttcatgggtatatacttatctccaaactcatcaaattgtatacataatatatgtaaagcttctcataccaatcatacctcaataagctgttttttctttaaaaaaatcttcaaaagaaaaaatatttcttaaaaatttcacatttttttctacttcatcaaaaca

SEQ ID NO: 215383 - DNA, 545 bp, Homo sapiens
agtgccctgatcttgaaagcagtggaaatgcggcaacgggaatgcatctccgcacacgctgtggtgtccgcgctggagcaagcccgcgccgccaggaccgggtttgcgcttttgcccggctcagtttttcctgaagtgcttctgggtgccagagtccactcgcccgccacgcaacctctaacataaatcctccggggagaaaagttgggggcggagcgggacgggttgcgcgctgcagtgaaaccctctgtctgcagcccaggagggaggcttgtcggtgcagggaggcgtaggaccgagggtcctgagaccgagagcagctggtcctggagggactcaagcttggccgtggggctgggaggcggctgcaatggagtctgcactccacccagcgctctgctgaccccttctcgggttgtcttctggagggctctttccctctccttcttggggcccggagacaagtatccagtgttacgtctggtggcacaactgctccgggacacgggcgaggctgtttgcggtcagctgcctgcggctgccgc

SEQ ID NO: 215384 - DNA, 440 bp, Homo sapiens
tcccaggttcaagctattcttctgcctcaacctcccaagtagctgggactacaggcacacaccaccacgcttagctgatttttgtattttcagtagagatggggtttccccatgttggtcgggttggtctcaaactcctcacctcaggtgatccccccaccttggcctcccaaagtgctgggattataggaatgagccactgcacccagcccatcttattgtatgtctaaggatagatatacttgcataggaataccttgttcagagaaataatactgattttttttgttgtgattaaagaaggttttcttttcccgtgggaactgtattgcaaaacgaaaatttgcatcaaactgttaaactaactaaacattttatttttacattgagttgaggagaagaatgcgtaacatgaatggacaattttctggggacataac

SEQ ID NO: 215385 - DNA, 479 bp, Homo sapiens
tgacagttctcctgtgggagggaagggattgtcttttccgtaagtagcgctgggtcgatatggaaaaacatggactttgatttctacttcacactataacaagaagtaatgagatacatcataatcatatccctaaacgtaaaaacaaaacaataaagattccagaagaaaaaataaaataatatccgaccttggagggggcaaaattttcttaataaaggcaaaataagcgtcataaaagaaaagatttagtccaggtgcggtggctcacgcctgtaatcccagtgctttgggaggccaaggcgggcagatcacctgcggtcaggagttcaagatcagtctggccaacatggtgaaaccccgactctagtaaaaatataaaatttagctgggtgtggtggcacgtgcctgtaatctcagctacttgggaggctgaggcaagagaattgcttgaacctgggaggcagaggtttcagtga

SEQ ID NO: 215386 - DNA, 617 bp, Homo sapiens
aatcccggaataccttgactccaaacccactgctattaacatatctgccaatttatatctttgttaatacttggttgaaagattaggccaggcacggtggctcatgcctgtaatcccagcactttgggaagccgaggcaggaggatcacttgagctcaggagttcaagagcagcctggacaacatagaggagagtctgtcactacaaaaaattagccaggcatgatggtacacaccagtcgtcccagctattcatgggattgttctggctcatcctcccgagcagctggatttacaagcgcatgccaccgcgcgctggctaaattctgtagtgttaccacaagtgggggtgctcctatgtgtcctctagtgctacaatccactcgatctcaccggtccttccgtatttatccgaccaatggcgactattcctgactcgggccccgttttttccacagtcctggccctgcgcgactccaaccttcgctgggcataagcctcaacaacccctctgtgctcgtcacggcttacccactttcgctctctcttgtgcgcctccccgtccaccctttcacctcgacttatttcctattctctctcctggccctctctctcttc

SEQ ID NO: 215387 - DNA, 572 bp, Homo sapiens
ataagtacttgtagaatgaatgaataaaatactgtgccttctagccaaaaggatttgagtgtgttatttgtaacataaacaaataattagggtaactgtttgaaatgtaaccagagtgatttatgacagtgttaattgttcatccttgtaagggactggagccttttgccttcatggaagcaacccccagaaaggtactgggctcagcatctctaccagatgatgaagcgcccttcagtgtggccacggctttttgcttaaatcattgctactttttttttaccagctcagtaggagtgaatgcatgtgttacaacgaaaaataatcctaaattgaaattgtgagtaactgaatatatgatttagaagagttaattatgaagaacagctagaatttcatgtggcatttagatgtactcatttttatattgatttataaactaatgcttgttccatggtattgtttatactatatgatgtcaaagccatttgcaaaagatctactgaagtttgagcctttttatgatccttctatggacccccctctttgtctgctcactcccactcctccca

SEQ ID NO: 215388 - DNA, 287 bp, Homo sapiens
gtccatcagtattatttatttctatgcaaaagtatgcttcaaactgcttaaatgatatatgatatgatacacaaaccagtttcaaatgcagtcttgctcccatcaggtctcaatgaagtagcaccttctcagagagaccatgcctaaccacccaagaataagctacttccttatcccccagctactcttatcttcacagcacttatttgtaactgaagtaattttatttgcttttgtgtttactgtctaccctccccattttcaatgccactaagaatttgactctg

SEQ ID NO: 215389 - DNA, 356 bp, Homo sapiens
gagccgagatcacgccactgcactctagcctgggcgacagagcaaggctccgtctcaaaataaataaataaactttattttttagagcagttttaggtctgcagcagaattgagtggaaagtacagaatttcccatacactcctgccccgcccctaccacacatggtatgccacactatccacatcctgcactgcaatggcatatttgctagaatcagtgaacctgcattgacacatcatcaccccaaatccatagtttgcattaagtagggttcactcttgatgttgtgcattttatgagatttcgacaaatgtataatacttatttaccattgtagtatcatacacaatagttt

SEQ ID NO: 215390 - DNA, 115 bp, Homo sapiens
ctcagacctgccagtgcacatgtaattgagacagtggaagaactctgccagtagagtgctttcttccctgatgatgggaatgtcacaaggaaggtagtgacattaaaaaagaaga

SEQ ID NO: 215391 - DNA, 433 bp, Homo sapiens
ggtcaaaccctaaagatcaaaactgatagaaccaaagcttggaatacgtggaggaagagctttccaggcagaagggaaagcaagtgcaaaggacttgagaagtgaaatgaaacctattcaagaacagaagaaggctgactgtggaagtagagagtgaagtacaacaacattttaatagtgcacaaaaccggaatgtacaactccatgatttatcacaaggcaaatattcatgaaaccaacacccccatcaagaaatagaacattgccagtaccccatccctcttccctagcctaagcactattctgacttccatggtactctcttctttgcttttaaaagtaagtttgccaactaaatatgcaccctgaaactttatcatttagtttgcttgtggtttgaactgtatataaagtgaataattttgtgcctgct

SEQ ID NO: 215392 - DNA, 194 bp, Homo sapiens
aaagagcaaaactaaacatgtctccaggaactgagctgagcagaaccaaaaggaaatgttagagatgttttctaagttcacgtgagtagaaagctcgaaactcagaagtctcctgggtggaaggcggaggttgcagtgagccaagaccatgccattgcactccagcctgggtgacaagagcaaaactccatctc

SEQ ID NO: 215393 - DNA, 391 bp, Homo sapiens
ggtgggccgtttttaaagcccatcggaaaagtgcagtattggggtgggagtgacccgattttccaggtgctgtctgtcacccctttctttgactgggaaagggaactccctgaccccttgcgcttcccgagtgaggcaatgcctcgccctgctttggctagtgcagggtgtgctgcacccactatcctgcacccactgtctggcactccctagtgagatgaacccagtacctcagatggaaatgcagaaatcacccatcttctgcatcgctgacgctgggagctgtagaccagagctgttcctttttggccatcttggctccagcccccaatcaaaattgtaaatgtgatttttcttttttgctattaaaaagattatttatgttcatcta

SEQ ID NO: 215394 - DNA, 151 bp, Homo sapiens
tcccccacccccactaggtgggaggtgggttggcccagatctttccaggccaccattcctacaagttaatgatcacagaccttatcagagccttttgccatttataaatttataaaacaaaagagaaataataaagcacatgggtaattag

SEQ ID NO: 215395 - DNA, 334 bp, Homo sapiens
tagattatgaggtcaggagatcaagaccatcctggctaacacggtgaaacctcgtctctactaaaaatacaaaaattagctgggtgtggtggagggcgcctgtagtcccagctactcgggaggctgaggcatgagaatagcgtgaacctgggaggcagagcttgcagtgagccgagatagtgccaatgcactccagcctgggcgacagtgcgagactccatctcaaaaacaaaaaaatgccagtaggacttatcaggagtcatgagatgacttgggacgaaactccagggctccaggttaacaatccatccactggggtactctgccatctctc

SEQ ID NO: 215396 - DNA, 514 bp, Homo sapiens
cccagcctgggctgctgcccctcacgccccagaggccgtattcagatgggttcatggctgttgctctcttgccaagctcaccagtctgcctcgtcctagctgttctgccattgagcccacacagggagggtcttatttttcaggtctgaaattcccactgggcccttcttgtatcttccatgtctttgctgatgccctggtgatctgttggagcattttcctaacagctactttaaagcttaggccagctgggcatggtggtgtgtgactgtggtcccagctacttgggaggctgaggcaggaggatcgcttgagccctggaggtcaagatcagcctgggaacatggcaagaccccaggtctacaaaaaattaaaaaaattagccagtactaagaaattagtacagtgagcctgtagtccctgctacttgggaggctggggtgggaggatctcttgagcccaggagtttaaggctacggtgagccctgattgtgccactgtactctagcctggg

SEQ ID NO: 215397 - DNA, 735 bp, Homo sapiens
gcagggacgtggatgatgctggaaaccatcattctcagcaaactaacacaggaacagaaaaccaaacactgcatgttctcatcataagtgggagttgaacaatgagaacatatggacccagggaggggaacatcacaccctgaggcctgttggggggtgggggacaaggggagggagagcattaggacaaataactaatgcatgcggagcttaaaacctagatgaagggttgatgggtgctgcaaaccaccatggcacatgtatacctgtgtaacaaacctgcacgttctgcacatgtatcccagaacttaaagtataattaaaaaagaaatttaaaaaagacattccgtaggtgaggctctccctaaaagtcaaacttttacttgcacatatgaaaagtgtaatcattaaataagctatttcttcagtgacggtatactgagttctgctcatggtgccaagtactttgcatatattattcagaagcttattagctgccctgcagcaccagtatcatttattgctgcactccaggtgaagaaattgttgctgggagctacaacaacttgcccaaagccacaatgatcataagtagtttgcgcttcgttgtgctcttctttgctggtgtgagattctcgagggccaatgtccttcatctgcgtaactctagggactcgcccagaccttggaagaggttcacattcccgcgtgccgagattgattatgggccaccct

SEQ ID NO: 215398 - DNA, 416 bp, Homo sapiens
ggtgatactggactctggaggaacccccatgtggataagcggatgaggggctgatgggtgcagcaaaccaccatggcacgtgtatacctatgtaacaaacctgcacgttctgcacatgtatcccagaacttaaactataataacaatttttttaaaaaagtctgcctaccctgtgtgacaggccacacagagaccacatggaaggcaatgccaggaggagaggcgctgaagccacctagtgggagagaggcccaggcctcaccagcctcccaactgagcctaatcttccagccatccccaccaagaggcccaatgcggggatgaaccagcctaggctttctagcccacccaaaccccagacgattttttccccagccaacattacatggagcagagcaataacttaagttagaaag

SEQ ID NO: 215399 - DNA, 346 bp, Homo sapiens
actcagtttgtggtactttgttgctgtggccccaagaaagtaccacaagcctgaggttttcaccgtccttacagccagcaagacgggatgtttcagatgaccctgtcctatgtggaactgggggctgaggtggggtggcctgataacagagtcaccaaagagctgcctctcttatctgtactcctgagttctcacagccttctgggcatcttcagcaccagcaactcagcatgtcaaaactgaacatctttcctctccaaaccccttttccctcataagcccatctaaattatggttaccatgtccctctcagtccctctggaattcttcccttttctcatcccca

SEQ ID NO: 215400 - DNA, 1080 bp, Homo sapiens
gctgaggcaggaggattgcttgaggccaggagttcgagaccagcctgggcaacatagagagatgctgtatctccaaaaaataaaacaattagcctggtggcgcactactgtagtccccgccactcaggaggctgaagtaggaggaattgcttgagcccaggagttcgaggctgcagtgagctatgatagtgccactgaactcccatcagagtgagagagcaagactgtctcttaaaagtaaatgatagatttaaaaatataaaaagtctttgactcttagtatcccatggaagcacaaaaattcacagtggtttgtagatggtgataataatttttttttcttggcatctctaagaatatattacctaccataaagattgtatactgtcaggaaataaaacattttaaaataatattcaaaaaaacctagtctcatgagaggcaaaagttttcaagtattaactacaaaaagttcagttggaaatttccccgtcttccgagaggtgtcatgagctgagtcagctcctagctgtgaccttcatgtgacctcatacatcaccttcacctctctcagaaaatctatgtcttcattcttaaagataaggacaataacctgctttgcattgaggaagaagtcaattaaaagatgagattacctgtgtgtaagcattttgtacagaggaagcactttttttcttcctctcattatcatcattgccttgactcatttcctgttgtgcccggaaggcgggggcacctgtgaaattagaatgcagcagggcagggggttttcattggctcagttcccgctggtgctgctaggtaactttgctcatatcctgtctggaaggacagacaagggtcagactggatgcaggctgggacaccatcagcttctcacagttgctttttctctccccatcatgggtctggcctgctcttagaactgagtcatcgctgattattctcccaaacacaggaaaatccaggataccctagcgtacccacttttaggtgctgacacattgcaagcctcacacttcatccatggttttaaggatcaccttgaaccatggaaac

SEQ ID NO: 215401 - DNA, 501 bp, Homo sapiens
agaaattggggatagtattatctaacatacatgtttcccatgaagattaaaagagataatacatgcatggtgattagtccactgccaggacatagtaaatgctcagtaaatgacaaccaacatccccagctcagcttcttgaactcctggcctcaagaaatcctcctgactaagccttctgagtagctgggttacaagatgagctactgtgcccggtgagctcagtttctctacctgcaaagaaaacttctgaagtgcaaatgtggtggttcccacatatgctagaagggaggcaagggaatgcaattcttgcatttgtttgacagagacagtcagatactctaagcctatggtgttgttgcagagaagcattgagggaaatggctgagcatcagagcctcttctgacaactgtgccactttcttagacctacaggtacacccaaatccacttgaaattacagaaacacattatcttctttcaattttcagttgtttgttc

SEQ ID NO: 215402 - DNA, 810 bp, Homo sapiens
gcccggttcaaattttattttaaattcagagggtacacgcacaggtttgttacacgggtatcatatgatgctgaggtctggggtgcaattgatgccatcacccaggtagcgagcttagtatacaacagttttcaccccccgtccccttctttctccctccctgctctgtcctcagtgtctgttgctgccatttttatatccataagtactccatgtttagcttccacttgcaagtgagacatgtggtatttggttttctgttcctgggttaattcgcttaggataatggcctccagctgcgtagttcacattttttaatgaatcgtgttagagggatttccccactcactgtactatctttgttaggaaagaaatactactttctgttagctttttcttttccctgaatagaaaattttcctttgacttctaccctccttcttctacgcctccatttgggaataaagtcattgttcttctccaaggcagcccagctcttcctgtcttgatgggcagttttctctacgactgaactaagggtatactttaagagctgtaatccttttattctgtagtaatacagaatataattctagattagtcacatcaactaaatcaactgggtcaaaatctcacttctcttattctacgggtttaaaagtaatcatctttataagcacaaatgatggaatgtggtacagattaaacaaaaatggcagcataccaaaaccactggttgcatatgaatatatctgatattctggtaactgacaaaacttcaaaagtattaaccgatagtctagaagactg

SEQ ID NO: 215403 - DNA, 291 bp, Homo sapiens
gcccggttcaaattttattttaaattcagagggtacacgcacaggtttgttacacgggtatcatatgatgctgaggtctggggtgcaattgatgccatcacccaggtagcgagcttagtatacaacagttttcaccccccgtccccttctttctccctccctgctctgtcctcagtgtctgttgctgccatttttatatccataagtactccatgtttagcttccacatgtctcagcaagtggaagcgtaaacatggagtacattatggatataaggtacgagcatgatat

SEQ ID NO: 215404 - DNA, 365 bp, Homo sapiens
acttgagactctgtatccaaccaactataggagatctcaagctgaatgtgcacaagatgaagctttcctggctagaatatcacacaacttttcagtaagtcaggaacagcatctcctttcattcaaaccattctttcaaccagaaacctagattttatccctgattcttctttacttatttctatactgtgttcacgctaatggaaaattctatcaattctactacaaaacatgcttcaaatccatttcattctctgtctccattgccaccagcctagacaagaaaactgccaccccaccactggactacttccacagcctttgctgcatccatatctgctctgattagttcattctccataaaa

SEQ ID NO: 215405 - DNA, 277 bp, Homo sapiens
ttcacttcctgaaactcagggtcggcttgtgaaaagctgttaaacaacatgctaaatgtgaaatgtcaaccctcactctaaactttccctgttcagagcatcagacgaaaacttcattgggttttatagtggctttcagatttttggtagtcaattgaagaagggagtttaaaatttgttgtatactgttcatgattgtctgcccatgtcctgcctgaaataccatgattgtttatggaaagtatctttaataaagctggatacagtttggcttgga

SEQ ID NO: 215406 - DNA, 859 bp, Homo sapiens
ggggctttatagcctactgagtaccatctctgccagtaacaggttttctgctgtgttaactgaggttttggcaaagcattgtcctagaaggccttgaattccttcataccaagtgaaacaccagttttgcccatacctgcaaaaggaggaggcttttccagaactcttataaccagaccagggatccctgagttggtgcccaggatcctgaggattgtaatcctaatttccttctagggtaagagacagcttatcacaaaatctattcttcaaggacttaatgtgcagacctaaggtgatgtagacaccattgaagccttcaatccaaaatctgccatctgtatttcatgagacaagatgtggtatgattctaccccaagtcaaggcaccaattagtttgttaactaggggccccctgtcactttatttcattcattccagtaactttgaggccctccttcagtgcctagcccccagcagagcaatggaggattcaataccaaaaacatagttcctgcccttctgtaacttgggattcagctacatatacttagttatgtgatagttgctgccatgtctttgggttgaacaagaaaggctgcctttggctgttctgcctgggaagacttcctgggcttaaggatttccttaagtgcttcaagggaagctcatccttgctctcaatcaggagcccacaacaccagcctattagcttttgctcttcctgctctgttttcaggttgacaagcctaacacaacagcttcaaaacacacacacacacacacaaagtcctctacagtggacaggtgttgaaaagtgcacagaagaaaatataactaaagctattacaatatcatg

SEQ ID NO: 215407 - DNA, 420 bp, Homo sapiens
  misc_feature (293)..(294): n is a, c, g, or t
  misc_feature (297)..(297): n is a, c, g, or t
  misc_feature (299)..(299): n is a, c, g, or t
ttgtttttttttcctatagcattcctgctggggtgtttgctgtgatcagagttagagatgtagaatttttaccacatttttacttttttaaatattctgctacccagactgtaattgagaagtacaagttgctctttgggtgttatgacagcatctctgatgaatgagaacctaatccagatcttcttcaattcttccattagtttgatagtctttaaagtggccatttagaggtacactcccagcaggaccctttagggcacccaccaagaaacccttacttggtgggggtnnggngnggtgttaccttggactctttcacacacacacacacacacacacacacacaaagtcctctacagtggacaggtgttgaaaagtgcacagaagaaaatataactaaagctattacaatatcat

SEQ ID NO: 215408 - DNA, 277 bp, Homo sapiens
gactccgtctccaaaaaaaaacagaaaagaaaactaacagaccacagtcatagtgaaaaccagcaacacagtagccactggaagggctactggcagaatagtctttcctggaaagacctcacttgcaaagctgtctttatttgacctgacttccatctcaccaagtgaagaaatctgttttcttggggacactgtcaaaaacatttagagccaaatgtttaactttgtggctgcctgatgcaatagaccacagttgggtcaaataataggctaaacc

SEQ ID NO: 215409 - DNA, 379 bp, Homo sapiens
ctgcccattcaacatatcttattgctgtcctctctggaactctcctctccctagctctcacttttaagctagtggatctgtagcagaggtacttgcccttttatcagtggtttagtgagcggttcccttcgagaagaagatgaaatggcatttacggagtcttggggttgccgaagagagacatcttttactcggtaattctgcataaggctctccccaacagtgaaagcttttgctggcctctttgatgggaactctgttctgggccattattcatactcaaattcagatcagagggatgggcttttatgggttagcctggaaattcaatcttcatgtttatcagggggatttcatcctgaagaaaatcatcactttt

SEQ ID NO: 215410 - DNA, 524 bp, Homo sapiens
aacttggttatctgcttttctagctcacaacagaaaatgaacagccagagatttatttagttcagattgaccacaaaaggagactgcctataacctagcaaggaaagggtacagaaaaagggtatgaaacattaatttaaaaataattaagaagcttccaagccaggagggtcggagaccaggtggttgtgttcagagaagccagcacaatgggtagtttctgaagcactgttggttcccagctcttgctgggatcttgtagtcactggtgatcaccataaccatactggagcaagccagagtggtttgcagcacattttacaagcttcctctcaaatttgggaatgttggaaagtagtgttaattataagactaagctatggttgtcttagaagatgtattttgttcatcttcatattccccacagcatcttgctacagggaatacaaagaaaaaaatcactttttttagaatatcgtattccctaataaaactatatagatgaggcagttgtatgtagaact

SEQ ID NO: 215411 - DNA, 451 bp, Homo sapiens
ttagcccttctcatttactgaatcggtggtgctcctctggtgatagaggcttgttcacagaggggagagtgttcctcaaagctgacctgctttgcttctaggaggagtgattgcttgtcctaaaatcagtgtgtccggttcagccctttagccacagggcttttgtacttgctgttctctctgcctggaaaggccatcctcatggtatctcaagggcttcttttcttacttctttcaagatggcaacatagcagaggcgtccatgctggcaactgatataaaatggccccaccgccccagtgctaggcaatctttagcactcaatgccctgagaaatgtccatatatttttaggtttgtaaaactttattttattgtggtcagattacctaacatgagatctgccttcttaaaacattttaaagtctacaataaagtaccgttaattctaa

SEQ ID NO: 215412 - DNA, 352 bp, Homo sapiens
aatagtccccattttattattattattatttttattgtagagacaaggtttcactatattgcccaggctgttcttgaactcctgggctcaagcaatcctcctgctttggcatcccaaagttttgggattacagcatgtgccgccacacctggccaatactccccagtttatacacgaagaaggtaaaacacagagcaattaagtaactcacccaggatggtcccattgagcaagtggctgagctgggattcaagcccagcgagtcctgtcacataggatcccacgcttatatctcactttgctctatggaagtcatgcttacttttgggaaaattgcctttgattcaaagtt

SEQ ID NO: 215413 - DNA, 625 bp, Homo sapiens
cctcgtggaatgagaaagacctgaccttcccccagcccgacacctgtaaagggtctatgctgaggtggattagtaaaagaggaaagccgcttgcagttgagatagaggaaggccactgtctcctgcctgcccttgggaactgaatgtctccgtgtaaaacctgattgtacatttgttcaattctgagataggagaaaaactgccctatggggggaggcgagacatgtttgcagcaatgctgccttgttattctttactccactgagatgtttgggtggagagaaacataaatctggcttatgtgtacgtccatccagtcacagtaccttcccttaaacttaattatgacgtagattctattgcttacatgtttttgtccttattatgatgcaaatattacaccattttatataagggacttgagcacttgtggattttgatatcctggaaccaatccctcatggataccgagggaagagtttgtaaatgtattaaaacaaagtagtggaattggaatcaaattcttttgattttgtaggtatctgtgtttagccttttcactgtgctgtgaagatttcccccccaggcatcctaggggttgatgggagatttacttaagattccc

SEQ ID NO: 215414 - DNA, 775 bp, Homo sapiens
tatggcctccagctcggaggctggcaaggatggacacgaccctcgcatggtggccgctctcaagcccccactgctgacctggctacaggtccctgaaggattcttttgcaaatactttcctacttttttaggagaaaaataattcattccctccataaactgtttttaaaaataacgaaccctctgaaggctggtgtgtctggtttgcttttgaagccccgccctggccccttccccacacccgcgctggggctctccgggtggggctggagggcggccctgctgggggcactcggcagagaaggaaaagtacttttcctttcacagtctgtaaactgtctggagagcttcaaagttggagaaaccataaaaaagaaaataagaaataacaaaaagtgaggttgccatagaaaccatcctctcccctcccctgagcctgccggggctggcaccggagcgtggaaaaagcgcctcggctggcccgggctcacaccaggaatgcggccgcagctgaaatgggggcaggagtcggctcacaccgcaaggcagagcaacattccagacgccggcctggaaaacagcgctcccctcgcagagcggcggcctcctcggccaggccacgggctcggccgcctgtgcgttcccagggctggacaagagcaagcctcgggggccgggaggaatgtgcttggccccgagtcagctcctttagaaaaaaaaaaacacggttctggggggcctcgccagggggacacacgttctgcaacctggcggg

SEQ ID NO: 215415 - DNA, 449 bp, Homo sapiens
cttgtctttctgtgtgtaatatcaagatggatggatggattcagatgttgtcagcctagtccatccattataaactccccatcagctcttcaactcatggttttagcagacattgatgattattgttgcacccattatttttttaatcacaaaagtcatacatgtaggctgagaatggtggctcacgcctgtaatcccagcactttgagaggctgagatgggtggatcacttgaggccaggagttcgagaccagcctggtcggcatggtgaaactccatctctactaaaactacaaaaattagctgggtgtggtggcacacgcctgtggtcccagctactcgagaggctgaggcataagaatctcttgaacctgcgaggcagaggctgcagtgagccgagactgtgccattgcactccagcctgggtgacacagcaagcgtctgtctca

SEQ ID NO: 215416 - DNA, 643 bp, Homo sapiens
taaccagaaaacagaatgtgggtcccagtacagcatataatgaaaccagttagagacaataacaggcaagaaaagatgatttggcaaggttggaggtcctaatgtgagcaatcaacctctaaataattctaaaatcactgacatgatccagatgatacccaaagatggtggcattgggtactgactctaggacatactaaagctgttttcatgggttataaggtaagatgaaaaactgagggaaagaaacaagtcgttgaagtaatttcagctataggatgagaatgttctagatcaggattgttgagtaagtaagggataaattaaaagggaaagaagtagatgccaggcaagggaaagagtcaagaaattcagaaatgtgggagctagtgaagtctggaaggcagtggtcttgctcaagtactactggggtgtcagactgtgccccacttacaggtagtacaggtgtaggacaggaaagagtgggtaggaaataaccaggtgcagtcgttaacctggtattgatctacccatgggtgataaatgaaatcaaatcagatgaaagtcctctataatgaaagaaaagagagaggcacaaactgacccaagagctatgggatcctgttcaccagtactgggccag

SEQ ID NO: 215417 - DNA, 387 bp, Homo sapiens
cttctagactgattagatttgctcaaggtcatgagggtagcaggatttgaactgctatctgtctgattctaaaatgtgcacactttctgcaactggacagtctgggtccaggcatagtggggggatgttgggggtactccacagatctcagttctttctggtgaaatgaggggcttgtggaggagagctgcccacaggcttgctgactgagcctcaccgtacacgctccctactagccctgagatcctgagattcaatactagatgctcctagtgactgcacaccatcattccaaagccagtgctaatttaatcaggattgacacaaaagctgaaactggaaccgtataaccaaatggaactgagtctatttggataactaaagttg

SEQ ID NO: 215418 - DNA, 324 bp, Homo sapiens
tgggagtttgggtgagcgatggtgccaccaacaaaggtaaagaaaatagaaggaagagcaactttccaggaaaagggtggtgagttcccttttggacacttgcctgtgagatgtggaggtgagctggacatgcaggatctacagcccaaagaagactacaggtgagagtgaaaagcaagggagcctatgagagtggataggtgaaaaggagaccctcagggccattcagaagaacaccctcatctaaagaacaggtgtgagccactggcacccagccacattgtgaaggttttttaatgaaaataaattcaaatcagttcatct

SEQ ID NO: 215419 - DNA, 323 bp, Homo sapiens
ttcctgagacggagtctttctctgttgcccaggctggtgcagtggcgccatctcagctcactggagcctcccatctcctgggttcacgcgattctcctgcctcagcctcccaagtaaccgggattacaggcacaagccaccactcccagctaattgtatttttagtacagacagggtttcaccatgttggccaagctggtctctgcccacctcggcctcccaaagtgctgggattacaggcatgagccaccatgcccggccaagcataaagtttctaaaattataccaggttatatggatactgaactgccgagtttggaagt

SEQ ID NO: 215420 - DNA, 802 bp, Homo sapiens
acttaattctaaaggaatctggggaggctttaaaaattttaaataaggaattgatggcagagttatgctttaaaaacaatcactctggcagtatgtgaacagcagatttgacaaaggagccaggagatcagttaggaagccatcgtaatggaacatatgaggcataatgaggtcctaacccaagggcagtagctttcagcatagaacaaaaaagggctatgtgcaagaggtattttggatatgaagcctgattagatgtaggaaataaggatagaacagttaaagataactccagagttgtaagacggacatttgggagaattgtgatttcattaactgcatgagaaagaaaagagagaagaggaagattacaaattggattttggaagtatttaacatattatggatttgtttcatgtgtatctccttttaatttcttctctttccttatctttggaaaaatcagttcatctgtaatgtacatccaaaactttcttatcctactctttcctccactggatactttgtccaggaaatttatagatgttgcatctgagaaaacgccttggattctgttccgtatttaaacttattccatattagagtcagtgttttaattgcaaactataccattacataaatggctctcatcaggattaagggatggtcccttccagcttttcatcctcctgtgggaaaccatagactctaatgacctccagagatgcaaaggtgataggctagataactgctgagtaaaccctgagcctgctgtggcaggtgctaagcttgagctgacatc

SEQ ID NO: 215421 - DNA, 500 bp, Homo sapiens
caacaatatcttcctgagaagaacaataaatgagacaagatatttttaagaaagatccaaagttgtagaatagcactaaggctaaggaaaaaagtaaaatggcagttgaggctatttaaaaagggttacaaaaaataaatatctttaagaacaagagctattaatgatattttaattttgtcgcatttgggaagtcctaccttgtgttataagccagtatgttgatgtcccaaaagtacccctggaaacaaaccttggcacaagaacataggctccaaggacatctacccccagggacttcaggccccattgtgctcattccattgaaaaactgataatttgtttctctctgactgagtgatctgtcctagcatatatccacataatatgaactgaatcaagtgggttctcacaaacaatggatgcttttcttcacagttgtgttttgttcctgtggacttttattaaattagtactcataagatcttttatctttaagc

SEQ ID NO: 215422 - DNA, 504 bp, Homo sapiens
ctatatgaccttattaggcatttgcaagtcacataatctcttctgtcaccctatctgtaaaataaagatataatcagtggctatttcataaagtttatcaaggttaaatgaggataaagcatataagtaaaattctcgggatagtgtttggcatacaataagtgttcaaacacgtaggacactcctttcaagccaaggagcatgaaaatgatcaaggtgcaaagagagtaaggaaggcaccctttgggatttgtatttccctttgcttctctcttgctcatcaatagtttagggagcttctcaggaagccacagcagatattaccagagatgtcatatagagctgaaagtgtattcagaaaaaccacagtgctgcttttgtgtgtcagtaaccaaaaatgcaacactgcgattgtctgcacaaaaataggtaatgtcaggtaggcttctcagtagttaaatgatacagttagaagaactgttgaacatacttttcacaaaatgg

SEQ ID NO: 215423 - DNA, 863 bp, Homo sapiens
aaatgaaatgtatttagaatgctcccccatttgggtccttgttcatctggtgatgcactttctgagcctgcctctctcactggggtttcctcctgctttgcacaactttgctatttcgcaggctcccccgtgccccagctcacccgagccgggcggggtggtggtggtggtggtggtgtgtgtgtggtgtggttctagctgaagagtttggtacagtggagggcgggtccctcagcctggcataggggctgtctcctggttccaaccaggccgccttctagtgcaactggaattcccacctcctggtatttctggacaccactccctttctctggatcatttatgcttttagaactttgagagtcttctatttaattgcaagtagtaacagctgcatctgcacagcgctgtctccaatactggttccccacatcaaaggcagagggagaaaacagaaggctgggaaagatcaaagtgacttctaagtcattcaaagtagctaggagcctcccagcgaatagaacccgggtgtcccaagcctagagcatgacctagaacttcgctctgtgggatgatgttagcttgaacttcttgttgggcaatgcataggtgctaggagaatgttgacagtgagtttggggttcgctgggatgggatccgagatgtgggcagaggtggacaccagcaggtggaagaatgtggacaaggtggggggtaggggcagccgccgcttcgccactttccgcagctctggttttgctactgtgctgctctccttgggtgcatcctgtgcctggccacgctgccaccctccttgtcacggtgaccacgattgtatgacaataaaatggaccttttggcca

SEQ ID NO: 215424 - DNA, 292 bp, Homo sapiens
  misc_feature (27)..(27): n is a, c, g, or t
  misc_feature (32)..(32): n is a, c, g, or t
  misc_feature (42)..(43): n is a, c, g, or t
ggacctctgatcatccatttcttgctnagatnatgtagactnnttcagaagtattggaccaattatagacccttgtactgctacacatatctacagctacatccctaacatatccctgttcacgcatagatccacttacctgtacatgtacccatcctcacattcacatctacatgtcaacatatgcaatatcttatacttactggcttacatgtgtacgtgtcccaacattctccttccaagtccaacacatgttgacccacgaccatgccgggacccatctctataggga

SEQ ID NO: 215425 - DNA, 242 bp, Homo sapiens
cacggccctcctgtgcccaggcagggtcacagcccacccagagggagctgcccacctgtgcctctgcctcccctgcagacccaggcacacccaggaactgaggcccccaagggatgggtcactcatcagacacccgggctcctgtgctatctcttggggggactttgtgctcccaaaatcaaggtcagagtggccttgttccagggcttctgggtgccccaaatgtctcctgccagaagggt

SEQ ID NO: 215426 - DNA, 281 bp, Homo sapiens
gccatcgtttgttttctctgggcttagaggagaatctagtacatctcttcttttttacagatgagaaaatggggattcagagaagtagtttaggccagatgtggtgcatctgtccccagagtccccagcggtcagtcaagctaaagtgtacttgaggtctaacgtgtggtcattgctgacccgatgtaaagtcccggagccccctccaatgctactgctgtaagagagccttcttgcatccctccaaggaccgtggtctattgattgagttggtgggatca

SEQ ID NO: 215427 - DNA, 542 bp, Homo sapiens
acgtgtaaataaatgttaagtataagtaagtcagaagggaaaagaggaaccatactttgtagtatcttcgtcctactaaaatatctgttgagcacctacaacttaccaggaagaaaatgtttctgctcttatggaaggggcagaaatagaatcatgtacacacatacaaacactatgtgtgtaaaaactatttggttggttggaataaatgcatgacagaaaaataaagcaggtaaggatagagggagtaccagattgagatgagagatactgttattttatataagatggagagtaaagtccttgtgcataatgagatatttaagcagaaaggcaaacaaagtaaaggactaagtaagtcatgaggatgcttgtggaaaactgtttcaaggcagagaattgatcagtacaaaagaccttaggcctgagagctgggcattttaggggaagtgggaggaagctgtggctggaacaaggatagagtagtaggaggtgaagccatgaatcatagagagatgagaaaccgctggaggctttaatca

SEQ ID NO: 215428 - DNA, 267 bp, Homo sapiens
catatgaggccagatttttctttgtatacttcaacctaaacagcatattgcaacaaagtaaatgtagaagcggataggaaaattcagctctttgctgttatgccagatagtgaagacattcagaagatcataaaacagtgctattgttctatcttttttgttttgtagaatatggttatttttcattaaaaattatttatgttaacataatgggtttattaagataaatatttttaaattttctcaagttcttttgagccctcaaca

SEQ ID NO: 215429 - DNA, 540 bp, Homo sapiens
gagatttttgtacatcagcaaaaagcacaaaagttgcactgagtgtgtcacgtgcaggggatggcaagaatttccacttgagtgaagcaaaggaagcaagaaagtggaagcagtctttgaggaagtgtaagtttcatgaccctcagtagggggccattccagaaaatcgtcagtgtgacgtagtcatgtagttagagtggtgggagaaggacagagaagaattaaaattgtctccactttctcagatgaactaattggccagatggcaccttcactggcgacttcaaagaactcagaaggggcaagcattaggtgaggataattaggccaagtctggtggtataaagtagaggtgtcctttcgtttaggttgatatagcaacagagagagaaagagagatagaaattaaaagcagaactgaagatttgggagcctctggcataataggacttgatgggataaacaaagattcaaaagctgggtcattgttactgagctgtgaatagaggtcagcacagacaacagagaaagtaaggtcag

SEQ ID NO: 215430 - DNA, 470 bp, Homo sapiens
aaggttacaatgacagaatttatctttttctttactatatagcctgagctatggttaaggtttgggaaactagtatcttacagaaccttcagaaatttctcactctagaatttagaaacaaattttacacactcggggttgagagaatccaggagcaatcaccacccctagtgttcagatgctgctctccaaagacccttccccattagccacagaaatcagagctccctggggaaacagacagttgaacctctggagcagggagggcccggctgtgcgtgcattagggaggtgggggtgggggcgtagaaaccaaagaagttagaccaaaacgggcccacagctggggcaaatgtgggcataaaaatgaataaattccatctgatcacataatctcaaatatatacatatacagaaatatttctgtgaggtcagaatggtactaaaaaacaaaacaagactggggaaaa

SEQ ID NO: 215431 - DNA, 467 bp, Homo sapiens
ttgggcatggtcaagtttttacccagaactcttcttatagtcaccacgaaaatacacatacaggagtgaagttctgtgaacgtaatcaatgtggaaaagtcctcagcctcaaacactcactcagtcaaaatgtgaaatttcccattggagagaaagcaaacacatgtactgaatttgggaagatcttcacccagaggtcacatttctttgctcctcaaaaaattcatactgtggaaaaacctcatgagcttagcaaatgtgtaaatgtttttacacagaagccactactcagtatatatctgagagttcatagagatgaaaaactctacatatgtactaaatgtgggaaggccttcatccagaattcagaattaattatgcatgagaaaactcatactagagagaaaccctataaatgcaatgaatgtgggaaatcatttttccaggtgtcatctctactcaggcat

SEQ ID NO: 215432 - DNA, 885 bp, Homo sapiens
agaagaaaagaaagaaaatgccagtgtcatccctaaccaaagattctaattgaatttgcctgggatgggtctcagaccaatagaacattccaggtgattcttctgggcagctggggttgagagcctctggtctcagagattctaaactctctcttaggaagagaagtccttctgtcctctccttttgccctgaccatagggtgtctaggcagggagtaggctgtggatggcccctccaggacctgtgtctaagtcattgctgccttggttggctacagggcggcagcttggggtcatatctggtcaggcaaaattgactttcagtctgggcttgagtccagcctctgcctgagtgtttgatattgagtaagtgacttcacctgactggacttccaaagccctcatctgtgaaatggggacagcaacaccattttgatagtcagtatttcgtgactattaaaaaacataacgcaggtgaaatgcttagctcagtgtctgacacataagaggtcctcaatagcagcccattaaaagctcaaagcctcttctgctcttgggttgtttttgccattacatatgggatcccaacagtattagtttcccccaatctctgggggccccggtgctagtgatgggtatatgttgaatcccaacaataaccctaagagagaagatgttccaggtctcactgtccctcttctacaggtgagaaaagtacaattcagagacattgagacccttgctcagggcctctcaccggttcaggcaccaatctggggctcatttctcttcatcctcaccagccccttactctccctgaatgccaagaaattgtgccacctgtgctgcacagagcttgaaaatgtcatgatatgtgggggaagt

SEQ ID NO: 215433 - DNA, 500 bp, Homo sapiens
tcacctctagacatacaaacaattgtaattaaatgtggtatattataaaatactgacatgaataaaggaaaaaatcacagcttattctgggtggggtcaggtaaggcttccctgagaatatggtacttgaaatgagttttgaagttggaggagtgtggccttaatttccatacggtacattttacatgcccaaatatataggacaactgagtataagttataccaattattaaaatttttgcaagttgactggaattaggagaaagcaattaaatataagctactaattgtgaagcatattagctattcttcattccccttgtagaagtagcatctggaacagacgtgttaaggaacggtcagccagaccctcaacaatttgataactaatggccagacaaatgaaggggatgacagagtcatgtttacaggataatgagaaaatctttcacatctgggacatgtaacaatggcagatggcaaaggctagagtgagagac

SEQ ID NO: 215434 - DNA, 796 bp, Homo sapiens
catgtagccaccttatcctgcacaggtctgtggcaggccgtgagacggtgaccagagaagcagtcagcactcacggcccctgccctttcagagtttacgcttgcttggaagcctccagaatggggataagcacaagacatttatgctgggcttcatccaggaagctctggtggaaggaagagaaagcagcccacacagcaaggttcaggagaagattcccatgaaggacaactggggttcagccccatccagcagatgacacggagccggcctcggaggtgtcctcaccgtgggacactggcatctgagctacctcagggcgtagccggccgatgttcccagcctccccctgggcacagccagcccaggccaagtggtctagccccggcccccactcagcatggcccaaaaaaggagcaaaaagcagaaagctcaaggaccctcagaatcaagttttgcagaaagacacaaagctcaagaacagaggtgcaactaagggaacacaccctgtaagactgcctcccagacacaccactgcagccagtgaattgcactgtttagactttgacttcagggtcagggtgagctgatgagactggccccttgatgaagtaagaggccaccaaggagtgagagcggctgagtttgagccctgcctctgccgtctgcaactctctcatcttgagcaggtccagccccagtgtgggcctcagatctcccatccttgagatgagagaattcaaatccagctccacctctgcagcccacgcccttcccctgcactgcatggcatccg

SEQ ID NO: 215435 - DNA, 419 bp, Homo sapiens
catgtagccaccttatcctgcacaggtctgtggcaggccgtgagacggtgaccagagaagcagtcagcactcacggcccctgccctttcagagtttacgcttgcttggaagcctccagaatggggataagcacaagacatttatgctgggcttcatccaggaagctctggtggaaggaagagaaagcagcccacacagcaaggttcaggagaagattcccatgaaggacaactggggttcagccccatccagcagatgacacggagccggcctcggaggtgtcctcaccgtgggacactggcatctgagctacctcagggcgtagccggccgatgttcccagcctccccctgggcacagccagcccaggccaagtggtctaggacactttgccagcaaggacaagatgatttgcttaat

SEQ ID NO: 215436 - DNA, 186 bp, Homo sapiens
gtattttttttttttagagatggggtttcctcatgttgcccaggctggtctcagaatcctgggctcaagctctccacccaccttggcctcccgacgtgctgagattacagacatgataaaaataaatgagcctggctaagtggtggagactgggtaagacaaggctccataaaccttgttcaaaat

SEQ ID NO: 215437 - DNA, 406 bp, Homo sapiens
agaggagaatgactgcagaaggaaatacagagattctaagaggaatgaggagcagtggaaagaataaagtgtgggtaaacttaactgaatgttaattgtatgcaataataatgtcctctgggatttagaatatagaattgaaatatacaccaacaaagcacaagcagctggtataggtggatggaagaagtgaagcttaaggtccttgaattgcccaggaaatggtataagtactaatttatattaggccttgataaatcagggatgcaagttataatttctagggtaatcactaatagtagtaaaagtaaaggtaatagcaaaataaaagtaaatagtaaaaggatgcataacataatagtttataaagaaaaaaatggaataataagaatatttaatccaaaaa

SEQ ID NO: 215438 - DNA, 301 bp, Homo sapiens
tctgtagggagaaaattcaaaatctactcttctggctattttcaaatatataatatgttattgttaactatactcatcctactatgcaataggacaccagaacttattcctgggttctacatccgttaaggcaaccaaggattggaaatattggaaaaaaaaattgcgtctgtactgaacatgtacagacttttttcttgtccttattccttacacaatatagtacaataactatttgcatgacatttacatcggatattatgagtgatctagagttgatatgaagtatatgggaggatgt

SEQ ID NO: 215439 - DNA, 477 bp, Homo sapiens
gagaatagagaggttaagatgggaaataaggctggaaaaagaagcagggaggagataacagattttcaagaaatagagctgttgaaggcttgtacaatattatgtatatattttttaaattttattgtggaaaatttcaaacgcagacaaaagtaggataataaattgaaccctcatgtacacttaacgcaacttgaacaattatcagcattctgctgttcctctttatactgtttgtacatttctaggtactttttatatccattgttgcatttgattaatagcagctttcaatttgagctcagttctactgtatgtagctactggctaagaagattttatttatgtaaacaatttctttgggttttagttgaccacttgctctgttgaatcaatgtgtaacatggccacttaaacacaactaatactgtttttaggttgtaatatagaaacttagtgtctagatccaggaagtta

SEQ ID NO: 215440 - DNA, 585 bp, Homo sapiens
cccagatgataagtggctcaggagttccacccaagaaacatgaggtgaagacttttgtcagatgaatacagaagcaaggcaaagaaaatagtttgattggctaacgtggagcggtagccttatttggatcattcaaatgaaaagtccccagttagagattagtttcgaattgattacacttaattttcgttttcctaaaatgtgattgttacactgagttgggtttcagtttgcttacataggatcccaggatgctgggtcccctcagtcttatggcctcctgattaattaattttaacactaggaaactgggaaacagaatctgggactgaagaagagggtctgagctaagaaaaaagtcctaaacagaggtcagagacactaggcaaaggaaaaagtgtgccaggaattcaataaacttggtgtggagctaaagcctttacaattatgggctttcctactgataagagtagatcactgcaggaaggacactcagaggacacctggtctatgaggctattggggaggatggaactccatctaccacaagtgagatttggtattgtagaaatagcaaaaaaaaaa

SEQ ID NO: 215441 - DNA, 592 bp, Homo sapiens
tccctctttcaacgtttttgaacctattccacaaactcctcagcatcataagataaacctgagcgtgaacccagcctcctaccagccccacctgtgagttggtgcagcctttgctgggtccccagggttagctagccctactgtgtgggtgccacgcctgagaagagcctgggagagccagggaagataagggaatgtgctttagggtggaggaagccaagaaactctatggttcacctgttttttggtttttagttgcaataaaatacatatagtcccccctcaatgcagctttgctttttgcagtttcagttaccctcggccaaccataatccaaaagtattaaatgggattacaggctatgagccacggtgcccggccatagctacatttttacaagtcaaaaaacaaaaagaaaacaaacaaaaaggtgaaaatttttgtaaattacccagcttgttcaaaatagtatcattccaatgtgggatcagtatacacggccgccgatgggaagtgttttacattctctctgtttaccaagtcctgggaatttcgcgtgtactttacacctagaccacgtctcaaaaaagag

SEQ ID NO: 215442 - DNA, 893 bp, Homo sapiens
  misc_feature (752)..(752): n is a, c, g, or t
  misc_feature (758)..(759): n is a, c, g, or t
  misc_feature (765)..(766): n is a, c, g, or t
  misc_feature (776)..(778): n is a, c, g, or t
  misc_feature (788)..(788): n is a, c, g, or t
  misc_feature (793)..(793): n is a, c, g, or t
gccgtctttcaactggcaagagtcattttgaccagcagattaatcaactgtaagacggatcctcacacaaagaggcaactgaaaggatgaaatcactgacttggatcttgggcctttgggctcttgcagcgtgtttcacacctggtgagagtcaaagaggccccaggggaccatatccacctggaccgctggctcctcctcaaccttttggcccaggatttgttccaccacctcctcctccaccctatggtccagggagaatcccacctcctcctcccgcaccctatggtccagggatatttccaccaccccctcctcaaccctaaggtccaccactccatcctgatgccccaggttatccacagcctccttcccgaccaagaccctatccacctggacctccatttttccctgtaaattctccaactgatcctaccctccctactcctgcaccccaaatatgaacaactgcagcaggtgccaccaccaccacaaaagacaccactacccttgtaactactgcttctactacccaaaatatgaattccaacactgcttccaagagacatttacataaaattgcttccatttttggatgagaatgaaaaattccaaaagtgctgagctttggggagaaataatcttagaaagaaattgtagaaaaaacccatgcagacataacatttataccaatgaggcaaaaataaagaattgagcaccaaaaaaaaaaggggggcgtttaaagttctcgngggcannttaggnnccagtttttnnncagggcctanaggangatatagagcaggcggcgttacacgtctgatgggaacgtgtgattggagacctcttgggggcatggatcccagattagcaggaaaaaacgtaggaagatt

SEQ ID NO: 215443 - DNA, 722 bp, Homo sapiens
gccgtctttcaactggcaagagtcattttgaccagcagattaatcaactgtaagacggatcctcacacaaagaggcaactgaaaggatgaaatcactgacttggatcttgggcctttgggctcttgcagcgtgtttcacacctggtgagagtcaaagaggccccaggggaccatatccacctggaccgctggctcctcctcaaccttttggcccaggatttgttccaccacctcctcctccaccctatggtccagggagaatcccacctcctcctcccgcaccctatggtccagggatatttccaccaccccctcctcaaccctaaggtccaccactccatcctgatgccccaggttatccacagcctccttcccgaccaagaccctatccacctggacctccatttttccctgtaaattctccaactgatcctaccctccctactcctgcaccccaaatatgaacaactgcagcaggtgccaccaccaccacaaaagacaccactacccttgtaactactgcttctactacccaaaatatgaattccaacactgcttccaagagacatttacataaaattgcttccatttttggatgagaatgaaaaattccaaaagtgctgagctttggggagaaataatcttagaaagaaattgtagaaaaaacccatgcagacataacatttataccaatgaggcaaaaataaagaattgagcaccaa

SEQ ID NO: 215444 - DNA, 613 bp, Homo sapiens
gggtgcacccagagtccacaccactctccatttttcccactgtcacgttatgtaactaatgacccattagcagtactggaattgcagatttgggggccacagaaaacatcagccagagcgtcacagaagggcaaaccgcaggcgagaagtcccatggggggggggtgggctccccgcagccgggtcagcagcacccagcacccgccctgagtggacaccgcctgcttcgcctgcacctgaccctgcacccaggtgggtgttcgctcctgccgaccccacagccatccaggcctccgccgtcccctttctgccacggggagagttgcagatggggaaacaggctccgtttgtgcctcgccttcctgacttgtgacaatgacaaacagtctcagctctgggagtctgggtttcctgtcgaggaagggagagttagaacagtcgccgtctcaggggtgcgtgggggaaccggaggggtgagcgcagctcctggcaccccgagcctcccgcagggcgctggggcgttgaggatgataaacccggaccacgctgcccgcctgctctctgccgggtccgctgcccacgccgtggccccgccgcgcggccccgcggccgc

SEQ ID NO: 215445 - DNA, 466 bp, Homo sapiens
ctactactaaattcgcggccgcgtcgactgaaagctgagctgaacataaaagctgggagagccagccattcagagagttgggagagcagtgccctagacagaacaaaggccctggagggaggaacaaacttggtgtatctgaggaagagaaagctggccagcccggccagagcacagtgcgttgcgggaggagagtggagacgcagcagggatcagtcgggggcttgcatgtctttgcaaagaatctgattattgtaaacatagtgagaaggcattgaatggttttaagcaaaggagtgatctgacttaaattttaaaaatattcccctggagagccaggcacggtgactcacagctgtaatcttagcactggggacgcggaggtgggagtatcagttgagctcaggagttggagaccaacctgggcaacatagtgagaccttgtctctattaaagaaagaaaaaa

SEQ ID NO: 215446 - DNA, 421 bp, Homo sapiens
gtgcccagtgcacttgtgttcacccaggtaactggatgaactgtgtggtgatggtgttctcctgtgagggggaggggcacagttactagcattaaatattgctagaagtaatatttttctgtttttctatcttgttgctagaagcaatatgtttctatttttaatgagtcaaatgctgactctatttatttattcattctgttcatctttattgagttgtagaggaagagcaaggggtaaaactgacaaaagtccctgacctcttggtgcttttattctttaggggagagatgcagtaagcaagggaacagataaacaaggtaatttctgatgggagcaggagatatgatgtaataaaatgacagtgtgataagggaaagggggagctgcaaatagggaagggggaggccagcacctggga

SEQ ID NO: 215447 - DNA, 279 bp, Homo sapiens
ataaatattctgcctttgtatttccatagcacacacctccaacatagcagtatcacatacaattaatttgtatgtccatttccttcactacaagaagtgccctatagaatattatttgtcctgtatctgtcacaggagttaatgtattttctaggacatagcaagtactacagaatgtttgttgaataaatgaataaaagtggactttatcaataggattgtatatttctttgctttcaatgggaattacaataaaaagtaaaatccatctacagacaa

SEQ ID NO: 215448 - DNA, 291 bp, Homo sapiens
cagagcaagttgtttgaaaatgtgatgctaaataacgggacaaggaggaaagagttgggagtagttaacctctgcagagtaagaaaagggtgagaaaggcctagcgtaggagaatgctgtttttcattataaatttcactaacaatttgactttctcaactatgtacctgtaaactatgtatctgtattacacacttcagattcatgggctctaagaatttttttaaatatccagaattaacatgtaaaaagttccaatttttttaaaaacaaaaaatttggaaaagcaaa

SEQ ID NO: 215449 - DNA, 166 bp, Homo sapiens
actgataaactacttgtgactataactccatgttctaattgtctatttgtgagcctgtttccctattagattgtgaaatcagagaggaagcttactagacatcctgtatctccgtttcatgggactataatgccacttattcagttgtcagagtctgatacatagt

SEQ ID NO: 215450 - DNA, 262 bp, Homo sapiens
aaggaatactggccaagtattttgtaggaagcttgtctattggaatatgacgtttttcttatgattacgtttttctcatgggttttgtggagaaagaccacagagactttcatcacctcatcttaagggcagatactgtcaactgtttatttcttttcaaaagtaacttaatcctccattatgaaaaaattagaaaatacagactaaaaaagaagaaaatagaagtcaccaataatctcaccttacttcccatgaagaaaac

SEQ ID NO: 215451 - DNA, 167 bp, Homo sapiens
cactgaggcttggaaggggaaaacacccaactcagtatcacttatcttgcatttagtacacccagcactttaactcaggggttctgatccaaaacgttaacatctgtctgtcctttgtaagattttcctggaataatcaaatgtctccctccacctttttcttatag

SEQ ID NO: 215452 - DNA, 483 bp, Homo sapiens
acatagcaagtacaaatgtgcagttactcgtccctggctgacgctggacaaatgatgtaatctcaatgtgtctccatttcctcagctgtaaaacagattattttcaggattaaatgagattgcatatataaatatggcctgacacatattagaagttcaataaacatttattttgttatttggaagcctttaagtgttatacaaatgaaaatgttactattttcactgctctagtctaatgcatgatgatgctttatttctctgacatacacacagaaacataagcctcatttcaaaacacctcagacacatgatagatgttaaggacaagaaagagttaaaagcataaaaatgtggagcatattattcatatattttatatatttatataatatttatgattttatattataattatgcattatatgtaatatataattacatatattataattatataattataatatgtaatatataata

SEQ ID NO: 215453 - DNA, 426 bp, Homo sapiens
gatcgtgccactgcactccagcctggtgacaaagcgaaagaccccatctcaaaaaaaaaaaaaaaaaaaaaaaaaaaagatttaatgactgccctactgggtttcaaacttgcttagggcctgtagcccctttgttttggctgatttctcccatttggaatgggaatgtttacctaatatctgtacccccgttgtatcttggaagtaaatgacttgtttttgattttacaggcttgtaagtaaaagggactcaccttgtctcagatgagactttgcactttggactttagagttaatgctggaatgaattaagactttgggggactattaggaaggcatgatcacattttgcaatttgaaaaggatatgatatttgggaggggcttggggcagactgatacagattggatatttgtccccacccaa

SEQ ID NO: 215454 - DNA, 283 bp, Homo sapiens
aacacatcacatgcaaaagagaaggtgatacgaagacagaggcagaaactggccaccaaccaaggaatgacggcagtcaccagaagttggaagaggcaaggaaccgattctcccctagagcttctgaaaggagtgtggctctgcaaacactttcatttcagcccagggatactgattttttttttttttttttgaaagggagtcttgctctgtcacccaggctggagtgcagtggttcaatctcggttcactgcaacctccgcctcctaggttcaagcaatta

SEQ ID NO: 215455 - DNA, 306 bp, Homo sapiens
gcaacatgcttttaggtttggaaaatttcatttgctaccttatgatgattacatgaggaaagatgaaatgctcgctttgagctttatttgagaaagagatgtaataaatgttgtggcttcccactgaatgggacaaatccattttagtcatgtgaggatattaaaaattacatatgtgtgtgcacagacatagcccgtgtgacttagttggcatttgtggtcccagatactgaaaaaggagaccttgggtggcttctttcagaaaatgctgaataaagtttttcgttttatctggctctgaaagca

SEQ ID NO: 215456 - DNA, 229 bp, Homo sapiens
aatgtcttattgtagtttcagataaaggaaaagtgtgttgatattctggattttcttgctatatcttcctatgtggttaacttctagatgccattaaaacctaaccataggccaggcacagcggctcatgcttgtaatcccagtactttgggaggcctagataggcggatgacctgaggtcaggagtttgagaccagcctggccaacatggtgaaaccccatctctact

SEQ ID NO: 215457 - DNA, 366 bp, Homo sapiens
ctgatagggagaacagtttgcccaaatgagcaaactgtcaagagagattagtttgcagaaatgttctatagcaagtaggaaaaaattatttattagtcttgtctttttgagcaggaattttctgcagtggttattttgacacaggtgttgtgaattctcagacttaagctgtgtagatatatataagttatctcaatactcaatcttgaaatcagtttaataggacataaactgcatttttaacaaatgaagtagaacagaattttaaatttctgttttataattttttttagttatatatacacgtgtactgggtcaagatgacaaaatgtaaaaatttttgaggatcttgatcaaaaaatttga

SEQ ID NO: 215458 - DNA, 534 bp, Homo sapiens
ttctgtgtctatatttatgagggatattggtctgtagttcctgttttgttttgttttttttaactgtctttgtttttggtatcaaggtaatactagcttttaaaaatgagttgagagaaggagaaggtgggatttggggggaaaaggttgcagactttttgactcaggtcattgtgggcttagtctctattgagtggctgggttactgcaggaagccactctccattcttaggtgcattcttgtctattaaaggagaaagttaaacgcctctggaaaacctcaggtttattttagtgcttaaagtctgtggctctaaattcagatccagaactcatgtggcctggccagggagggtcacggagtgctttcctcacacctttgtctctaggctctgtagacctagaggtgtgggacgtaagagcaggcccttacccatggaatttacatacaaatggtggaataagacaggaagtaaataaatgtgattattctgataatggtaaaaataataaatgagataaataaataaaatc

SEQ ID NO: 215459 - DNA, 368 bp, Homo sapiens
cggtgcccggcaggggctcgaaagggcccgggccgccccacagtcccgcccgcactgcttccgtccggggacgctccccagggccgtccgagcggactacgcgcgggtccccgtggctggggggcgagcgtgcggccggcgtctgcgcctctcccggaggcgaggcgggggtcgggttgggaccagagcgcgcttccctccccgccgcgcagaggtcggccggggccgcggctggcgacaggtggcggggacctgggggccaggtccgcgggtagcctgcgacggggaagacgcccctacggccctcagggcttcctccgggtatgatgatcaaccacacgaccgccccgcgctggccccggcagagc

SEQ ID NO: 215460 - DNA, 215 bp, Homo sapiens
atcctttgccacgatttttaaatagcgcctgccccgtggtcagtgcctcctgtgttggccgcaatgctgtgctcctcacagctggcgctgaccgctatttcctgctctagggcggtaggcggcatctgagagcatgaacaaaatgccctacccagaaggagctacgtctttgttgggagacagaaaataaacaggatacataaataaacaacaca

SEQ ID NO: 215461 - DNA, 417 bp, Homo sapiens
tatacgtgtggaagggaggaaggatacttcagtttgctaatattccatgcatttttaaaatgaaaattaaatcaatgagaatgagaaagaagaagcctagactggaaattttaaaaaagaatccatatttcttcttcttcttcttcttcttttttttgagacagagtctcactctgttgcccaggcataacagaccgatggaatcaactatggtacatacacacagcacagctgtgaaaaggaatgaagaagatctgagaaatgatatggagtaatttccggagacattgctaagtggaaggaacacatatgctaccctgtatgtaagaaaggaaaagaagaaaacatacacaaatctgcttatttttacagaaagaaacacaggaaggagacttcttcagtacacaatcaagttgg

SEQ ID NO: 215462 - DNA, 415 bp, Homo sapiens
tcctgggctcaaggattcttcccacctcagcctcccaaagtgctgggactgcaggcatgagccaccaaacctggacctaaaactcttgtttttatggaagtcctttcatcaaaaaaacaaaaaactataatggaaatcaggatctatttagatgtatataaactacattatcaattcgacagaatgactaacatcaaacttagaaaagaaatgtacatcttcaaatacatgacagcaaagattctaggtgttaagtttaatatgccaactacaagatacggaatttagagtatcaaaatgttctttttcttaagtagatttgttcccagtatttttaaaattacaacttagaaaaaaacttgttcctattttcttgtaattattccaatttaacgttatcagctttgctggatac

SEQ ID NO: 215463 - DNA, 256 bp, Homo sapiens
cagttttatttccctggaaggcagggaacccccatgcataagctagccaatggtcctgagactaggggcaaaactgtgtacaggcacctgtgtgtcattcctgaggacatcagagtgttctccggtgatggaaaacctctccttgattaataggaaggctttccatttatacctgaagcctaacgacctcagttggtacctgggcaggaacaacctcagattaaacacggcgatcatggccatccatctatcagtc

SEQ ID NO: 215464 - DNA, 370 bp, Homo sapiens
catgtcatcaccttgggaggtgagtagaaaagcctggtggaagggaaatgtaggcagcaagggaagagtaagaggtggaagtgtcttgtgacaagacagaggaacaaagattctgaaagtgcaggatgattgtcaagggtttgggtaaaaatgctttgatttggcacacctgttctcccagctatttaggacactttggctggaggatcacttgagcccaggagttcgaatctagcctgcacaacatatcaagatcccattccaaagaagaagcagaaaacaaggagaaggagaaggaggagaaggagaaggagaaagagaaggagaaggagaagaggaagaggaagaggaagaggaagaagaagaagaa

SEQ ID NO: 215465 - DNA, 219 bp, Homo sapiens
tgaaggtggttttttctgtgtagagttgttaaagtggtgtccttggcagggggaatgatcagtggagccttctattccaccatcttgctctgcctctcaatttcccttttgatttctgtagggtcagtagtaatatcttgtctttcattcctgatttgagtaatttaagtcctctctcatttttcttggtcagtccagccagaggtttgttgattttgt

SEQ ID NO: 215466 - DNA, 435 bp, Homo sapiens
acacatgctccagataaggtctgtcttaccagcagttttcagtgagactcttgcccatctgaagaaacctacaaatttctacttattatagttcaaaactaatcatgccactgtactccagcctggggaacagagaaagaccccatatcaaaaaaacaaacaaaaaatttcctttactgttatgccagggcttcattattctctaattgtgtatatcatttcttaaacctccaagtaagactttgcatttatctatgttaatttgcctcttgttgatgtgggcccattgttatagccattcaaaccctaattatgacatacaagcataccttcatttaagcagttttttaatacatttcatatttattttctgaaaaccagactaatcattcattaaacactttccctgtgtaagacactgtctcatttctcctt

SEQ ID NO: 215467 - DNA, 464 bp, Homo sapiens
ggaagggaatagtcaaatatatatgttatcattctcaataatctgagatgaataccttcacttctttttattccttcatataattttaaaaataaaatgttaaatataattcaaagaaaactcagattggaaccagcaactaataattaaatcatgacagccccctccccccgaaacaggaataaaacatttgctgaaacacaaaccacaattctaacttaaaaaaaaaaataaacttcaagtatgcaacgaaacaacaagcagaggtgccatgaacactgaattgcaaacaataaaaaatcacactgtacccccaaaatatgtacaatgattatgtgtcagttaaaaataataatacaagcaaacaaaataaacaaataaacctaaaaaggaagaaccaactttgaaaaataaatgcacagagactggaaatgaaaggacaattataaacaaaataatatcac

SEQ ID NO: 215468 - DNA, 303 bp, Homo sapiens
ggaggatcatttgagatcaggagttcgagaccagcctggccaacatggtgaaaccttatctctactaaaaatataaaaactagcggggtgtggtggtccacaccggtagtcccagctacttggaaggctgaggcaggagaatcccttgagcctgggaggcagaggttgcagtgagccgagattatgcactacactatagcctgggcagcagagtgagacttcatttcaaaaaacaaaaacaaaaacaaaacaagtaatttaggagtgtggagtcaatgatgtccctgcacccttttcatgttt

SEQ ID NO: 215469 - DNA, 227 bp, Homo sapiens
taactatcaagctgttacctgaagacagattagaattatatgaagctgtggccctcacgcctatctggagatcttatcatatagttattcatcagttttaaatgttatatattgttcctacggagaaaacagccactcataaatttaaatgaactctaaatgttttatgtgttattaacctttttttcctcagtcgtgctaatgtctcctaatttagatatatacat

SEQ ID NO: 215470 - DNA, 466 bp, Homo sapiens
agtgtatatacattaagaattttatgtcttcttggagagggtgggccccctttattattatgtaatgcccctcttcttccatgattttcagtgctctaaagtctgatttgtctgagattaatataactactcaaactttttgattactgttaacatactatatgtacttttctccctttcttcagttctgtccactctgttgatgacctcatcaaagtcactgttctcttgttagttttttaatgctagaatttccttttaattcttccatttctttgcttttattgcccatttgttcttgcacgttgtatactttttccatcagagctcttagcatattaatcatattttaaattcccagtgtgatcactgcaacatccctgccatgtctgaatctgattctgatgctcattttctcttcaaactgtgctttttgtctttcgtttttgttgactgttggacgtga

SEQ ID NO: 215471 - DNA, 504 bp, Homo sapiens
tgctacagaggtaaaggtgtggcctttgtcctaagggcaatggggagccagtgactgtggtggtgttaagcaggagagtgacaccacaggtcaccttcgaaggctcgtcactctgactgccccttagagggtagtttgtggagtgttttagtccagcagcagggagacccgttagcaagctgcacagggatccaggacaaagacgacagatagaagggacagtcagaatagataccaggaaggccaggaagttggagtctctgggacctggtaactgaatgcaactgaatgatgcagggagtgagggacagggagggagtcaaagatgcctcaatagccataagtaagtttccaaatgtacaggtgacttgccgtgcacctgagacctgggaagacaaagaggagtaaaacccaccgcccatgtcctccaaaaacacagaacctagccaaagaaacaaaaatctcacagagaacaattaaatcaccatcacaataacatttact

SEQ ID NO: 215472 - DNA, 217 bp, Homo sapiens
cccttcaatctgtggctgaaggcctgacagcccccaggaatcccctggtgcaagtcccagagtccagaggctgaagaacctggagactgatgtccaactgaaggagaagagggaacaagtgtctggcacaggaagaaagagagagccagaagactcagtaaacaagcttaaccttgcttctttcgcctgctttttctagctgcactgcagcttattg

SEQ ID NO: 215473 - DNA, 372 bp, Homo sapiens
caacctgtgagaagccttccaatactctaaagattgagccatctgtgtcgtgctctatagcactttacatctatgctagcaccctactatgttgtatcacaatgtggtgtttacccatctgcccctcctacaacttttgaaactccaagaggaagaaactatgcctcatttatctctgtatttctttctttttttttttttttggttggggggaggggtcatctttataggacaaataaatgaaccattttcttcccagacgtgctctccatttctacttagctctctttcctgctctcgattggagggttctgttgacaagtttttactcttaaatttcatataataaataaaattacattcacaaactta

SEQ ID NO: 215474 - DNA, 934 bp, Homo sapiens
gtgagggtggctttgtgaggatggctttgtgtggctgcacattgcccttggccaagccccgctgccaggagaggcagctcggctgccaaacctcctgaacccaagttacctgagcaagcagccctatcccctcgcctgcttctcactgcctcgcctgccttgggcctgcccgacccagggggtcacatgccttgttccccatcagtggagaccagggacaagaagacagttctgtgggaagagccaggaggaccatttgggaaaatacaggttccaggtgtgtctccagaccttgagagttggtgtctcctgggaagaggccctgatgagatctggggagattcggatctgatgagattcaggaagccctggcctctccgtacttgaggagacgggacacacaggacaagctgcaggctggtgagcaggttcaccttctattttgaagacccgcttcttcctcaggtacctgatcttgaaaacgacctcccctttcaggccggcgtgcagcagggcaatcgtggttcactgcaacctcgacctcccagggtcaagtgatcctccagcctcagccccacaagtagctgggaccacagacggttgagcccatagaacaggagtgagaagatggaagggcgagggggctgggatgatgaaaacttgcgcctgcagccaccattcattacagagcgccgggggccagctgcagaactgtagactcctcatacatcatcgtgttgagtcttcaaaacaaacctatgaggctggagtgcagcagcgcgatctcggctcactgcaacttccacctcctggtttcaagcaattctcccgcctcagcctcccgagtagctgggattacaagcacccgccaccatgcccggctaatttttatatttttagcagaggcgggatttctccatgtagcccaggccgg

SEQ ID NO: 215475 - DNA, 803 bp, Homo sapiens
gtgagggtggctttgtgaggatggctttgtgtggctgcacattgcccttggccaagccccgctgccaggagaggcagctcggctgccaaacctcctgaacccaagttacctgagcaagcagccctatcccctcgcctgcttctcactgcctcgcctgccttgggcctgcccgacccagggggtcacatgccttgttccccatcagtggagaccagggacaagaagacagttctgtgggaagagccaggaggaccatttgggaaaatacaggttccaggtgtgtctccagaccttgagagttggtgtctcctgggaagaggccctgatgagatctggggagattcggatctgatgagattcaggaagccctggcctctccgtacttgaggagacgggacacacaggacaagctgcaggctggtgagcaggttcaccttctattttgaagacccgcttcttcctcaggtacctgatcttgaaaacgacctcccctttcaggtcttgcttcccctcaacccagacaccgactcgcccaagggtcttccagctggctgagttggaacctgcattttttaaccacaaggaaaagaagcccagagctaccaagaataatattttattgacttggaatgagttttggaatctgtatttttaacaagctgcccagtgaaaaccatttcctcctcgtcgtggcgcaggtccagaggctgcgcccatctctcccacgtcaacagtcctgtgtccttggcgaaggactgttctctcattcagtgcctttcctctcttcctgggccaaatccctg

SEQ ID NO: 215476 - DNA, 725 bp, Homo sapiens
gtgagggtggctttgtgaggatggctttgtgtggctgcacattgcccttggccaagccccgctgccaggagaggcagctcggctgccaaacctcctgaacccaagttacctgagcaagcagccctatcccctcgcctgcttctcactgcctcgcctgccttgggcctgcccgacccagggggtcacatgccttgttccccatcagtggagaccagggacaagaagacagttctgtgggaagagccaggaggaccatttgggaaaatacaggttccaggtgtgtctccagaccttgagagttggtgtctcctgggaagaggccctgatgagatctggggagattcggatctgatgagattcaggaagccctggcctctccgtacttgaggagacgggacacacaggacaagctgcaggctggtgagcaggttcaccttctattttgaagacccgcttcttcctcaggtacctgatcttgaaaacgacctcccctttcagttctggaggccagaagcccaaaatcagtctcgctgggctaacgtgaaggtgtcagtcgggctggttccttctggaggctccagaaaagaatctgttttcttgccttttctggctcagtttctcggcttgtggctccttcctccatcttcaaagagcaccactccaatctgctcctccatcaggtcaccttctgcctgactcctacatccctttcagaaggacccttg

SEQ ID NO: 215477 - DNA, 229 bp, Homo sapiens
agaagtcctggtgacttcaagctcagaaccatggacggcagggctccctctggatgtggaattctccgtccctttccagggagggaacaaagcccacagcaccggaactggccagtcatggtggcttatgcctgtaatcccaggactttgggaggccgaggctggaggatcacttgagccaaggagttttaagaccagcgtgggcaacatggcaaaaccccatctctac

SEQ ID NO: 215478 - DNA, 894 bp, Homo sapiens
attctataataaaataaataagagataatagaatccccggagtccaacatttctgatttaatatgcttgtaacatttgcctaacacaccactgtgctctctgaaaagggcgatcattttcactgtatggtgttacctagactgcctatccccagggtcttccaaaagtccatgtacgtttgacagcatggaaacgtgtactgttgtagagcataaatactagagacttattgatggaagcctatttctgatacgtagctttttaaagaccactcaatatacataaactaaatgttaagtgacaaaaatattttcaaattatatttcctaccatttaggacctccttaaatttaacagcaggttaaaggtttggggttggcttattttttaagaaaatatacattttgattgttttgaaagtttatacatttaaggtttctaccaaacaggtagatataaccatactttcagcaagattacattttcctttttctattaagatttaaaatgttccattaaatctgagtagctagccaaaactgagctttccaggagactttctataccagtcttgctgggagataattgttgctaatctaagtccaagggatagtgggatgtttttcaacactggcaataaaaacaaaataactctttcaaagagggagaagcaagatttggattctaagaattttccttgtgaaagaaaactttgtttatatctaattggttgatttcactactgtagcaaagatacaagaaaaaaaactgggaaagatttttaaaaactagaaaattaacagtctatttcatgtcgtttggggaaaaattaaatgacattatgtttgtgaaaatgttttgtgaattgcaaagttatattaaaattaattgtta

SEQ ID NO: 215479 - DNA, 399 bp, Homo sapiens
ctgttgaattttaagattatttgcacttctcttaaggatatcaaagagatctgagttatcacccgatgccccatggtgagaacaatcacccctatttcctaattaggaaaattacagtctcatctaggagaaggtacactgacttgtcaaggacaaaagtggagagtgagggaaatggcatctgaacccaggaagtgcttcccacttcttcagaatgaggctgaatcaatttctccaagttcctccttcctagggatggaaggtagacctgtacttttcagaactctgaggtcagaaagctgaaaagaacagcagggagggactaagaggcctgatgtgtggttgtgggttttcttctcttaaagacttttcttacatgagatatcttccaggaaaatg

SEQ ID NO: 215480 - DNA, 449 bp, Homo sapiens
gaacaaccaagactggctttggtccctggcagcccagctctcacaaagccgggtggatgggtctgaaagctcccagagacctgagcacccctgtctcagatcccagcatccgtgagtgacccaacctgcctacccattgagctgtgtaattccatgcagaacacagggatccattcttcttcctctgtaatcttccacccctgccctcccagctccccaaaggtaaacaccttcataatttggagtgtttccttctagaccctttcccccacctacacagtcatatatacagagccatagaaaatatgtaaaatacttagtaatgtagtaatgttgtaggtggatatttaatagaaatgatgcaacccttgggaggctgaggagggcggatcacttgaggtcaggagtttgagaccagcccagcctacatggtgaaaccccatttctac

SEQ ID NO: 215481 - DNA, 348 bp, Homo sapiens
caaggtctcaccttactgcagagacaaagcagatccagagcccctgggcatttactcttgctacctccagcttcctagtgtctcaaaaagccacaatctcactcagaggaacaccccggtgctggttctaaatttgatccaaggaccataattgcaaacccatttctctaaactgtagaagctcaatcttccaacttgccaattgggcatgaaacaatgtaccttacaaggtttcaacgaagagctaaggaggccccaaaaagtaagatcctttccatcataaacattcctgctcttaggtcctgggccctagagcacactatccgagcgagtcagcatgagacatac

SEQ ID NO: 215482 - DNA, 154 bp, Homo sapiens
ggtctagggaacagtaaatgtggacagactggcattttacctcgggcacacttggacctggataggctccaccagtctgccctggaaacagaaccacagtgggtcagacagtcttttgtattagttttaaatacagagttgattgtctctcttg

SEQ ID NO: 215483 - DNA, 347 bp, Homo sapiens
tacataggtattttaatggttttgaaatttagaattaaaaaagatataatgtatctacccttctgtaaatgtatgagattcacctatgatgatataggtaattctagttcattccttttcaattatttattccacaaaataattccaaatattttatatatatatatatatatatatatatggttggggcaaaagtaattgcagtttcagactgtgaattttaaatcattataactaggctaaaacacatctttattaatcaaaataggaaccataacaatcaatacattttttgccaatgagaaataggtatgtttattccgatagcataaaaatccatgctttgg

SEQ ID NO: 215484 - DNA, 399 bp, Homo sapiens
atccactgtgagtgcaaggggaagaaataagtaccccctctcagcctgtagtcacatcttccctctctctatatggctatggacgcagtcccagaattctggatttcttgcatgtctgcctttaataagaaagcagagtttaaataggctctcactattgtttcgctgcttcacaccctcctggtttgctattgttcatgttcaatgtgtgtttctctactaggtacataattaactttctatttttccctcacagttcaaaagcttacaagtataaaagcttgctgttgtaaatacattgaagagagaacaccatactgtgtttatgggtgggaagatggctagaaaattttttccaaggaaaaggaaataaacatgtatccgaagtccctgaataca

SEQ ID NO: 215485 - DNA, 363 bp, Homo sapiens
gaattacataaaatgttaaaatttgaaccaaattcactttgagagtgaacaactcaacctagaaaaattgtataatcagctatcaaaagctacatacatgcagggttgtaggattctcatagtaatcacatctgagctatatttgtcgagtttataacagatatactttgcatacataatcacaaatcttaccaacagctctccagagtaggtaaagcattttttactgttcctgttaaggagacagaagttaaggatgtgaactccccaaggtcactcagaaggtaagaagatgggctaggattacggaaagggaacatgggaatgtgctgtaaaagttttctttctaaacaacttacagag

SEQ ID NO: 215486 - DNA, 817 bp, Homo sapiens
aatgaggaggacaacctggaggcaaacagaagagagattttctttttcaagagaaatgatatgaatgacagtgtcttgtgtcatcaaagtttaagtaaggtaagggttgaaaactctcttttgaatttagcacctggaaactcattggagttaccatcactatcagttacttaccttcattaaatttgtacatacatggagacctattacatcatattctaaattcctaaagtttgtgagttcacgggaaatgaggaaagggaagaggtgggactttggagagctgttttaaggagacgtgaacacacccaggtgcagtgctatgcaagtttccccattcagtgtgatggactcaagtcacctccgctcattagtaatatgatagggacagtttcagcaaagaggtgaggcagaagcgagcttgcagaggtggagccaggggaggggaggatgtcgacacaatgaagtgtagtcctttcaggcagctgcgcaatcccagcggagagacactcgcaggttcagaagatgattttacgattggcgaacctacttgttggagggagaagtagagtttggagagatgagtgttcgctgagcaggcactctgcaagcaggcagaagtggatcctagtgtcgtaatttgtcgctcattctctctgggttggcgcgatccggagtacttctatggcatttcacttgctgtaaagctcattttattccaacctttcctggtctctgttaagggagggtcctcaaccttttttgtaaggttggcacttttttttctatttgttgcctgccgccattattttttttt

SEQ ID NO: 215487 - DNA, 394 bp, Homo sapiens
cttgaggaaaaggatagtggattgggtatctggtactgcattaatctcctgcatcaatcgtgacctaccacttagctgcgtcaggaccccttctcttctagagagtgctaaaggcactgcctaatcacctctcataaatcccctgttctaacttacatagttgtctgctttcgggttgcatgttcttaaaagcagacagcaaaaccctggaggaggttttatacttagtcattagcctgtcattcctgctggagttttacagcctcaccttagttggattttgggagcttaaacagacttctaaaaatgttttaaatttaaactttgtattaagtgtacagaaagttttaagtatacaaaaacctaaggaggattgtataattaacccctatac

SEQ ID NO: 215488 - DNA, 197 bp, Homo sapiens
ggtagagatggaattttgctatgttgtccaggctggtttcgagctcctgggctcaagtgatctgcccgccttggcctcccaaggtgttagaattacagatgtgagccaccatgcctagccaccactacttcttaatagctaaataggatttaagattaaccatcacaccatcagatctgagcccttcaacaaccctt

SEQ ID NO: 215489 - DNA, 820 bp, Homo sapiens
agtgggctcatttagcatttcataaatgttctctgttctcaggtcatgaccctttgcccaatggtttcactatggagaatttacagatgtaactgaaaaaatataaactacaaataaattcattggataacctattttttttagagtcatttactcaagaaattaatagggaacccagagtctagcagtcgggcaattttgttttctgattctgcaacctgtggcagatggttttcttggcacgtgtgaccctggcattttgcccatatttacacggactgacaggagtttaaggctggagggagcatttattttacgtgaggtaaaaggtcatgtcaggcttgcttgtcacctgtgtgtacatgtggttaattcccagtcacttccatgtatatccacacactggcaaggggctatatgagcatgaagcagcaagtagcacttgacctctgttctataaagagtgctaacaaacaagcggaaattgtgatcctatcattatttggtttttcatcccttccttccctatatgaaaggaaaagctcttgaaatagtccattctggcggggtgcggtggctcatgcctgtaatcccagcactgggatggtcagcccgaggccaaagtgggcagatcacttgaggccaggagttcaagaccatcctaggcaccatggagaaatcctgtctctacaaaaaacaaaaatgagcggggagtgttgtcctagctccttaggaagctgaggcacaagaatcgcttgaacccggcaggcagaggttgcagtgagccaagatcactccactgcacttcaccctgggcgac

SEQ ID NO: 215490 - DNA, 500 bp, Homo sapiens
cctaaagaaaggaaggagagggaaacaagacagcctgctcggctgggagccgagagacaaatcccactgcggagaaaacagtagtgggagactgcctgtggtccacattcccactgtggactcctgcaattctagccattggggagcccctaggacctcatgggctctgaaactaacataaggatctgtctggaaatggtgcaacagcaccactccactgaggaaaattgcactgggtcccataatccccctaagtcctaagcagctacaacaaggcaccattttgacaacccagcccacaacagactgagcactatcctggggcccagcagctggtgcacagacagaagtaagaaacaggctgccaccaccaggactgaggcacaagcggggcatgtgtccccgaccgccgacctaggctgccaccattaaaggcagcctcatgttccccagtagcagcagcacagcacagccactgctgcccctcacccaatcattcc

SEQ ID NO: 215491 - DNA, 574 bp, Homo sapiens
attaaaaacctcaaaccgttgctcttcttggagtcacttgaattggtagccctgaagaaaattcctaaattagactttcttctgttcttgactgaacgaggatgaatgagtcacccaatcctgtgccaggtacaggaataaatgctggacagttacagatgaaagagagcatgttgccctttaaggacttcaaagtttacagagagaccagaaaacaagaaattaaagtacagtatgatatatgccacagagctataccttggaaagaaaaaggatggacagcacagactttaaagcagtaacaggaggtgggtaggaaagccttccagagaaggtaagaatcgagaggagtcttttattttccctgttactttattattaaaaaatgtcaaacataactgaaaggttgaaacatctgcagatccaccagcttcttctacaattgtgtaaagcatagttcccataataaattccttatctcatcattcatgaaggttctacctccctgactgatacacttactggtactggccgtggtttcaggggacagatcattaaggataggaattggaaa

SEQ ID NO: 215492 - DNA, 665 bp, Homo sapiens
gttttattcactgattgatctcaggtagaagctctgttgggcgccattcttccattctttccttcagctgctttttagtgagaagctaccatgtactgggtaccagtctaggatctggggatacagctggggttgccagataaaaatacaggatgtccacttaaatttgaatttcaggtaaacaatgaataacttcttagtttatgtctgtcccacatactattttggacatacttcttctactaagaaaagcattcattgtctgaaattcaaatttaactgggtatcctgtatttgtatttgctaaacttggcaaccctagatatcccagggaagaaaacagacaaatatccctgcccttgtggggactgcattcaagtgaaaggaacaggcaataaaagaaatatacatatgaataaaatacaccatagcggaaagggcaatgaggaacatgaagcagggtgaggagacagagaatgccgggggatgcgatttttattaggacaggcagggaaggtctctaacaggtgacttttgagctgtgaaatgaacaaagtaaggtagtggccaggcaatatctgagggaacagtaagtacaaaggccctggggtggggtcatgtgggcgttatcaaggaacaggaggacgatcagggtggcagaggga

SEQ ID NO: 215493 - DNA, 540 bp, Homo sapiens
tagcaaaaccttgtctatacaaaaaatacaaaaattagctgggcgtggtggctcacacctgtggtcccagctgcttgggaggctgaggtgggcagatcacttgagctcaggaggcagagggtgcaatgagccgaaatcacgccactgcacaccagcctgggcaacagagcaaggcactgtgtcaagagagaaaaaaaaaaaaaatgttctaatagagatcagcacagacagaacagacaggttgcaaggctggtgacagtgcactgaggtctgcatcattagcatccctcatctgccctgctggagctgctgacctctctgaggctgcctttcactgtctcccaatgtagccttgtctcctacctttcttcctcttcacctgctccaaataccctgctctagccctgaaaagaccaaaggtatacatcaaattctttctaagaagccaatcacaagagagttctctctcagcacagaaatcctgccatgctttatccctgtacctgcttcctcagctctgaaaagggagagaaagggaaa

SEQ ID NO: 215494 - DNA, 426 bp, Homo sapiens
cattctaatctgcactcgatcttagccaaaagtctgagaagcaatttccattctaattgtaaaacaagtggcaagagctaggcatctctgggactcctttaacagaagacgaacaaaggggaagaccattgcctctttctctcaatccctttcctctcccctcagctcagagctccaggtggctccagcagctctgacatcacctgcacccatagcgcttgacagggcagcacctgaacgcttgtaagtcagacctgacaggagcacctgtgctgcttggcagggtggtgtggggcgaactggagtgaatctgtccttgggtacatggaaaacatactctaaggactcctgaaattgaagaaggcttactgctgtgaccatggccatattgatagctgtaggcaggctgttggggtgtggtgagac

SEQ ID NO: 215495 - DNA, 748 bp, Homo sapiens
agaagatatgaacactgatatcaaaaatataagtcttgtcagctggccacagtagctcacacctgtaatcccagcaatttgggattgctgaggtgagaggatcacttgagtccagaagttcgaggctgcagtgagccatgattgcgccactgcattccagcctaggtgacagagattcatttggtattttttaataaattagaagtacatcatattgaagcatggtatattaaaaactgtttctacataaactgctaatttagatgtttaatcatcatttccacaagtgaagaatcttgctgtttctcttacttggtcttaatcattttccaaaaccagtaattttgcagagtgaaataaaattagcttctaataagaacacaagagaaaaactgaactaaaagtgattctcatatataaaatttaatcactaaactacaaatttatcatccaaatttagaaactaaatttagaaactaaatttagaaaactatttttggaagcactggaagtatatatttaatctgacagactatgaagcactgacaccttggcagtggtaatcagatggtaattattccctaggcacaactcctaatcaataaaagtacagtcatgtgcagcataacaacgttttggtcaacaacacactacatactgacagtggcctcaagagattataacagagctgaaaaattcatattggccagagatgtcttgatgtctgaccctgtgtaggtctaggtta

SEQ ID NO: 215496 - DNA, 324 bp, Homo sapiens
tttttttgagacagagctccaggctggagcacagtagcacaatctcagctcactgcaacctccacctcctgggttcaagtgattctcctgcctgagcctcccaagtagctgggattataagcacccacaataacacctggctaatttttgtatttttagtacagacgaggtttcaccatgttggccatgctggtcttgaactcctgacctcaagtgattcacctgcctcagccttccaaggtgctgggattagaggcatgagccactgcacccagcccaaattgattcttttataagcaaaaactaatatgtaaaatcatcttt

SEQ ID NO: 215497 - DNA, 621 bp, Homo sapiens
tcagaagtctttgtgtccctgtttttgtgtccatttcatgtaccttggcactttaaggcttgtcctgcaaaataaaacattgcatcatcacttgtgaaggcagagcttgggagtttgcactgctaagatgaggataggaaagaaatttatgccgcagggcctttgatgctgcccactcacctgtctgcacagccagggcacggccagcgggagtggagaagatgagcgagaccaaaaccttgccgtggggaggagggtggcatagccattgataaatcgggacttgaactatcccatcactctaaaaatattttttatctgattacaaaagtaatagatggccaggcatgatggctcatgcctgtaatcccagcactttgagacagcaaggcaggagtagcattcaagcccattagtttaagaccaaccctggcaacatggtaaaatcctgtctctaccaaaaatacaaaaattagccatacatgatggtccatgcctgtagtcccagctactcagaggctgaggtaggaggatcgcttgagcccagaaggttgaggttacagtaagctgagatcatgccactgcactccagcatgggcgacagagtaagaccctgtctca

SEQ ID NO: 215498 - DNA, 521 bp, Homo sapiens
gtgtgaatggtgagtgttactctataatagtttatataaaccagaagttggtcactgtggtggcaacttgtttggtgctagtcattaggcacatcagttcttaggaaattctggagcatcttttggagacagtgaacatctgtctttttttgtatcaggtctttgataacttttgatggttattctgttggttacttcagctttttaaggtttacagcaggcctgggaaataaattctcgtgataacctgaaagtcttcagttaatttaacatcagatgttgctagtatgagatgataaatgttagggtttttaagtaaaaggagtttcatgctgttacttctctttggtagtgggttttgtgacttctacttcagatgtagtggtggtagtgatgttcctttggcataaaatgtgtatattaagtcactttgtttgcagtactgctaagtggtctgatagagcaggatgcttagatataagatgtctgctatttatttttgttggcacatttagtcactt

SEQ ID NO: 215499 - DNA, 277 bp, Homo sapiens
taagccaccatgcccaacaaccttcttcatttctgattttatttacttggatcttttttttcttcttagtctacctaaaggttgttgggcatggtggcttatatctgtaatcccagcactttgggaggccaaggcaagaggagcacctgagcctaggcaatgcagtaagaccccatctctacaaaattagtcccatctctaaaaaattagccaggcatggtggtgcacgcctatagttccagctacttgggaggctgagtcgagaggatccttccag

SEQ ID NO: 215500 - DNA, 1084 bp, Homo sapiens
ttcagtccagtgcctgggacataaaagacactcaggaaatggttattggtatcattttattattgtgtcttcactgtggatgcatctctgccccttcctacttcgtaagaaggatattaaagttcagatactttattcttcagttgctttcaagttcaaagaaagtacgtatgtgttaccagttcaactgggtctgagccttccttgttcccacctgcattgtttcctcatcagctccttgctctcttctaccagcacttgttttatttttatctctactcgtttctgcttttttctgttcctcattttctttcagttctgtttgtgaaacttctcacagctgaaatcatagcagtctcctatcaataaaaaatagttgaatgaggatagaactctttcgcatgcatgtgttgccgagggcaagcttctttcttgtagcatcacggggaggcattgcaggagagaggggcaggtgcactggctttgcattaggaaagcccagtagctcttagacttgctaaccgtgtgacccagcctcagtaagctttagtccccccatctgtaaaatgggagcagtgagagtttcttgaccacagtgttgttgtgaatgcaggtcctcacttccttatatgaaactcgggccatatgctgtggatttcgcaatagccctgggagttctgaacagcatcctatagtaaagcacattaattattttgcagtcaactgtatgaatattcatgctgggataaataaagattataaatgggtttacatcagttcaggtcaaacttttcaaccaaatgagttcaagtctggttgggctttgccaccaaataaattatgaataaattttcagttctcagagccttgtggctttcaaaattgtgcataatggattctgaaattatatcatgttacaaaagacatacaaagctgtagctggtacaataagctctcagtaaatgttagtggttatcgttaccatggcttcagaaactgtatagtgcaagtttgtccttattactctcttccatttttcaaaaaaataatattctcaagtatattttcttctctgccttgtcca

SEQ ID NO: 215501 - DNA, 120 bp, Homo sapiens
ctacttctgctagtagcactaaatcacactggcagttttctcttttgactgtacttatctcatccatggaccttgtgtttattcttgtaccaatcagaacaattagacatattgtgttct

SEQ ID NO: 215502 - DNA, 422 bp, Homo sapiens
aggttgagaccagctgaggcaacacagtgagaccgcatctctacaaaaattttttaaaacttagccaggtgcagtgttgcatgcctgcaatgccagctacttgggaggctgatgagagaggatcgcttgtgcccaggagctagaggctacagtgagccacgattacgccactgcactccagcctgggtgacagagtgagaccctgtgtctaaaaaataacaaaatacaagtgtgtgactgtgggtgcacataacgtgtgcacgtgtgtgcgcatgcctctgtgaatgagtgcttggggtgtgtgtgttgagtgtgtggccttgtgtgtgcatatcagacggagtggctgacattgctgcagcatctgccagaagggcctggctccgggggtggaaggcagcacccagttccttctttctgtg

SEQ ID NO: 215503 - DNA, 452 bp, Homo sapiens
tcagtatttctcagagatgtctgcactcccgtgttcacagtagccaagatacagaatcaacctaagcttccactgatgtgcacggatcaagaaaatgtggtaaatatacaccgtggagtattatccaagcttggaaaagggagaaatcctgttgtttgtgaacccggaggacatcatggtaagtgaaataaaccagataccgaaagacaaataccacatagtctcactgatgcctggcatctgaacaagttgaactcactgaagcagagtggaatggtggttacaaggagctggcaggtgggtggggagagggaattggggagtttttaatcaaaggctacgaaggttcagttctgcaggctgaataagttctggaggtctaatgtagagccccaggcaggtgactgtagttaaccagtaccatgtgataggcttgaaattggctgagaggg

SEQ ID NO: 215504 - DNA, 126 bp, Homo sapiens
ccttattttatttataacaaattagaaattcacacatataaggtcaattttccaagttcaaaatatgagtaagaaactgagaaataatttagattgaaatctacctggctccaaatcaccacacca

SEQ ID NO: 215505 - DNA, 442 bp, Homo sapiens
tgcttttcatactcctgatgagacatgatgctcatttctcaacaaagatttattgaatgtctgctatgtttaatgcaccatggtggagcctggggaagatgcctacgccatacctgctgtccttaatgaactcacaggccagcttcgggcagacattccagcaagcattggagtccaggctaatagtaaccagagagaggtacaaactgggtgaaagaaaggaacccttcctggaggagtcagcatttgagcagttcctgaaggtgctggtgggtagagggcattccaggcaggtgggtctcttcacagagtggactgcagtttgggttgcctgacaaagatgagaagggttaggtttttccttcctccctcctgcatgaaataatgggaaagaagccgtgatagaaagatttagtttggagtaggataaaggtgctaagaa

SEQ ID NO: 215506 - DNA, 843 bp, Homo sapiens
taaattttgtatttttagtagagggagtttcaccatattggtcaggctggtctcaaacttctgacctcaggtgatccgtctgctttggcctctcaaagtgttgggattacaggcatgagccaccatgctcgactacagttactttattatttaatttattccttaatacaacacctgtatgaggaaactgttataatattcattgtttggggaaactgagcacagaaagctcagtattttccctaaagcaaacaagtcatatgtggcagaaatgggttcataactatgatggtgtcacagcacctgcttttagtaactacaagactcaatttatttaaaatgttgagttcactgacataaaggaagtttcagtatcgtttgtcataaactgtaggagctcctgtgaatcaaataaaatgagaggtaatagttttgtatttagggtagttcatagcctagaataaaataatcatttcaagagacataagagaacctataatgtataagtgttttgttctgatctcaataatatcacaaaatattcaacgaagactctgaacaggtaaaggtataaataaacctcgccatcttagtaggcggacttagtattacagtcagaattgtagtgaagctctaaggtttcaggtcttcactagggtagcatgctcacagggcagggcagtggggtgtgcagaacacttgctggagcgtgtttgatttcggaaatctgtgatgtttgtctggggagggtattcctcacactttaactgaacacgtgtggaggggtgagtggcaggaatggtgaagggagggccagtctggaaagctaactaggaggatgcc

SEQ ID NO: 215507 - DNA, 417 bp, Homo sapiens
taaagggagtctcactctgtcattttagctggagtgcagtggcatgaccttggctcacagcagcctcaacgtcccaggctcaagcaatcctcccacctcagcctcccaaatagctaggactacaggcttgtgtcactatgcctggctaattattattattattatttttgtaaagatgaggtctcactgtgttgcccaggctggtctcgaactcctgagtgcatgtgatctgcccacctcggcctcccaaagtgctgggatagcaggtgtgagccactgtgcctggccagaatttttttttttgtttataaaagtgaaaaacaaggatttattttatgacattttgtagttgtaaagagccttattgttccttgagtccagccctctgctgtgggccaaaggacaggagtcacctct

SEQ ID NO: 215508 - DNA, 171 bp, Homo sapiens
ttttttttttttgaaggagtgacagtacaattttgtgacatagctatattgaatagtggtgaagtctgagcctttattgtaaccatcacccaaatagtgtacgttttacccattaatttctcatcatccactcccctcccatcgtcccgccgcccttctgtcgtcttctcg

SEQ ID NO: 215509 - DNA, 434 bp, Homo sapiens
atagtgtcttgtactcctgagctcctagtatactctgatgtctagccaactttaagtaaatggagtgagcgacatgtaaatgtctttatggtttgacattttattaatcttgagcattggaaaagtggctggtatgactaaagaactgaatttttattttttatctaatttgaattgcaactgtggacagtatagctgtagccccggacttgttctgtggattacagaatacgtggacattgatggttttctctttttactgagcagtaaggaaataaaagctgaagctctctggcccattacatttcatttaactgcttgttttgttttatttattatatatttagctgaaagctaagtccaacaaaccatttttaaagatgtgcctgccttggacaacagtgaaagcaagcgttaatgagtttggatttcaa

SEQ ID NO: 215510 - DNA, 444 bp, Homo sapiens
cctcagtgttaggacctgagggctcatgccgattgtatgaagcaagaagagaggcaggaggagggaaaactggcgtctctctcactttctctatatcgtcttgacagtacggttgcttttcttggtgtgattctgtcttctaaaatattagaaccaggctgggcgccaccgtctgtaatcccagcactttgggaggccgaggcgggcagatcacctgaggtcaagagttcgagaccagctgggcaacacggtgaaaccccgtctctaccaaaaatacaaaatttagctgggtgtagtggcgggtgcctgtaatcctagctactcaggaggctgaggcaggagagtcacttgaacccggaaggcggaggttgcagtgagccgagatcgtgccactgcactccagcctgggtgacaaagtgagactctgtctcaaaaaaaaagaaa

SEQ ID NO: 215511 - DNA, 282 bp, Homo sapiens
attaaagttactgcaggtatggtagtttaggacctgtgggttcgttagccaatttgcgtgtgaacgcacttgtaagagagaaggtactgaagccacataacatgggaagaaccaaaaggaagaggaacatttagcttgggtgagagtgggcttggggagaaggtagacacaggctgcttgtcagtaacagcttaggacttctgtatggaagaaggagcaaatattccgtttaggcacagccagagggacctacggggaggaagattttcacctcacttaagg

SEQ ID NO: 215512 - DNA, 849 bp, Homo sapiens
tgtcagggtagtctggggagtctgggacaagtgagagccatatagctgtgcctggctttaagagatgatgtattttcgagagtgctcttccaacagtcacagttgggcagagggtgctccatgtggccattgttttctgcttcatttggccaacaggtatttacagagtgtgtgttctgtgtcaagcacgatgctgcgttttggagaacacagagaaggcccccatgcccaggagtgtgtgattccaagctctgcagtgagcgtggcctccaaaacatacattccacatttcctggagcctctgcattcccctgggctgtgtgtcacacaagcttgtgccctgtcaacatgcatttaaatgtactaggagagcctgctgacaaagatcatccttttatgacataattacttgccctacctcctgcaattttacctatttagaaggttttgcatttcacatttcataaagtgttactaatcgaaatgtcactaatttaaaattgagaacactgttacaaagatttaactaaagtttatctttgtactctatggtggaggtaaatacagaggctactacttttcaagaatattagaagcataatttagctaaaataaaacacgttcaccatgtggtcattcttagcactaaagaaagaccttacggtatctgtgctggccttgtctaaggctccatatgtattttaaaggatatttttaaggttattcctcaatctcccgctggcctgccactagtctgaattggtgagcttttccccaatcaggttcttaaggccaggcacacctgtataggcaagttctagagggattacccctcaaaataatgttgcc

SEQ ID NO: 215513 - DNA, 197 bp, Homo sapiens
acctgcatccaatgtgtctgccaatcctacagcccccatcgccttttccttcaaaacagacctagaagccagttatcactgaccacctgcacttgccagctaggtccagccccttcctgacttctggggatcagtgcagttgtcccctccctggtctccctgcaggttctgttctccccactgcaaccagaaacacc

SEQ ID NO: 215514 - DNA, 852 bp, Homo sapiens
taagatgaagtcactctctgttgcacaggctggagtgcagtagcacgatcttggctcactgcatcttttgcctcctgggttcaagcgattctcagcctcctgagtagctaggactataggcgcgcgccaccacgcctggctaatttttgtatttttttacagagggggtttcactatgttggccaggctggtctcgaactcctgacctgaagtgatccacccaccttggcctcccaaagcgctgggactacaggcatgagtcaccacgcctggccaaaaaaaagattaatcttaaacataaccagaagtctagatgtttgacaggtttatttatttattgagacaaggtctagctctgttgcccaggctggagtgcagtggcgtgatctcttgggtcactgcaacctccacctgtgggttcaagacaccctcccatctcagcctcctgagtagctgggactacctgcctggctaagttttgtatttttagtagagaccaggtttcaccatgttgcccaggctggtcttgaactcctggcctcaagtgatccagcacctggcctcctaaagttctgggattacaggcgttggccaccatgcctggtcagtttggcaggtttaagggttgacttatgcctgtgactgtggctatctttctttatattctcatggcttaccccaggctggccacttgtaatatatggtcatcttaaccaaattagaaaaaggtattccagttgatgtggtggctcacgcctgtagtcccagcactttgggagaccaaggtgggtaggtctcttgagcccaggagtttgagatcagcctgggcaacataacaagacctcgtctcta

SEQ ID NO: 215515 - DNA, 383 bp, Homo sapiens
gcaacataaaaatgatttagttttgccaatgacaatcatcatcaccctcatcacgtagccgtggttgaactgtgccagatttaggaccatagccacagctttttatgaataactattctataggattatcttgcttgagaaattctcaggagtagggaaagacagcaaaattttcatgagctatcctgtcaaccttctgaaaagaagttctgctctctttttagctgtactctccttttttgttgttgagatggagtcttgctctgtcgcccaggctggagtgcagtggcacggtattggctctcaagaggtcatggctgcagtcagctatgaccatgtcatttcactctagcctgggagacagactgagaaccggtctcaaa

SEQ ID NO: 215516 - DNA, 343 bp, Homo sapiens
gagccacaaaattggaaacaatacaattttttttaaaatgtgtaggatctggccgggtgtgtggtggctcacgcttgtaatcccagcactttgggaggccaaggcaggcggatcacgaggtcaggagattgagaccatcctggctaacatggtgaaaccccgtctctactaaaaatacaaaaaaaaaaaattggccgggcgtggtggtgggcgcctgtagtcccagctactctggaggctgaggcaggagaatggcgtgaacctgggaggcggagcttgcagtgagccgagattgtgccactgcactccagcctgggtgacagagcgagactccgtctcaatt

SEQ ID NO: 215517 - DNA, 1231 bp, Homo sapiens
agagagagagagagagagagctattaataaaacagaggagtacattttacccttgcaattccagtcaatactgtggtgtcatttcagccaacataccaacattcagtcaaatcccaaagccaaatggataatttcagatggaatggagttagacaggaactggcttccctttctcctgttactatgaggacaacccacacctgctcagtggcctaaaatattttaaatatgttcatgacaattatgctgagaatgccaggataacactgatggaacccatgacttcaccaggattgtggtctacatttacaggcctagtactagaactagaccggcttagagagtgggagatatccctctgttgtccatcgaaagataaaaatacaggctttcagccgggtgcagtggtgcatgcctttggtcccagctactcagggggctgagatggggaatcctttgagcccagaagtttgaaaccagcctgggcaacatagtgagagacctccatcttaagggaataaataaataggcaataatgaacaccaagggaagcaaaacactgaaaagaattttaaaatttgttgtagaacattaatacgaaatttgaaactgcaaaacaatgtaaaatttaatgtcatgttgtcatttacttttgtgtatattgtgccatgtttattttcaaagtcctatctagaaattctaaaatgtctaattttcttaattaaaaatccagaattctgtagtttctgaaattcaaaataaatactttaacataccaataaaaacaattttcactaaaaacaaaaccttgtggcctcgttttgccactcgacttttaactctggcaagcttttccatgggccccaatttgggttaactgggcaaattgcctttaaggggcggattacaattatgggccggtttaaaacgtctgccgggaaaaccttggtttcccatttatcctttgggcaaatcccttttccactgggctaaatcaaggagcctcccatcgcttttacaattgtactcttatgctacggaatttggcgctattttgaaatccggttttttaacccttttttactagcgctcgtcgtaacctctttaacacaatacccctatcttgatgttctcttaacagcccttataagcgcctctctttgggcctttctgggtgctctcttccatcctcttttctagtgtgttcccttacttacttctctctcggccg

SEQ ID NO: 215518 - DNA, 324 bp, Homo sapiens
atgtgtatactatgcagtggtattctatgggaaagaggtggttcactggtcatctacaaggggatctttgagatgagaacagagaaataaatgcacattatgccagctcatgcaaaacacagaatgcatcgccactttcacaccaacaggtataaacattaccttttctgaacatatggaaaatattttaatctaaagactgaggacaagctagctcagcaagtcagaggatgacagcatgattgaatttctctggacagggctgtttgaaaacatttggcaaacattaggtcgatttgacaaaaatgacactttcacagtgta

SEQ ID NO: 215519 - DNA, 402 bp, Homo sapiens
cgagatgtttgtgtacatgcacatcaaggcacagcacctttcctcaaacttatttatgacacagagacctttgctcatatgttttcctgctgaccctctccccactattaccgtattgtcctgccacatccccctctccgagatggtagagatagtgatcaataaatactgagggaactcagagaccagtgccagtgcgggtcctctgtatgctgagcgccagtcccctgggcccactgttctttctctatactttgtctctgtgtcttatttcttttctcagtctcttgtcccacctgaggagaaatacccacaggtgtggaggggctagcccccttcagaactcaggtgtttgaaaccagcctgggcaacaaacatggcgataccctcatctctattaaa

SEQ ID NO: 215520 - DNA, 454 bp, Homo sapiens
agccttggctccacaggggttcacatttgcagaggggttggggaataggagattgtgattttgatatggaggaaaagtaatgttccctgtttatcccagcatttgttacgaatctgggagctcatgaaaggcaaatcgtggttttgcatggaaagcaggtacacaggacaataaaggaggatggcgaagggcatgcagggagagtagacacctggacatgaggaagaggaaacgcaggcattcttacctataccaggaatttcagggactatggggattgtgacaacaaaaataaacagaggatagaagagaacctatttgtccacccctaggggatgaaccagttatttaaaagaaaaaacccagccattaaagtcacatcatacattaaatgacagccaacatatacacgccaggtatttcaccgagcaattcccatggattaattcactta

SEQ ID NO: 215521 - DNA, 394 bp, Homo sapiens
tccacccgcctctgcctcccaaagctacatttattaacactaagttgagtttacatgacagtgatgcatattgaggtgctttacaggaagcggttagaaagttcttgcctaggcctggtgcagtagctcacgcttgtaatcccagcactttgagaggccgaggtgggcgggtcacctgagttcaagagttcaagaccagcctggccaacatcgtgaaaccctgtctctacaaaaatacaaaaattagccgggcatgatggcaggtgcctgtaaccccagctaacttgggaggctgaggcaggagaatcgcttgaaccctggaggcggaggttgcagtgagccgagatcacaccattgcactccagcctaggcgacagagtgaaactccgtatca

SEQ ID NO: 215522 - DNA, 356 bp, Homo sapiens
cgtccttcatcatactaccccttcatcatacctaccccacaacacgcacacactcacaacacgctcacacacgctctcacattcacactcacaaacggtcactaacacactcacacatgcccacattcacacacatgctcacactcacacacgctcacattcacacacactcacgctctcacattcacattcacacatgctcacacactcgcacacacattcacacatgctcttattcacacacattcactcacattcacacattcacactcgctcacacacgctcacattaactcacattcacacacacgctcaggtaggtatgatgaaggacggggatcctctcgattccggtc

SEQ ID NO: 215523 - DNA, 461 bp, Homo sapiens
catgctcacacactcgcacacacattcacacatgctcttattcacacacattcactcacattcacacattcacactcgctcacacacgctcacattaactcacattcacacacacgctcacactcattttcacactcatgttctcacattcacacatgctcatgttctcacattcaaacacacatattcacacacttgctctcacacgctctcacacactatcacaggctcacacatgctagcacacgctgtcatacatgctcacattcacacacaagctcacacactatcacacacgcactatcacacacacccacatacacactttcactcataacacgttcacaacgctctcacaacactttcaaatttgtgctcatgtacactcacaagctcacatgctctcacaacacacactccatacactatcacacacttgtcctctcataggtgcactcacg

SEQ ID NO: 215524 - DNA, 665 bp, Homo sapiens
agggatgacaccaaggtaatcatgagggatccacccccgtgacccagccacctcccattaggccccaccttcaacactgaggatcatatttcgacatgagattcggaggggccacacatacaaatcatatcccttgtctatacaccacaattttattgcataaacaggacacattcttctgctgatcaggtattctaggaaaccaacgtgttaatcagacaattgcttgcattgttgaaaactgactagaacgaatggaatgatattacattatacatccatggagttacagaatcttatgcaattttttctattagggatatttgtgtctaaaatagagaactggttatttagaagcaaagttctcctcccataaatggacctggggtcccactgacaatagtattgggtttttagaggtgcaaattagttgtagtcctgccttccacactgaacatggaaataattgagagacacatgaatcagacggatattactgatggggcgcattgctgagcagccttaatcaatcttcagccttgaattaaacagaccgtctgagttccagtctcctgccagcctccatctcatggcagagactgcccagtaaactttgttgttactggagagggaagcaggcaggctgacatcagagagaaagccca

SEQ ID NO: 215525 - DNA, 466 bp, Homo sapiens
gcctgattgtgagggtgctggggagccaaggagggctctgggaagtaggcatcctgcttagactcgcatcgggaagagcaggccgtggcttcagggatgcaggactggagatgctgctgactaggggtcagggtgtccgtctctgagggcctgatggggggctggactgacagcaaagttcacccaccctgtggcagggcccgtggctccctgtctctgattctggaggtgagccaggcctcttacctgccgctgcaaaggacaaggcccagggaggcagtcagcttggggcgtgatggagtgaagttggaacgtgccctggggtgggggaggcgttgcccagcctggctggcagattcctctcagcccgggccaagggccgggcctgtctccttcacaagccggcggaaaccggggctggaaaccccagacccgccacttccctcagaggcgcagccgcggccgc

SEQ ID NO: 215526 - DNA, 124 bp, Homo sapiens
taccaactattgtcacatacatataacgcatatagacatatggacacacagaagatacttcttacctggagttatatactagcaatattttctgctttcactcttgcccttctgtcgtcttctc

SEQ ID NO: 215527 - DNA, 333 bp, Homo sapiens
gctttatgtttattgtggaccttgaggttgaatctacagtctaatcctatcatggtaactcacccatttccttgcctatgatggattctggcacctcggcttaagccaatcagagcattgcattcacctaaggactccttggattatggctgggcatgagacctaaactgggcattcagactgagaggaatattttcccccattttgggggaagggtttagctgtgggcaactgattaatgcaaggatctagaaccttgatgtcattgagtcacgtattcagtcaaccaagctgaaaccactttacagcaaatatcttctcttcagtcctcat

SEQ ID NO: 215528 - DNA, 376 bp, Homo sapiens
tccttatgagtgagtgaatgaatgaatgaatgaatatatctataatattcaagtcctcatacttgatagatgatcaaagtatatataactttaatttaaaatataaaaaagtaatttaaaatatacattttcttggtgacagagtgttctgaaatatagaatgtttcctttcaagatatgtcaatatcccaaactggtacgtttactgtttcattagtaaaacatatacacatagaaacataaaattaggctgctgaaagagtcagaaacataaaaaaggaaaagttagaaaggtaaaaaagctctcaccattttttttcttaaacaagaaattaactgcaactaaaatacattaaaattttgaataacaagctca

SEQ ID NO: 215529 - DNA, 424 bp, Homo sapiens
acatcctgcagtacacagggcagcgcccctgcagcccccacccccacctgtccaaagagtgacctggctccgagtggcactagtgtcgaagttgacaaatgctgcaggaaaccaacgtgtatttagtgtttaatctgcatcatggactgtgttagcttcgatggagatggattaagaattaagtgaagctggccgggtgcaggtggctcacacttgtaatcccagcactttgggaggctgaggtgggcagatcacttgaggtcaggagttcaagaccagcctggccaacatggtgaaacccccatctctacaaaaaatacagaagttagctgggcatggtggcaggtgcctgtagtcccagctactcaggaggctgagacaggagaatcacttgaacctgggaggcagaggttgcaatgagctg

SEQ ID NO: 215530 - DNA, 232 bp, Homo sapiens
gggaggttagaattgcaggcagaggagaccctggagcaataatccctggaaataacaggaatttcggggacaaatccagatcctcaaaaactgtgaaactgagagagtctgagcagagttctccaatgaaccaggtatcatctgtgtgccagggtgagaggacggaaaacgggccaggtctgtctctgacaggttgagaaggtggagtgggaaggagggatccggaaggcca

SEQ ID NO: 215531 - DNA, 393 bp, Homo sapiens
cggggaccatgtgtcccaggcgcctgagtccacagcctgcagggagggctgctcacagctatgagctctggcaccccgttgcctggcagtgggttaagagcgccccctggtgtctgtggccacagccacaggcacaaattccagggaggagactgcccggcggcagacgggccgcagcatcctcacccacacctgccattgggtcacctctggccggaccagaggaggcctgaccctccagggatggccagcaagagctggccagaacctcgcaggttccagggaaaagcaaacagactctcggcaaaggccccctaagggtgaccttagttcacacccaggggacacagtggacgacgtgggtcactgctcgggaacacacagtaggtagca

SEQ ID NO: 215532 - DNA, 345 bp, Homo sapiens
aaaaatggtgataagtcagtctttccataaaggaaaatatggaagcaagtgaacactgttaatgaaattcaccttctctgtgcattatgcaagaaaaatataagcagaattctcaccctacagttgggcatgttctttataacaaccagctgactgactgaacgaaaagaaaaccttgggaacaaggaaaaattatcaatgaaaataaagaagttccagaaaggagtgcgggggtggaaacagacagacacctgacatgaaataaatcacctgatatacactgccaaggtctaatttgtttttccacctgtttttcctcatgccatgtgtttttcattaagataa

SEQ ID NO: 215533 - DNA, 508 bp, Homo sapiens
aaaggcacccactttagattcagtgatataagaaacccaccccacaaaccacacaggtctccagcaggtacccttctctggagtctcctccttcagttgttcagaaaacaatgccacagcaccatctactgaagtagcgtttcctcaaatgtcaagttgtacaacccgatcttggaagttttcagacaagcttttactggttgaaatctagggtattttgcgcttggaatcttccttcatttgacaaatcctggtgaaagtgtgctgaaatctaggccattctcagtttgctgagctggtcaaggccccatttcttgggtctggtcttcaaccctgtgcaacccaaggagctggggcacctgcacagctcccccgtccctccttcgttcaccccctggtggtgtcccgaggactgctgcgctgcaatccttcttcctcctactacctggaccaccctatgtctcagatgaagaactctgtcccattcattttctaatccagtgttgag

SEQ ID NO: 215534 - DNA, 488 bp, Homo sapiens
aatctctaaatcctaattctgattgcttttcttcctcagctaaattgttttctttctattatggctttcctaattcatactgtaatcaccgcctttgttgttatcttcaaaaaatgaagttttggtcaagaccgattagactatcaagccctaattcatttgataacatactaaattggggactcccaatatcacatttgttcttgaatctaagcccttgggatgccatccaattggaattgtgaactaagtgattttgcttataactctgaaagcagattattatacatcagcaaatcaacatgatcttgggcctggtgaactttaaattgtatgttatcagtttccaataaggtaaaagctgacattatttcttataatcacaaacgatttctaaagtaaaattatggcaaatgaatgttgaactaaatatttcaatatacaagtcaaagaaatatgcaaaataaaagagcaatatgcagaaattg

SEQ ID NO: 215535 - DNA, 454 bp, Homo sapiens
agggcacatggatgcgtggtcaggggcagatggagccttctgtgagtgaacttcagagggaggtgcgtttgttgccctcaggaccagggctcgtcacgtttctgtagcagagaaatgttctcccgcaaataaaaccttacacaggggcccaaatgaggtggtggtgaagcagtgtgttcccaggcccctgcacgctgcagagcagacaatgtgtgtgctgacagacactcagcctggagtcagggactgcatgtgaagcaacagccccacagagtccctagcctgtcatcgccatgccttgttttctattgaacaatatttgggaaattcgattcccaaaactaagtcgttataaacagttgcacctttttaaatgacttgccttgaaatttcagggcactcttcaggtaactgatgcaggaatctaagagggaagcagcctcaccactcagga

SEQ ID NO: 215536 - DNA, 97 bp, Homo sapiens
agtagacttagtggttacgaggttgggcagagaaagaggtcagaaacagcaacacggaggtttctaggagttaaccaacagtgaacattgaattcag

SEQ ID NO: 215537 - DNA, 287 bp, Homo sapiens
ttcacattattagttgaagaaattagtccagtttacttttttccctcaaatgtgttttctgagatgtataaacacatgttttggttcaataatatatacagtgttttaattgaatataaaatgttattaataaatgtctacatatgcagaattatccctatctttcatatatctgtctcagttaaatgtaacttagctaaagatctctgtatcagtggtcagtaaaaagaaaatattttgtgaggatttttttttaatgcacaaaatagttattttttttctttaaa

SEQ ID NO: 215538 - DNA, 483 bp, Homo sapiens
attgacagcccttccatgtggagagggagagttcccaaaataaaatgataagcaaagaggctcatagcacaacacatgccttgtgctttgctacctctggatctttgccacgtacctttccttccttcttcctaattgatgaaagcctgctcatcccccaaggctgtaacaaacactacttccattgatttaccctcccttctcaattagatggacttcttcttttgaattttgagtcccaataactttagtataggaactcatctaataatactttctgaaatagttttttttgttttgtttttgttttgacatggagtcgcgctctgttgcccaggctggagtgtggtgtgccatcttggctcgctgcaacctctgcctcccagcttcaagcaattctcctacctcagtctcccgagtagctgggactacaggcttacaccaccacgcccattaaattttcttttttttttgtatttttag

SEQ ID NO: 215539 - DNA, 429 bp, Homo sapiens
tggatgtgggtggaatggggccctgattaaaaatacaatgtgttgttggcaacacagtaagcagatactccaaatatgcataatctggacttaattacagaattggataaagcagtagcttcattttgcagagtagtggtcatattagggaggccgaagcccaattttgttggttatctaaaccagggaagaggagatttcaaataatttcagaacggtctcttgctgcctctcaaaattcatcaagaccattcctttttgttggggtcctcaaaagagaatttttaaattttttattattaaaaatttcgaatatgttgttacaaaagtagagggagcaatgtaaaaacttcatgtactcttatgtagcttcaacatttaatagtccatagccaaccttgactaatttacatctttaatttctcccca

SEQ ID NO: 215540 - DNA, 421 bp, Homo sapiens
cgggcaggtagggaatggctgggggtgccgggaagtccgctgaagccgcgtccactcctccctcgcgcagagagaccaccctgggcgcgcccgctccgttctcccgtgctctcctggctcggaccagacccaggttcccaagccgccgccagggcaggagttgggaagcctgtcgcagccccactcgcggacgccccccaccccgctcgcctcgctccccacgcgggccaatcccgacggcccggccccaacccaggtgactacaggggtcccagccctcgccgggctgcccggaccccggggctgggagctggggagggcgccgctgtttatctggtgcggactccggagggggcgggggcggcccagaaggcgccagcccaactccgcagggccgcacaaaggccgctgtgtcccacgg

SEQ ID NO: 215541 - DNA, 440 bp, Homo sapiens
atttccaggccctaggacatttcctaagacatggaaactattccataagtgttaattgaattaatgagcaaatgttaaaatttgacaattacatccaaccaggcattcaaattaaaacaagccaataaaaatactccaagggtcccaatcacctaatttggcctagttgtgataatgaaggcaaaactaagacttgaagaacctgatgaacaattcatagtaaagattttaaaacttctactagaaatgctaagcagtgtgatatattaagttaatctttaaaaatagtggtttcagggtaaatgttgcttaaaattaactcccctaatgaataaaaggcagaaatatagaaatgtcccttttttaatattcccattattaaaaaaaggaaagtcaaagcattttttgtactatttgcctcgtgatccaacaggtctacc

SEQ ID NO: 215542 - DNA, 507 bp, Homo sapiens
agaaaatttaaattttatgtagagcctgaagacatgactgaattgctgcaatctaatggtaaaactttaatggatgaagggctgcttcttatggataagcaaagaaagtagtttcttgagatggaatctactcctagtgaggtgctgtgaacattgttacaataacaaaggatttagactattccacaaacttcactgataaagcaatggtacggtttgagaggattgactctgattttgaaaaaaagttatgacactataaaatagtattgcatgctacagagaaacatttcataaaagggtcaattggtggggcaatctccattgggttgtttatcaacatctttgtgatcacaaagagagagcctggtgtttctctcaattatatctgacaaatattgcaggtgtgttttgtaatcaagtttctgaaatttcatgtaatatcttcaaagtctattttgggtcaattcacaacaagaaataaatgtcaaagccaacattgcacta

SEQ ID NO: 215543 - DNA, 409 bp, Homo sapiens
tcaggaacatgtgcactttgctaatacaacacatggctttgaaattaaaatgcaacatgatcgagtgcttcgggatattttaacaactagacgagagattacagctagataaaactgggctttcaggtcacttttgctcattcatgtttcttcccgtttctttggactagacaaatttaatttcattgtatttcttaagaatttgctagaaaaacaaaagtttggtaagttatttcatggctgattgatctcagggaaatggggatgttgtaaggtttctctgcgacatgtgtcacctattagatagttagctttttctatttccaactgagccaaaccaaattaattagaaagtggtttgaattacaagctaaatacaataaaaagtaataaaaacagaaaatgaaat

SEQ ID NO: 215544 - DNA, 328 bp, Homo sapiens
gagttttaaacagaagggtaaaatgatcagctctttggggaatctggaatcctttaccctagtcccagatccccagcctctatgttttgtgatagtgccatagctgaggcagacctacagcagtgtagccagtagtttctctaggccttgtaagcccacggttctcaaaatgtggccccagaccaccagcatcagtatcacctggcacaggccagctacttgggagactggggtgggagaactgcttgagcctgggaggtcaaggttgcagtgagccatgatcatgccactgcactccagcctgagtgacagagtgagaccctatctc

SEQ ID NO: 215545 - DNA, 260 bp, Homo sapiens
accacgcccagctaatttttgtgtttttagtagagacaagatttcaccatgttggccaggctggtctcaaactcctgacctcaggcgatccaccgctttggcctcccatagtgctgggattacaggcgtgagccaccacgcccagcctgatacagttttaagcaggaatttggcagaaatttcgtaacgaagacaaattggaggttctctttaactcgagattattaaatttatagtaacttcttgggccattaaaatgt

SEQ ID NO: 215546 - DNA, 559 bp, Homo sapiens
tgataaaattgctgtaagtacttacgtgcaggattttgaatgaacttaagttttccaaagtgactacacttttgatttccactagctatggagagttctggttgttcctgatctttgacagcatttggtgtgttcaccgttttgtgttttagccattctgataggtttatggtgatatctcgttgttttaatgtgcaattccctcacaaatgattttgagcatctttctcatatgcttatttgccatctgtatatcttattaatgaggtgttcagatctttcaccttttttttttttgctttgtgttgtttagttctcagaattcttcatatattttggacagcagtttttccatcagattattttgtaagtattttctcccagtctgtgacttgctttttccattctcttaacagtgtctttcacagaacagaagtttttaattttaatgaggctcaacttaattttttttcattagtagattgtgcttttggttttgtatttaagaagccatcattgaacccaggatccccgagattttctcctatgttatctccta

SEQ ID NO: 215547 - DNA, 554 bp, Homo sapiens
tcagttttcatactggaaatatagactgcattttcagccagggtctctattgtcttgtggtaagaactcttttttaaaaaactttatggaaaatttgtatcttggctatgtttttattgatttttgaaccttccaaattgctgctgccgctttagtagtacatacacagctgattaaagtactcctaggaccctgttcattgtagaatttattgatgatgccatatacccttggtaagatataaatgttggaagacttttcacaatatttcttctgtagcttatctaatttcatgctgtttgataaaattgttttcttaattctcttcacgtctgactcatttccatgactagtggttggtttttcttttttgtgttttacacagataaacatagtttatataactaatttcacatttgcaatattgtcaagtatagaataccaaagcttagttgaaatgcatcaagttcctgattgcttgacttacttgctaattgatttcttttccacataccagcatcacattgcataggattcagatttgtatcctcaaa

SEQ ID NO: 215548 - DNA, 339 bp, Homo sapiens
gaattccagttttccctttcagttttggcctggtaagtccttaatatcttgtcaatttttcagtgcttttaagaatatgtttttaaaatcttttatctcagtgcttttcaaactttaatgtgcaactgaagtcacctggtcatcttgtgaaaatgcagcttctaattctgtaggcttgagatgggacccaatattctgcacatctaacaacctcttagagagtgtggacgctgcagatgcacaagccacagtttgatcagcagggttttatttcatatttttagttatttttagtgagtaagttggctcaaaggacctggaagaccattgttactcgac

SEQ ID NO: 215549 - DNA, 435 bp, Homo sapiens
agtcccattttacagctggaaaactgaggtataagaaggagctgaccagcagtggggctgggactcgaacccagagtcggctgacttctgcctgagcacctggcgctacttggtgaccagcgtgtctccagcctgagggtcccatcaaaagcaagtgaactttctcgatcttgcttgtctgtgtcccaaaaacgttcttccttctgtagggcctttgcatatgatgttctttgaaccatctccccaatccccacagcccgtttcctccaaggtctcctttagatcttagatcagggtcatctcctcaggaagcctccctggaatgcaccatagccccaaagatggcgaggatcatttgattaatgtgagtgatcctccccccaaactgtaagttccatgagggcagggagtgggtgtgcttttctgttcagcatt

SEQ ID NO: 215550 - DNA, 510 bp, Homo sapiens
tctttaactcatgggttatttagaagtgtattttatttccaaatattcagaggattttccatatatatttctgctaatgatttctagtttaattgcatctttaatatctccgtcatcccagagtttgttctgctgattgctttgtttcttgacagtggattttctttttcattttatgtgcctcataacttttgattgaatgttggacatcatgagttgaacagtagaatacttacgcctgaaaagggcacacctgttctttttcaaggctgttagtataggggagttgagtcagtttaatctggagttgagctgggcttatattttcttgttgctctgcttacctcagtgtaccacaaggcttcaggtttctttggatttctttactatttcctgtgtttctggttgaggttgtaatgccagagtgcttttcgtcatttgtactcccctgttaaatttcacctttctctgtatgcttgtgctactgaagaagccccattgcactgtctt

SEQ ID NO: 215551 - DNA, 392 bp, Homo sapiens
ggtggccgttatgctagtgaaaaaaagccaatctcaaaaggctatatactatatgattgcatttatataacattctcaaaatgacaaaattatagacagaatgtaaagtggttgccaaggactagggatggtgggggaagggtgtgggtgtgactccgaaggggtagcaggagggagatccttgtagtgatggcacaatcctgtcatcttaattgtggtggtggttacaaatatctataccataacatacgttgtgccaatgtcagtttcctggttttgctattgtactataattatgtgagaaacggagtgaagagtacaccgaaatatcactgtactagctctgtaacttactgtaaaacaaaaattatttcaaaataaagttaaaatga

SEQ ID NO: 215552 - DNA, 390 bp, Homo sapiens
ggctttcagagaatctgctcagaaggggctcgtgccacctccgctcacatttcgtaggcccaaatggacttggtcaatgtgggaagaattataatcttcctgtgcagaggggctgacaacaaatgttggacagtaaaacaaacagccacttgtgctttgcgaaagccctgtgttctcacgactttccatttgccttcccctgcccagaatgcccccttctcttattcatctggagaccttcttctccttcatgtgccacctctccagggatgcttcttctttttttcattttatttttagagacaggatctcactcggtcacccaggctggagtgcagtggcataatcttaactcattgcagcctccaactcctgggctcaagcaatcct

SEQ ID NO: 215553 - DNA, 362 bp, Homo sapiens
gaactgccagactctgtgactagaggtttagggtctgtggtttgcagaatgatgctcccatccccggaaaggtgtccatgtcctaatcgctgaaacctgcaaatgttacgttacatggcaaagggattttgcagaccttattgaattcaggatccctagtgaggaggtgggcctgcatgccccaggtgggcctagtgtactcacagtcatcagtgccagagtgaggggacctgagaagacaggtgcaagggggagcccaggaatggggtggctctaggacccggaagcggcagggaaacatttccccctagaacctccagaaggaatgtggccctgctggcaccttggttttagcccggtga

SEQ ID NO: 215554 - DNA, 311 bp, Homo sapiens
aaaatgtgtatgtgcgggagtgggggatggtgctcacagaaggcttctaggagaaaaagttatttgagatatttgggcatgagagggaggaataagagaaggtacaaaggagaaacgtagaaataaggagggataagaaatggggcaaagtactctcttaggtgactcttaggtgagggctaagttaaaaatatacatagagtattgttagctctcttagagatctatttatttaacatattatctttgtgatttttttaagttaatagtttcttctatttatttccatgatgtcaagatacttttctcct

SEQ ID NO: 215555 - DNA, 371 bp, Homo sapiens
ccaacagatttcaagtgtcctagttctaaaacaattttacgaaggagtctgtgacaggatttaccaaggagttgtagagcaaaatatatgtgaagaggctggtcagtattcagatggtcatcttcaagccatacaactttcctgcattagtcaatgttatctagagagggagagagatattaattttaaggaattggtttatgtgattgtggaagctggcaagcccaaaatctatagagcaggccataggccggggacccagaggagctgcagtttgagtgtgaaggcaatctgctggcagaattctcagaaaatctcatgggtttatggaggcatttatacaacattccattctcaaaatggatctcaac

SEQ ID NO: 215556 - DNA, 466 bp, Homo sapiens
cagtgatgcccagcagaacatctcttccttcttagtcagatgtcccttgggagtagttgtgcaaggttaattctttgcctggtagaagactgtggtgcattttggattatattttgtctgtgagatcttaggttggttcttcagatgttagccttctactggggcaatatttctttttctgtgtttatttgttgttattgacttctaatataattgcattgttgtcaaaagatgtggtctgcgtgattgtagttctttgatatttgttgagactttcattatggtctagttttagttaaattttataaatattcttcatatgcttgaggataatatgtattctgtaatttaaatatatattaaattagccttgataaccatcctggtcttctgtagctttattaagtaatttttttggtctgcctgaactaccaatacataaaagaaatgtattaatctcccacta

SEQ ID NO: 215557 - DNA, 405 bp, Homo sapiens
catgggggtgagaaagcttcccttagactatgtgcaagaacttgatagccttatgcaaagccatcttcagtgaaaggccacagctttgtcaccatgtcagtcacaggccagtgttgtggaagcaggctacaagtggcagccatctgagactggaagaaaagcccaggggcggagctctaccctaactccagtgtagggcttagagaggaaaaggacactgcccccaggtgcttgtggagcagcagggaaagtcagaggagtgatctgactttttttttcatcctattaacttttgggagaattaaccataaggctgtaaagtgaattaattgcttcagaaaagaacatgagcagtggtgccaaacactaattttactttttaaaaccatctctaaaaataagggt

SEQ ID NO: 215558 - DNA, 1190 bp, Homo sapiens
  misc_feature (957)..(957): n is a, c, g, or t
cgtggtggcgcatgcctgtaatcccagctactcgggaggttgggataggacaatcacttgaacccaggaggtggaggttgcagggagccgagatcgcaccactacactccatcctgggtgacaaagtgagactctgtttaaaaaaaaaaaaaaatactcttaacgagagtcaaaaactaaggagatagtctcaaatttgccaaaaattagctgtgtgttttaaagcaagtcaagcaagctacctggactaaatattcttcttcacaaatttttgcaattttagattgtatgaccactctaagttctcatccagctctaaaatactgtaattatgttctaatatcaaatcaaagtccaaatcatttaaggctatggtccaaggtttaaaacaaagtaatttttgaaaactctttctataagcttaatatggattaaactagatgctattatcatcctcattttacaatcatgtaacaggcacagagaggttaagctacttgtcccaggtcacacagccagtaacggtcagagatagggtacagacccagacactctagaaccagagtttgtgctctgaacacactaatctatactgattttaatcactatgaaatacagatatcctgtgctatcttattgagagggttaaaaccaaattcagggtcccaaaatttgtactgtatccagccacatatcaatacaccccagtttttcgtctttttgcttcatcttaaccctcagtatctcatgttgctatattaagaaagtaaaaatagttttaaaaatctgcttcctggccaggcacaatgctatacttgattcaagatttggaggctaatggccgttacagggcagagttcagacagctgccaacggtgaacccatttataaattccaaatatcaggcggggcccccctgtatcagtttcagaggttaggcgggaatccttgacccgngggggggttcaggcctgtaggccacgtgctcaactggggaaaaggggacctcgttaaaaaaaaaaccgcattggcaatcgcctaaaggggggtcaaaacaggcccggtttaaacgggctggaaaacctggtccaatatacttgtggaacaccttccggggggtaaggacccccaaggcttccacattggcccgtagccaggaattcgggattttccgcttttacaccttcttc

SEQ ID NO: 215559 - DNA, 277 bp, Homo sapiens
taattttatatctatcatataatgtgcatacatatacctataaatgcttatatataatctataatagactaactactaatgagtctatatttaaattttcggaaatgtgcaaactagacattttacactgaaataaactattctatattgcttttaaattgttttattaattttaactttttgaattatagaactttaatttttgcctttgactaattctctctctaatctttttactttctaaattaatgaatttaaaagcatattccactgcaga

SEQ ID NO: 215560 - DNA, 574 bp, Homo sapiens
cagggatccccaccacccactgtctcctgcacttcgtctctagatggctctgctggaggaaactggaacccacgagcccctcaccacgcctccagtcttcctgcttgcttctctggccaggcccatctgcagctgcccactcagatatctggcaggaaccccgtttctgccaccttcagtcctatctctaagctcttgcccaggctcttgcccaggtccactcctttgcttccttagctaaatgaggctccgtacccaacactggcctcctttcaacttaatcctacatgtattcagggagcccctgctatctgtgccagccaggaactggcgttcaaagctgaagggactgtggctcctgctctcaaagtagttaccttggaagtgagaggcagggggaaggcccgtgggtctccgctgcagggctagaaactctctctctttctctgtctctctcgttctcttgagagagggtcttgctctgtctcccagactacagtacagtggcacgatcatagcacgatcatagctcattgtaacctggaactcctggtctcaagggatcctcctgcct

SEQ ID NO: 215561 - DNA, 6499 bp, Homo sapiens
  misc_feature (2)..(2): n is a, c, g, or t
  misc_feature (4)..(5): n is a, c, g, or t
  misc_feature (10)..(11): n is a, c, g, or t
  misc_feature (2892)..(2892): n is a, c, g, or t
  misc_feature (5467)..(5468): n is a, c, g, or t
gngnntccanngccgggcagtgggcaggtatggctgagggcgtgtgagcgccgagcgctaagggccgccgccaccatgccagggggcgcaggcgccgccaggctctgcttgctggcgtttgccctgcagcccctccggccgcgggcggcgcgggagcctggatggacaagaggaagtgaggaaggcagccccaagctgcagcatgaacttatcatacctcagtggaagacttcagaaagccccgtgagagaaaagcatccactcaaagctgagctcagggtaatggctgaggggcgagaactgatcctggacctggagaagaatgagcaactttttgctccttcctacacagaaacccattatacttcaagtggtaaccctcaaaccaccacacggaaattggaggatcactgcttttaccacggcacggtgagggagacagaactgtccagcgtcacgctcagcacttgccgaggaattagaggactgattacggtgagcagcaacctcagctacgtcatcgagcccctccctgacagcaagggccaacaccttatttacagatctgaacatctcaagccgcccccgggaaactgtgggttcgagcactccaagcccaccaccagggactgggctcttcagtttacacaacagaccaagaagcgacctcgcaggatgaaaagggaagatttaaactccatgaagtatgtggagctttacctcgtggctgattatttagagtttcagaagaatcgacgagaccaggacgccaccaaacacaagctcatagagatcgccaactatgttgataagttttaccgatccttgaacatccggattgctctcgtgggcttggaagtgtggacccacgggaacatgtgtgaagtttcagagaatccatattctaccctctggtcctttctcagttggaggcgcaagctgcttgcccagaagtaccatgacaacgcccaattaatcacgggcatgtccttccacggcaccaccatcggcctggcccccctcatggccatgtgctctgtgtaccagtctggaggagtcaacatggaccactccgagaatgccattggcgtggctgccaccatggcccacgagatgggccacaactttggcatgacccatgattctgcagattgctgctcggccagtgcggctgatggtgggtgcatcatggcagctgccactgggcacccctttcccaaagtgttcaatggatgcaacaggagggagctggacaggtatctgcagtcaggtggtggaatgtgtctctccaacatgccagacaccaggatgttgtatggaggccggaggtgtgggaacgggtatctggaagatggggaagagtgtgactgtggagaagaagaggaatgtaacaacccctgctgcaatgcctctaattgtaccctgaggccgggggcggagtgtgctcacggctcctgctgccaccagtgtaagctgttggctcctgggaccctgtgccgcgagcaggccaggcagtgtgacctcccggagttctgtacgggcaagtctccccactgccctaccaacttctaccagatggatggtaccccctgtgagggcggccaggcctactgctacaacggcatgtgcctcacctaccaggagcagtgccagcagctgtggggacccggagcccgacctgcccctgacctctgcttcgagaaggtgaatgtggcaggagacacctttggaaactgtggaaaggacatgaatggtgaacacaggaagtgcaacatgagagatgcgaagtgtgggaagatccagtgtcagagctctgaggcccggcccctggagtccaacgcggtgcccattgacaccactatcatcatgaatgggaggcagatccagtgccggggcacccacgtctaccgaggtcctgaggaggagggtgacatgctggacccagggctggtgatgactggaaccaagtgtggctacaaccatatttgctttgaggggcagtgcaggaacacctccttctttgaaactgaaggctgtgggaagaagtgcaatggccatggggtctgtaacaacaaccagaactgccactgcctgccgggctgggccccgcccttctgcaacacaccgggccacgggggcagtatcgacagtgggcctatgccccctgagagtgtgggtcctgtggtagctggagtgttggtggccatcttggtgctggcggtcctcatgctgatgtactactgctgcagacagaacaacaaactaggccaactcaagccctcagctctcccttccaagctgaggcaacagttcagttgtcccttcagggtttctcagaacagcgggactggtcatgccaacccaactttcaagctgcagacgccccagggcaagcgaaaggtgatcaacactccggaaatcctgcggaagccctcccagcctcctccccggccccctccagattatctgcgtggtgggtccccacctgcaccactgccagctcacctgagcagggctgctaggaactccccagggcccgggtctcaaatagagaggacggagtcgtccaggaggcctcctccaagccggccaattccccccgcaccaaattgcatcgtttcccaggacttctccaggcctcggccgccccagaaggcactcccggcaaacccagtgccaggccgcaggagcctccccaggccaggaggtgcatccccactgcggccccctggtgctggccctcagcagtcccggcctctggcagcacttgccccaaagtttccagaatacagatcacagagggctggagggatgattagctcgaaaatctagacctgtccaaggggcttctccctttccttgagctctctggacactgcagaggacccatgnccatggaaccctgaagaagcatgtctggccgcctctgagctcctcccaccctcctccaggaacctccacatctccaaaaatctccctgttgactcagtgcctcctcggcttccttggaagcccagagggactatgatctgatggcctctaggtgttgttttgtgcaatatacagccccaggtagggaggggagagtatgaggagggtgactggcagcttctcctccagactcctagccccgaggtgctgatggagatgctcaaggccagcaagcccctcaggccagcacttcgcttgcagaagccatccattcactcctggggtgcagggcacgcaagagagcttcccattgcttctgctctcctcagaggtcccgggctggatggaggctggtacttacccaccccttttagcttttagggattaaggaagggtcaagccagccactgctgtggccctgcccagggcttggttgagggaacggcttctggctgtatggctgcatgtgacaagccacgtcccctcccacctctccccaaacccctgcatccctgtattcacacgggtcactctgactcagacaggtactattcgtaggcagtgtagacagcaggaggagcaccgggcttgggcttcctctgagccgtgatgccaaaggttgcgactcctgactctggataatttttagttgctctttgttttctctgccgcactttcctggtgccccacgcttttctctcttccttcccctctcattctccctctaatgtgtggtgctttggtgagcaaaccctcagcagtcctgaccttcgggtgaccaggtgcttgtgacctacaagtcagagtccactctcacagtcggccactggatttccctcactggctctcaggagtgtgaccagagtagactcggggcatggccattggggtcatatgtttatttttcattgtgttttgtgacctcagcagggtgggggtcttcctccttactctaagctaaatctaggtgaggtttccccttagggagcccagctatttacaaagtacacacgagggagcaggctggtcattgacttcgggctggaccgttgccctctgagcagagaacagacccattttctgggagctgcccgagatcactggagaaggcagccagcagcagctgcactggaacagtcagagcagggagcctcttcctcaacccagctttttgtcattcacttccttttgttctctctctggtcactgcccttacctgaccctcacagaaagagagctctgagcaggtgagggggtctgcggtggctcctgtcttccctgcagcagggaaggagggccgtgtggtgctttgctagataggacggtttttgcaaagcacctggagatgtttgctgggagatagactcccactccacaaaggtgctgggtggctctccggacaggagctggcctgactctcactcctctgaggctttcctggggcctcctcccatcctgccatgagcaattgtttgctcttgaaaacctcactgcaaggctgaagctgacttctgattcaccaccccagggcctccttatagttctctgcacacaataggtgcttcttggatgttcttgggtttggaaataagtggaaaatacgggatgtacccctgggggaaaagcctgggttgggtttagaaagatctcaggaaaatgagtttctcttccctcagggtggctgtgatacaggttccccatgtccttgccgtgggtcatccttgctgtgggtcatccttgctgtggagatccattccccacctttcctgtggcccaaccttttatttaaatgtgctaccctctgcctcaaggcttggttcctggaaagtaaaggtgaaaacatcccctttcacccctctgcaaaacaaacaagcaacatcctcaaaacccaaccccatgcctcacagagcttcctgtggcttctccagcctttctccctcacatcaggaggtagatagctctgaaatgacagcgccacagccatagtgactgcatgagccatctgaacctgcagtccaccctccctggaaccacaccagaaagagacctgggttgtcgttttcttgctttttgttttgttttgttttattattttcatatcacctccatcccataaagttgtactgtgaactggaagatggtggaatgttttggaatttgatagactttcggcaaccagttctactaatgcttcactcctggctctgttcagggaggctgcccaggaggaagactggccattatgcatccccttttctttccagtgcccagtatgctgttttgaggtgtcaaatacaaataaatctgggcttagggaaggagagaccttattccaaagcatgattgcagaaggggaaagggaatattgcaaaagggagaggaaggggccttatgggaatagtgaaaaggctcagaccgaccgatggcaagatctgcaagcgtctcaaagcccaggcagaaaaggacttttcttttattggaagaagtaaacatggctagaaagaaccacgttcagggaatgacgttgtgcccagcnntttttttttttttttttttttgtctccaggggaggggctgtttgctggctcaggctgaggatggcccaaagtccagggtctggtggggaggagggaagcttaactcaagtttgggttagtgagttagcaagctctttgtgcagatggggatgtaggtaaatctttttaaaagtgaaattaacctcctgccaattttacaacccaagaatttttttttaagggccttggagccatctctaaaacaaacctcaagggatttagtgccctgtctccctgtctctagaagccttagcctgggcacctggctcaatcttgtaactgcctgctagccatagattcctttcagccttgctgacttctccctataaaagtaaagcctttttctgccccagctctgagacacttgcagatcttaaggtctgagacttgctgattttctggttggagtgtttttttgtattgccatagtcccttccccctgaagcaatagcccctccccacctcctgcaatacgcctttccaatctttattggaagtctctccctgcctacttcctaatttattcttatttgacagagggtatggaagacttgcaatttgaaaactggggaccagttccaaagtcagtaattgtgttaaccacgtgtataacagctctgctggacacccaagaaagccatgggaacgccaactggaaaggtccccttccccaggggagcctgcgaaggagaggttctgtagaatccaagcccacatttccaaagtcacccccaacgcgtcctctcacaccgtccactgtgcgtttgtatgtgtctgggatccagggcaatgtgaattttctttttatttgggagattgttcacggaaaacagatcttcttctctcttgtccacctattaattgtttacaatatttgtacatctatgcaaaatacttgaatgggccatggtgccttttttccttgttagtatttaattaaaaatgaattgtttgtcatttgcaatgttaaaaaaaaccacacaaaaaaaaag

SEQ ID NO: 215562 - DNA, 3338 bp, Homo sapiens
  misc_feature (2)..(2): n is a, c, g, or t
  misc_feature (4)..(5): n is a, c, g, or t
  misc_feature (10)..(11): n is a, c, g, or t
  misc_feature (3236)..(3236): n is a, c, g, or t
  misc_feature (3326)..(3326): n is a, c, g, or t
gngnntccanngccgggcagtgggcaggtatggctgagggcgtgtgagcgccgagcgctaagggccgccgccaccatgccagggggcgcaggcgccgccaggctctgcttgctggcgtttgccctgcagcccctccggccgcgggcggcgcgggagcctggatggacaagaggaagtgaggaaggcagccccaagctgcagcatgaacttatcatacctcagtggaagacttcagaaagccccgtgagagaaaagcatccactcaaagctgagctcagggtaatggctgaggggcgagaactgatcctggacctggagaagaatgagcaactttttgctccttcctacacagaaacccattatacttcaagtggtaaccctcaaaccaccacacggaaattggaggatcactgcttttaccacggcacggtgagggagacagaactgtccagcgtcacgctcagcacttgccgaggaattagaggactgattacggtgagcagcaacctcagctacgtcatcgagcccctccctgacagcaagggccaacaccttatttacagatctgaacatctcaagccgcccccgggaaactgtgggttcgagcactccaagcccaccaccagggactgggctcttcagtttacacaacagaccaagaagcgacctcgcaggatgaaaagggaagatttaaactccatgaagtatgtggagctttacctcgtggctgattatttagagtttcagaagaatcgacgagaccaggacgccaccaaacacaagctcatagagatcgccaactatgttgataagttttaccgatccttgaacatccggattgctctcgtgggcttggaagtgtggacccacgggaacatgtgtgaagtttcagagaatccatattctaccctctggtcctttctcagttggaggcgcaagctgcttgcccagaagtaccatgacaacgcccaattaatcacgggcatgtccttccacggcaccaccatcggcctggcccccctcatggccatgtgctctgtgtaccagtctggaggagtcaacatggaccactccgagaatgccattggcgtggctgccaccatggcccacgagatgggccacaactttggcatgacccatgattctgcagattgctgctcggccagtgcggctgatggtgggtgcatcatggcagctgccactgggcacccctttcccaaagtgttcaatggatgcaacaggagggagctggacaggtatctgcagtcaggtggtggaatgtgtctctccaacatgccagacaccaggatgttgtatggaggccggaggtgtgggaacgggtatctggaagatggggaagagtgtgactgtggagaagaagaggaatgtaacaacccctgctgcaatgcctctaattgtaccctgaggccgggggcggagtgtgctcacggctcctgctgccaccagtgtaagctgttggctcctgggaccctgtgccgcgagcaggccaggcagtgtgacctcccggagttctgtacgggcaagtctccccactgccctaccaacttctaccagatggatggtaccccctgtgagggcggccaggcctactgctacaacggcatgtgcctcacctaccaggagcagtgccagcagctgtggggacccggagcccgacctgcccctgacctctgcttcgagaaggtgaatgtggcaggagacacctttggaaactgtggaaaggacatgaatggtgaacacaggaagtgcaacatgagagatgcgaagtgtgggaagatccagtgtcagagctctgaggcccggcccctggagtccaacgcggtgcccattgacaccactatcatcatgaatgggaggcagatccagtgccggggcacccacgtctaccgaggtcctgaggaggagggtgacatgctggacccagggctggtgatgactggaaccaagtgtggctacaaccatatttgctttgaggggcagtgcaggaacacctccttctttgaaactgaaggctgtgggaagaagtgcaatggccatggggtctgtaacaacaaccagaactgccactgcctgccgggctgggccccgcccttctgcaacacaccgggccacgggggcagtatcgacagtgggcctatgccccctgagagtgtgggtcctgtggtagctggagtgttggtggccatcttggtgctggcggtcctcatgctgatgtactactgctgcagacagaacaacaaactaggccaactcaagccctcagctctcccttccaagctgaggcaacagttcagttgtcccttcagggtttctcagaacagcgggactggtcatgccaacccaactttcaagctgcagacgccccagggcaagcgaaaggtgatcaacactccggaaatcctgcggaagccctcccagcctcctccccggccccctccagattatctgcgtggtgggtccccacctgcaccactgccagctcacctgagcagggctgctaggaactccccagggcccgggtctcaaatagagaggacggagtcgtccaggaggcctcctccaagccggccaattccccccgcaccaaattgcatcgtttcccaggacttctccaggcctcggccgccccagaaggcactcccggcaaacccagtgccaggccgcaggagcctccccaggccaggaggtgcatccccactgcggccccctggtgctggccctcagcagtcccggcctctggcagcacttgccccaaaggtgagtccacgggaagccctcaaggtgaaagctggtaccagagggctccaggggggcaggtgtagagttgagaaaacaaagcaattcatgcttcttgtggtctggactgaacttccagaacaaaagccaagggcaaaacattcatgtttcttggtgcccgcttgactgtggagttttggcttcatgtgaaaggtgattcttagaatcctgagctgtggtggcttcagtcctgcccctgcacctgacctggggagggaccctgagcaagtccctcttgagtctgtttcctcatttgtacagaggctatgatgagcagtagtaccagccccatcaggttgttgtgaagagcaaggaagtgcattagtagaagccacctggcctgcgggaggctgtgtacacttggcccctcctcgtacttcttctgtgtggctgacagtctcagtttgccagtcttgcantcaggtcagaaagggatgagtgaagaagctggctgacatgctgtattccacgaggcattgagaaaactatggactgtgctgctgccttancagggaagggaa

SEQ ID NO: 215563 - DNA, 492 bp, Homo sapiens
cagccatctttttaaacaaaaattattttgcctacttcctaatttattcttatttgacagagggtatggaagacttgcaatttgaaaactggggaccagttccaaagtcagtaattgtgttaaccacgtgtataacagctctgctggacacccaagaaagccatgggaacgccaactggaaaggtccccttccccaggggagcctgcgaaggagaggttctgtagaatccaagcccacatttccaaagtcacccccaacgcgtcctctcacaccgtccactgtgcgtttgtatgtgtctgggatccagggcaatgtgaattttctttttatttgggagattgttcacggaaaacagatcttcttctctcttgtccacctattaattgtttacaatatttgtacatctatgcaaaatacttgaatgggccatggtgccttttttccttgttagtatttaattaaaaatgaattgtttgtcatttgcaatgtta

SEQ ID NO: 215564 - DNA, 404 bp, Homo sapiens
actgattttaaaaactaataacttaaaactgccacacgcaaaaaagaaaaccaaagtggtccacaaaacattctcctttccttctgaaggttttacgatgcattgttatcattaaccagtcttttactactaaacttaaatggccaattgaaacaaacagttctgagaccgttcttccaccactgattaagagtggggtggcaggtattagggataatattcatttagccttctgagctttctgggcagacttggtgaccttgccagctccagcagccttcttgtccacctattaattgtttacaatatttgtacatctatgcaaaatacttgaatgggccatggtgccttttttccttgttagtatttaattaaaaatgaattgtttgtcatttgcaatgtta

SEQ ID NO: 215565 - DNA, 4172 bp, Homo sapiens
  misc_feature (2)..(2): n is a, c, g, or t
  misc_feature (4)..(5): n is a, c, g, or t
  misc_feature (10)..(11): n is a, c, g, or t
  misc_feature (2892)..(2892): n is a, c, g, or t
gngnntccanngccgggcagtgggcaggtatggctgagggcgtgtgagcgccgagcgctaagggccgccgccaccatgccagggggcgcaggcgccgccaggctctgcttgctggcgtttgccctgcagcccctccggccgcgggcggcgcgggagcctggatggacaagaggaagtgaggaaggcagccccaagctgcagcatgaacttatcatacctcagtggaagacttcagaaagccccgtgagagaaaagcatccactcaaagctgagctcagggtaatggctgaggggcgagaactgatcctggacctggagaagaatgagcaactttttgctccttcctacacagaaacccattatacttcaagtggtaaccctcaaaccaccacacggaaattggaggatcactgcttttaccacggcacggtgagggagacagaactgtccagcgtcacgctcagcacttgccgaggaattagaggactgattacggtgagcagcaacctcagctacgtcatcgagcccctccctgacagcaagggccaacaccttatttacagatctgaacatctcaagccgcccccgggaaactgtgggttcgagcactccaagcccaccaccagggactgggctcttcagtttacacaacagaccaagaagcgacctcgcaggatgaaaagggaagatttaaactccatgaagtatgtggagctttacctcgtggctgattatttagagtttcagaagaatcgacgagaccaggacgccaccaaacacaagctcatagagatcgccaactatgttgataagttttaccgatccttgaacatccggattgctctcgtgggcttggaagtgtggacccacgggaacatgtgtgaagtttcagagaatccatattctaccctctggtcctttctcagttggaggcgcaagctgcttgcccagaagtaccatgacaacgcccaattaatcacgggcatgtccttccacggcaccaccatcggcctggcccccctcatggccatgtgctctgtgtaccagtctggaggagtcaacatggaccactccgagaatgccattggcgtggctgccaccatggcccacgagatgggccacaactttggcatgacccatgattctgcagattgctgctcggccagtgcggctgatggtgggtgcatcatggcagctgccactgggcacccctttcccaaagtgttcaatggatgcaacaggagggagctggacaggtatctgcagtcaggtggtggaatgtgtctctccaacatgccagacaccaggatgttgtatggaggccggaggtgtgggaacgggtatctggaagatggggaagagtgtgactgtggagaagaagaggaatgtaacaacccctgctgcaatgcctctaattgtaccctgaggccgggggcggagtgtgctcacggctcctgctgccaccagtgtaagctgttggctcctgggaccctgtgccgcgagcaggccaggcagtgtgacctcccggagttctgtacgggcaagtctccccactgccctaccaacttctaccagatggatggtaccccctgtgagggcggccaggcctactgctacaacggcatgtgcctcacctaccaggagcagtgccagcagctgtggggacccggagcccgacctgcccctgacctctgcttcgagaaggtgaatgtggcaggagacacctttggaaactgtggaaaggacatgaatggtgaacacaggaagtgcaacatgagagatgcgaagtgtgggaagatccagtgtcagagctctgaggcccggcccctggagtccaacgcggtgcccattgacaccactatcatcatgaatgggaggcagatccagtgccggggcacccacgtctaccgaggtcctgaggaggagggtgacatgctggacccagggctggtgatgactggaaccaagtgtggctacaaccatatttgctttgaggggcagtgcaggaacacctccttctttgaaactgaaggctgtgggaagaagtgcaatggccatggggtctgtaacaacaaccagaactgccactgcctgccgggctgggccccgcccttctgcaacacaccgggccacgggggcagtatcgacagtgggcctatgccccctgagagtgtgggtcctgtggtagctggagtgttggtggccatcttggtgctggcggtcctcatgctgatgtactactgctgcagacagaacaacaaactaggccaactcaagccctcagctctcccttccaagctgaggcaacagttcagttgtcccttcagggtttctcagaacagcgggactggtcatgccaacccaactttcaagctgcagacgccccagggcaagcgaaaggtgatcaacactccggaaatcctgcggaagccctcccagcctcctccccggccccctccagattatctgcgtggtgggtccccacctgcaccactgccagctcacctgagcagggctgctaggaactccccagggcccgggtctcaaatagagaggacggagtcgtccaggaggcctcctccaagccggccaattccccccgcaccaaattgcatcgtttcccaggacttctccaggcctcggccgccccagaaggcactcccggcaaacccagtgccaggccgcaggagcctccccaggccaggaggtgcatccccactgcggccccctggtgctggccctcagcagtcccggcctctggcagcacttgccccaaagtttccagaatacagatcacagagggctggagggatgattagctcgaaaatctagacctgtccaaggggcttctccctttccttgagctctctggacactgcagaggacccatgnccatggaaccctgaagaagcatgtctggccgcctctgagctcctcccaccctcctccaggaacctccacatctccaaaaatctccctgttgactcagtgcctcctcggcttccttggaagcccagagggactatgatctgatggcctctaggtgttgttttgtgcaatatacagccccaggtagggaggggagagtatgaggagggtgactggcagcttctcctccagactcctagccccgaggtgctgatggagatgctcaaggccagcaagcccctcaggccagcacttcgcttgcagaagccatccattcactcctggggtgcagggcacgcaagagagcttcccattgcttctgctctcctcagaggtcccgggctggatggaggctggtacttacccaccccttttagcttttagggattaaggaagggtcaagccagccactgctgtggccctgcccagggcttggttgagggaacggcttctggctgtatggctgcatgtgacaagccacgtcccctcccacctctccccaaacccctgcatccctgtattcacacgggtcactctgactcagacaggtactattcgtaggcagtgtagacagcaggaggagcaccgggcttgggcttcctctgagccgtgatgccaaaggttgcgactcctgactctggataatttttagttgctctttgttttctctgccgcactttcctggtgccccacgcttttctctcttccttccccctgaagcaatagcccctccccacctcctgcaatacgcctttccaatctttattggaagtctctccctgcctacttcctaatttattcttatttgacagagggtatggaagacttgcaatttgaaaactggggaccagttccaaagtcagtaattgtgttaaccacgtgtataacagctctgctggacacccaagaaagccatgggaacgccaactggaaaggtccccttccccaggggagcctgcgaaggagaggttctgtagaatccaagcccacatttccaaagtcacccccaacgcgtcctctcacaccgtccactgtgcgtttgtatgtgtctgggatccagggcaatgtgaattttctttttatttgggagattgttcacggaaaacagatcttcttctctcttgtccacctattaattgtttacaatatttgtacatctatgcaaaatacttgaatgggccatggtgccttttttccttgttagtatttaattaaaaatgaattgtttgtcatttgcaatgtta

SEQ ID NO: 215566 - DNA, 4411 bp, Homo sapiens
  misc_feature (2)..(2): n is a, c, g, or t
  misc_feature (4)..(5): n is a, c, g, or t
  misc_feature (10)..(11): n is a, c, g, or t
  misc_feature (2892)..(2892): n is a, c, g, or t
gngnntccanngccgggcagtgggcaggtatggctgagggcgtgtgagcgccgagcgctaagggccgccgccaccatgccagggggcgcaggcgccgccaggctctgcttgctggcgtttgccctgcagcccctccggccgcgggcggcgcgggagcctggatggacaagaggaagtgaggaaggcagccccaagctgcagcatgaacttatcatacctcagtggaagacttcagaaagccccgtgagagaaaagcatccactcaaagctgagctcagggtaatggctgaggggcgagaactgatcctggacctggagaagaatgagcaactttttgctccttcctacacagaaacccattatacttcaagtggtaaccctcaaaccaccacacggaaattggaggatcactgcttttaccacggcacggtgagggagacagaactgtccagcgtcacgctcagcacttgccgaggaattagaggactgattacggtgagcagcaacctcagctacgtcatcgagcccctccctgacagcaagggccaacaccttatttacagatctgaacatctcaagccgcccccgggaaactgtgggttcgagcactccaagcccaccaccagggactgggctcttcagtttacacaacagaccaagaagcgacctcgcaggatgaaaagggaagatttaaactccatgaagtatgtggagctttacctcgtggctgattatttagagtttcagaagaatcgacgagaccaggacgccaccaaacacaagctcatagagatcgccaactatgttgataagttttaccgatccttgaacatccggattgctctcgtgggcttggaagtgtggacccacgggaacatgtgtgaagtttcagagaatccatattctaccctctggtcctttctcagttggaggcgcaagctgcttgcccagaagtaccatgacaacgcccaattaatcacgggcatgtccttccacggcaccaccatcggcctggcccccctcatggccatgtgctctgtgtaccagtctggaggagtcaacatggaccactccgagaatgccattggcgtggctgccaccatggcccacgagatgggccacaactttggcatgacccatgattctgcagattgctgctcggccagtgcggctgatggtgggtgcatcatggcagctgccactgggcacccctttcccaaagtgttcaatggatgcaacaggagggagctggacaggtatctgcagtcaggtggtggaatgtgtctctccaacatgccagacaccaggatgttgtatggaggccggaggtgtgggaacgggtatctggaagatggggaagagtgtgactgtggagaagaagaggaatgtaacaacccctgctgcaatgcctctaattgtaccctgaggccgggggcggagtgtgctcacggctcctgctgccaccagtgtaagctgttggctcctgggaccctgtgccgcgagcaggccaggcagtgtgacctcccggagttctgtacgggcaagtctccccactgccctaccaacttctaccagatggatggtaccccctgtgagggcggccaggcctactgctacaacggcatgtgcctcacctaccaggagcagtgccagcagctgtggggacccggagcccgacctgcccctgacctctgcttcgagaaggtgaatgtggcaggagacacctttggaaactgtggaaaggacatgaatggtgaacacaggaagtgcaacatgagagatgcgaagtgtgggaagatccagtgtcagagctctgaggcccggcccctggagtccaacgcggtgcccattgacaccactatcatcatgaatgggaggcagatccagtgccggggcacccacgtctaccgaggtcctgaggaggagggtgacatgctggacccagggctggtgatgactggaaccaagtgtggctacaaccatatttgctttgaggggcagtgcaggaacacctccttctttgaaactgaaggctgtgggaagaagtgcaatggccatggggtctgtaacaacaaccagaactgccactgcctgccgggctgggccccgcccttctgcaacacaccgggccacgggggcagtatcgacagtgggcctatgccccctgagagtgtgggtcctgtggtagctggagtgttggtggccatcttggtgctggcggtcctcatgctgatgtactactgctgcagacagaacaacaaactaggccaactcaagccctcagctctcccttccaagctgaggcaacagttcagttgtcccttcagggtttctcagaacagcgggactggtcatgccaacccaactttcaagctgcagacgccccagggcaagcgaaaggtgatcaacactccggaaatcctgcggaagccctcccagcctcctccccggccccctccagattatctgcgtggtgggtccccacctgcaccactgccagctcacctgagcagggctgctaggaactccccagggcccgggtctcaaatagagaggacggagtcgtccaggaggcctcctccaagccggccaattccccccgcaccaaattgcatcgtttcccaggacttctccaggcctcggccgccccagaaggcactcccggcaaacccagtgccaggccgcaggagcctccccaggccaggaggtgcatccccactgcggccccctggtgctggccctcagcagtcccggcctctggcagcacttgccccaaagtttccagaatacagatcacagagggctggagggatgattagctcgaaaatctagacctgtccaaggggcttctccctttccttgagctctctggacactgcagaggacccatgnccatggaaccctgaagaagcatgtctggccgcctctgagctcctcccaccctcctccaggaacctccacatctccaaaaatctccctgttgactcagtgcctcctcggcttccttggaagcccagagggactatgatctgatggcctctaggtgttgttttgtgcaatatacagccccaggtagggaggggagagtatgaggagggtgactggcagcttctcctccagactcctagccccgaggtgctgatggagatgctcaaggccagcaagcccctcaggccagcacttcgcttgcagaagccatccattcactcctggggtgcagggcacgcaagagagcttcccattgcttctgctctcctcagaggtcccgggctggatggaggctggtacttacccaccccttttagcttttagggattaaggaagggtcaagccagccactgctgtggccctgcccagggcttggttgagggaacggcttctggctgtatggctgcatgtgacaagccacgtcccctcccacctctccccaaacccctgcatccctgtattcacacgggtcactctgactcagacaggtactattcgtaggcagtgtagacagcaggaggagcaccgggcttgggcttcctctgagccgtgatgccaaaggttgcgactcctgactctggataatttttagttgctctttgttttctctgccgcactttcctggtgccccacgcttttctctcttccttcccctctcattctccctctaatgtgtggtgctttggtgagcaaaccctcagcagtcctgaccttcgggtgaccaggtgcttgtgacctacaagtcagagtccactctcacagtcggccactggatttccctcactggctctcaggagtgtgaccagagtagactcggggcatggccattggggtcatatgtttatttttcattgtgttttgtgacctcagcagggtgggggtcttcctccttactctaagctaaatctaggtgaggtttccccttagggagcccagctatttacaaagtacacacgagggagcaggctggtcattgacttcgggctggaccgttgccctctgagcagagaacagacccattttctgggagctgcccgagatcactggagaaggcagccagcagcagctgcactggaacagtcagagcagggagcctcttcctcaacccagctttttgtcattcacttccttttgttctctctctggtcactgcccttacctgaccctcacagaaagagagctctgagcaggtgagggggtctgcggtggctcctgtcttccctgcagcagggaaggagggccgtgtggtgctttgctagataggacggtttttgcaaagcacctggagatgtttgctgggagatagactcccactccacaaaggtgctgggtggctcttcaagctcggattttgacatgaataccacgtctgatggactcttctttcgtggatacatctggggctgcttccggctctttttcc

SEQ ID NO: 215567 - DNA, 2612 bp, Homo sapiens
  misc_feature (2)..(2): n is a, c, g, or t
  misc_feature (4)..(5): n is a, c, g, or t
  misc_feature (10)..(11): n is a, c, g, or t
gngnntccanngccgggcagtgggcaggtatggctgagggcgtgtgagcgccgagcgctaagggccgccgccaccatgccagggggcgcaggcgccgccaggctctgcttgctggcgtttgccctgcagcccctccggccgcgggcggcgcgggagcctggatggacaagaggaagtgaggaaggcagccccaagctgcagcatgaacttatcatacctcagtggaagacttcagaaagccccgtgagagaaaagcatccactcaaagctgagctcagggtaatggctgaggggcgagaactgatcctggacctggagaagaatgagcaactttttgctccttcctacacagaaacccattatacttcaagtggtaaccctcaaaccaccacacggaaattggaggatcactgcttttaccacggcacggtgagggagacagaactgtccagcgtcacgctcagcacttgccgaggaattagaggactgattacggtgagcagcaacctcagctacgtcatcgagcccctccctgacagcaagggccaacaccttatttacagatctgaacatctcaagccgcccccgggaaactgtgggttcgagcactccaagcccaccaccagggactgggctcttcagtttacacaacagaccaagaagcgacctcgcaggatgaaaagggaagatttaaactccatgaagtatgtggagctttacctcgtggctgattatttagagtttcagaagaatcgacgagaccaggacgccaccaaacacaagctcatagagatcgccaactatgttgataagttttaccgatccttgaacatccggattgctctcgtgggcttggaagtgtggacccacgggaacatgtgtgaagtttcagagaatccatattctaccctctggtcctttctcagttggaggcgcaagctgcttgcccagaagtaccatgacaacgcccaattaatcacgggcatgtccttccacggcaccaccatcggcctggcccccctcatggccatgtgctctgtgtaccagtctggaggagtcaacatggaccactccgagaatgccattggcgtggctgccaccatggcccacgagatgggccacaactttggcatgacccatgattctgcagattgctgctcggccagtgcggctgatggtgggtgcatcatggcagctgccactgggcacccctttcccaaagtgttcaatggatgcaacaggagggagctggacaggtatctgcagtcaggtggtggaatgtgtctctccaacatgccagacaccaggatgttgtatggaggccggaggtgtgggaacgggtatctggaagatggggaagagtgtgactgtggagaagaagaggaatgtaacaacccctgctgcaatgcctctaattgtaccctgaggccgggggcggagtgtgctcacggctcctgctgccaccagtgtaagctgttggctcctgggaccctgtgccgcgagcaggccaggcagtgtgacctcccggagttctgtacgggcaagtctccccactgccctaccaacttctaccagatggatggtaccccctgtgagggcggccaggcctactgctacaacggcatgtgcctcacctaccaggagcagtgccagcagctgtggggacccggagcccgacctgcccctgacctctgcttcgagaaggtgaatgtggcaggagacacctttggaaactgtggaaaggacatgaatggtgaacacaggaagtgcaacatgagagatgcgaagtgtgggaagatccagtgtcagagctctgaggcccggcccctggagtccaacgcggtgcccattgacaccactatcatcatgaatgggaggcagatccagtgccggggcacccacgtctaccgaggtcctgaggaggagggtgacatgctggacccagggctggtgatgactggaaccaagtgtggctacaaccatatttgctttgaggggcagtgcaggaacacctccttctttgaaactgaaggctgtgggaagaagtgcaatggccatggggtctgtaacaacaaccagaactgccactgcctgccgggctgggccccgcccttctgcaacacaccgggccacgggggcagtatcgacagtgggcctatgccccctgagagtgtgggtcctgtggtagctggagtgttggtggccatcttggtgctggcggtcctcatgctgatgtactactgctgcagacagaacaacaaactaggccaactcaagccctcagctctcccttccaagctgaggcaacagttcagttgtcccttcagggtttctcagaacagcgggactggtcatgccaacccaactttcaagctgcagacgccccagggcaagcgaaaggtgatcaacactccggaaatcctgcggaagccctcccagcctcctccccggccccctccagattatctgcgtggtgggtccccacctgcaccactgccagctcacctgagcagggctgctaggaactccccagggcccgggtctcaaatagagaggacggagtcgtccaggaggcctcctccaagccggccgctccaatgttggagcggccg

SEQ ID NO: 215568 - DNA, 295 bp, Homo sapiens
gtgctcacggctcctgctgccaccagtgtaaggtaagtggcccttttctccacgccttgggccctggcctgacagtgggaccacaggactgctctgctggggtggatggctggggatttgcctccatcctggggctgtgatggcaacagagtttcagaaacacagagcggaaaaggtgccttgaataaaatttactattcctatactgggcctcactgaattcagatcatcccagaggagggtggcgcttctttggaaatggtacttttttttttcttttttaaagaagtatcca

SEQ ID NO: 215569 - DNA, 401 bp, Homo sapiens
ctacacagaaacccattatacttcaagtggtaaccctcaaaccaccacacggaaattggaggtgagttcaggtcaacaaatgtctatccagcagctgtcctctcccagccctactcctaggacctcaggagatgcctgatggagttggtctctcctctgaagggagtgtttcccccaagcgaagaccaagggagcaaacgagaagcaaaacatgtatttgatgttcataggtgctcctcctcctttgctgactacaatggctaaagaaacatagactattttagggtaattgcatctaattacaattgatgcaaattactgtgaaatatacatgttctttgctttatgttaattacccacatgttaacaaaagttttagtaaaaggagtgacttactcata

SEQ ID NO: 215570 - DNA, 6476 bp, Homo sapiens
  misc_feature (2)..(2): n is a, c, g, or t
  misc_feature (4)..(5): n is a, c, g, or t
  misc_feature (10)..(11): n is a, c, g, or t
  misc_feature (2892)..(2892): n is a, c, g, or t
  misc_feature (5467)..(5468): n is a, c, g, or t
gngnntccanngccgggcagtgggcaggtatggctgagggcgtgtgagcgccgagcgctaagggccgccgccaccatgccagggggcgcaggcgccgccaggctctgcttgctggcgtttgccctgcagcccctccggccgcgggcggcgcgggagcctggatggacaagaggaagtgaggaaggcagccccaagctgcagcatgaacttatcatacctcagtggaagacttcagaaagccccgtgagagaaaagcatccactcaaagctgagctcagggtaatggctgaggggcgagaactgatcctggacctggagaagaatgagcaactttttgctccttcctacacagaaacccattatacttcaagtggtaaccctcaaaccaccacacggaaattggaggatcactgcttttaccacggcacggtgagggagacagaactgtccagcgtcacgctcagcacttgccgaggaattagaggactgattacggtgagcagcaacctcagctacgtcatcgagcccctccctgacagcaagggccaacaccttatttacagatctgaacatctcaagccgcccccgggaaactgtgggttcgagcactccaagcccaccaccagggactgggctcttcagtttacacaacagaccaagaagcgacctcgcaggatgaaaagggaagatttaaactccatgaagtatgtggagctttacctcgtggctgattatttagagtttcagaagaatcgacgagaccaggacgccaccaaacacaagctcatagagatcgccaactatgttgataagttttaccgatccttgaacatccggattgctctcgtgggcttggaagtgtggacccacgggaacatgtgtgaagtttcagagaatccatattctaccctctggtcctttctcagttggaggcgcaagctgcttgcccagaagtaccatgacaacgcccaattaatcacgggcatgtccttccacggcaccaccatcggcctggcccccctcatggccatgtgctctgtgtaccagtctggaggagtcaacatggaccactccgagaatgccattggcgtggctgccaccatggcccacgagatgggccacaactttggcatgacccatgattctgcagattgctgctcggccagtgcggctgatggtgggtgcatcatggcagctgccactgggcacccctttcccaaagtgttcaatggatgcaacaggagggagctggacaggtatctgcagtcaggtggtggaatgtgtctctccaacatgccagacaccaggatgttgtatggaggccggaggtgtgggaacgggtatctggaagatggggaagagtgtgactgtggagaagaagaggaatgtaacaacccctgctgcaatgcctctaattgtaccctgaggccgggggcggagtgtgctcacggctcctgctgccaccagtgtaagctgttggctcctgggaccctgtgccgcgagcaggccaggcagtgtgacctcccggagttctgtacgggcaagtctccccactgccctaccaacttctaccagatggatggtaccccctgtgagggcggccaggcctactgctacaacggcatgtgcctcacctaccaggagcagtgccagcagctgtggggacccggagcccgacctgcccctgacctctgcttcgagaaggtgaatgtggcaggagacacctttggaaactgtggaaaggacatgaatggtgaacacaggaagtgcaacatgagagatgcgaagtgtgggaagatccagtgtcagagctctgaggcccggcccctggagtccaacgcggtgcccattgacaccactatcatcatgaatgggaggcagatccagtgccggggcacccacgtctaccgaggtcctgaggaggagggtgacatgctggacccagggctggtgatgactggaaccaagtgtggctacaaccatatttgctttgaggggcagtgcaggaacacctccttctttgaaactgaaggctgtgggaagaagtgcaatggccatggggtctgtaacaacaaccagaactgccactgcctgccgggctgggccccgcccttctgcaacacaccgggccacgggggcagtatcgacagtgggcctatgccccctgagagtgtgggtcctgtggtagctggagtgttggtggccatcttggtgctggcggtcctcatgctgatgtactactgctgcagacagaacaacaaactaggccaactcaagccctcagctctcccttccaagctgaggcaacagttcagttgtcccttcagggtttctcagaacagcgggactggtcatgccaacccaactttcaagctgcagacgccccagggcaagcgaaaggtgatcaacactccggaaatcctgcggaagccctcccagcctcctccccggccccctccagattatctgcgtggtgggtccccacctgcaccactgccagctcacctgagcagggctgctaggaactccccagggcccgggtctcaaatagagaggacggagtcgtccaggaggcctcctccaagccggccaattccccccgcaccaaattgcatcgtttcccaggacttctccaggcctcggccgccccagaaggcactcccggcaaacccagtgccaggccgcaggagcctccccaggccaggaggtgcatccccactgcggccccctggtgctggccctcagcagtcccggcctctggcagcacttgccccaaagtttccagaatacagatcacagagggctggagggatgattagctcgaaaatctagacctgtccaaggggcttctccctttccttgagctctctggacactgcagaggacccatgnccatggaaccctgaagaagcatgtctggccgcctctgagctcctcccaccctcctccaggaacctccacatctccaaaaatctccctgttgactcagtgcctcctcggcttccttggaagcccagagggactatgatctgatggcctctaggtgttgttttgtgcaatatacagccccaggtagggaggggagagtatgaggagggtgactggcagcttctcctccagactcctagccccgaggtgctgatggagatgctcaaggccagcaagcccctcaggccagcacttcgcttgcagaagccatccattcactcctggggtgcagggcacgcaagagagcttcccattgcttctgctctcctcagaggtcccgggctggatggaggctggtacttacccaccccttttagcttttagggattaaggaagggtcaagccagccactgctgtggccctgcccagggcttggttgagggaacggcttctggctgtatggctgcatgtgacaagccacgtcccctcccacctctccccaaacccctgcatccctgtattcacacgggtcactctgactcagacaggtactattcgtaggcagtgtagacagcaggaggagcaccgggcttgggcttcctctgagccgtgatgccaaaggttgcgactcctgactctggataatttttagttgctctttgttttctctgccgcactttcctggtgccccacgcttttctctcttccttcccctctcattctccctctaatgtgtggtgctttggtgagcaaaccctcagcagtcctgaccttcgggtgaccaggtgcttgtgacctacaagtcagagtccactctcacagtcggccactggatttccctcactggctctcaggagtgtgaccagagtagactcggggcatggccattggggtcatatgtttatttttcattgtgttttgtgacctcagcagggtgggggtcttcctccttactctaagctaaatctaggtgaggtttccccttagggagcccagctatttacaaagtacacacgagggagcaggctggtcattgacttcgggctggaccgttgccctctgagcagagaacagacccattttctgggagctgcccgagatcactggagaaggcagccagcagcagctgcactggaacagtcagagcagggagcctcttcctcaacccagctttttgtcattcacttccttttgttctctctctggtcactgcccttacctgaccctcacagaaagagagctctgagcaggtgagggggtctgcggtggctcctgtcttccctgcagcagggaaggagggccgtgtggtgctttgctagataggacggtttttgcaaagcacctggagatgtttgctgggagatagactcccactccacaaaggtgctgggtggctctccggacaggagctggcctgactctcactcctctgaggctttcctggggcctcctcccatcctgccatgagcaattgtttgctcttgaaaacctcactgcaaggctgaagctgacttctgattcaccaccccagggcctccttatagttctctgcacacaataggtgcttcttggatgttcttgggtttggaaataagtggaaaatacgggatgtacccctgggggaaaagcctgggttgggtttagaaagatctcaggaaaatgagtttctcttccctcagggtggctgtgatacaggttccccatgtccttgccgtgggtcatccttgctgtgggtcatccttgctgtggagatccattccccacctttcctgtggcccaaccttttatttaaatgtgctaccctctgcctcaaggcttggttcctggaaagtaaaggtgaaaacatcccctttcacccctctgcaaaacaaacaagcaacatcctcaaaacccaaccccatgcctcacagagcttcctgtggcttctccagcctttctccctcacatcaggaggtagatagctctgaaatgacagcgccacagccatagtgactgcatgagccatctgaacctgcagtccaccctccctggaaccacaccagaaagagacctgggttgtcgttttcttgctttttgttttgttttgttttattattttcatatcacctccatcccataaagttgtactgtgaactggaagatggtggaatgttttggaatttgatagactttcggcaaccagttctactaatgcttcactcctggctctgttcagggaggctgcccaggaggaagactggccattatgcatccccttttctttccagtgcccagtatgctgttttgaggtgtcaaatacaaataaatctgggcttagggaaggagagaccttattccaaagcatgattgcagaaggggaaagggaatattgcaaaagggagaggaaggggccttatgggaatagtgaaaaggctcagaccgaccgatggcaagatctgcaagcgtctcaaagcccaggcagaaaaggacttttcttttattggaagaagtaaacatggctagaaagaaccacgttcagggaatgacgttgtgcccagcnntttttttttttttttttttttgtctccaggggaggggctgtttgctggctcaggctgaggatggcccaaagtccagggtctggtggggaggagggaagcttaactcaagtttgggttagtgagttagcaagctctttgtgcagatggggatgtaggtaaatctttttaaaagtgaaattaacctcctgccaattttacaacccaagaatttttttttaagggccttggagccatctctaaaacaaacctcaagggatttagtgccctgtctccctgtctctagaagccttagcctgggcacctggctcaatcttgtaactgcctgctagccatagattcctttcagccttgctgacttctccctataaaagtaaagcctttttctgccccagctctgagacacttgcagatcttaaggtctgagacttgctgattttctggttggagtgtttttttgtattgccatagtcccttccccctgaagcaatagcccctccccacctcctgcaatacgcctttccaatctttattggaagtctctccctgcctacttcctaatttattcttatttgacagagggtatggaagacttgcaatttgaaaactggggaccagttccaaagtcagtaattgtgttaaccacgtgtataacagctctgctggacacccaagaaagccatgggaacgccaactggaaaggtccccttccccaggggagcctgcgaaggagaggttctgtagaatccaagcccacatttccaaagtcacccccaacgcgtcctctcacaccgtccactgtgcgtttgtatgtgtctgggatccagggcaatgtgaattttctttttatttgggagattgttcacggaaaacagatcttcttctctcttgtccacctattaattgtttacaatatttgtacatctatgcaaaatacttgaatgggccatggtgccttttttccttgttagtatttaattaaaaatgaattgtttgtcatttgcaatgtta

SEQ ID NO: 215571 - DNA, 5510 bp, Homo sapiens
  misc_feature (2)..(2): n is a, c, g, or t
  misc_feature (4)..(5): n is a, c, g, or t
  misc_feature (10)..(11): n is a, c, g, or t
  misc_feature (2892)..(2892): n is a, c, g, or t
gngnntccanngccgggcagtgggcaggtatggctgagggcgtgtgagcgccgagcgctaagggccgccgccaccatgccagggggcgcaggcgccgccaggctctgcttgctggcgtttgccctgcagcccctccggccgcgggcggcgcgggagcctggatggacaagaggaagtgaggaaggcagccccaagctgcagcatgaacttatcatacctcagtggaagacttcagaaagccccgtgagagaaaagcatccactcaaagctgagctcagggtaatggctgaggggcgagaactgatcctggacctggagaagaatgagcaactttttgctccttcctacacagaaacccattatacttcaagtggtaaccctcaaaccaccacacggaaattggaggatcactgcttttaccacggcacggtgagggagacagaactgtccagcgtcacgctcagcacttgccgaggaattagaggactgattacggtgagcagcaacctcagctacgtcatcgagcccctccctgacagcaagggccaacaccttatttacagatctgaacatctcaagccgcccccgggaaactgtgggttcgagcactccaagcccaccaccagggactgggctcttcagtttacacaacagaccaagaagcgacctcgcaggatgaaaagggaagatttaaactccatgaagtatgtggagctttacctcgtggctgattatttagagtttcagaagaatcgacgagaccaggacgccaccaaacacaagctcatagagatcgccaactatgttgataagttttaccgatccttgaacatccggattgctctcgtgggcttggaagtgtggacccacgggaacatgtgtgaagtttcagagaatccatattctaccctctggtcctttctcagttggaggcgcaagctgcttgcccagaagtaccatgacaacgcccaattaatcacgggcatgtccttccacggcaccaccatcggcctggcccccctcatggccatgtgctctgtgtaccagtctggaggagtcaacatggaccactccgagaatgccattggcgtggctgccaccatggcccacgagatgggccacaactttggcatgacccatgattctgcagattgctgctcggccagtgcggctgatggtgggtgcatcatggcagctgccactgggcacccctttcccaaagtgttcaatggatgcaacaggagggagctggacaggtatctgcagtcaggtggtggaatgtgtctctccaacatgccagacaccaggatgttgtatggaggccggaggtgtgggaacgggtatctggaagatggggaagagtgtgactgtggagaagaagaggaatgtaacaacccctgctgcaatgcctctaattgtaccctgaggccgggggcggagtgtgctcacggctcctgctgccaccagtgtaagctgttggctcctgggaccctgtgccgcgagcaggccaggcagtgtgacctcccggagttctgtacgggcaagtctccccactgccctaccaacttctaccagatggatggtaccccctgtgagggcggccaggcctactgctacaacggcatgtgcctcacctaccaggagcagtgccagcagctgtggggacccggagcccgacctgcccctgacctctgcttcgagaaggtgaatgtggcaggagacacctttggaaactgtggaaaggacatgaatggtgaacacaggaagtgcaacatgagagatgcgaagtgtgggaagatccagtgtcagagctctgaggcccggcccctggagtccaacgcggtgcccattgacaccactatcatcatgaatgggaggcagatccagtgccggggcacccacgtctaccgaggtcctgaggaggagggtgacatgctggacccagggctggtgatgactggaaccaagtgtggctacaaccatatttgctttgaggggcagtgcaggaacacctccttctttgaaactgaaggctgtgggaagaagtgcaatggccatggggtctgtaacaacaaccagaactgccactgcctgccgggctgggccccgcccttctgcaacacaccgggccacgggggcagtatcgacagtgggcctatgccccctgagagtgtgggtcctgtggtagctggagtgttggtggccatcttggtgctggcggtcctcatgctgatgtactactgctgcagacagaacaacaaactaggccaactcaagccctcagctctcccttccaagctgaggcaacagttcagttgtcccttcagggtttctcagaacagcgggactggtcatgccaacccaactttcaagctgcagacgccccagggcaagcgaaaggtgatcaacactccggaaatcctgcggaagccctcccagcctcctccccggccccctccagattatctgcgtggtgggtccccacctgcaccactgccagctcacctgagcagggctgctaggaactccccagggcccgggtctcaaatagagaggacggagtcgtccaggaggcctcctccaagccggccaattccccccgcaccaaattgcatcgtttcccaggacttctccaggcctcggccgccccagaaggcactcccggcaaacccagtgccaggccgcaggagcctccccaggccaggaggtgcatccccactgcggccccctggtgctggccctcagcagtcccggcctctggcagcacttgccccaaagtttccagaatacagatcacagagggctggagggatgattagctcgaaaatctagacctgtccaaggggcttctccctttccttgagctctctggacactgcagaggacccatgnccatggaaccctgaagaagcatgtctggccgcctctgagctcctcccaccctcctccaggaacctccacatctccaaaaatctccctgttgactcagtgcctcctcggcttccttggaagcccagagggactatgatctgatggcctctaggtgttgttttgtgcaatatacagccccaggtagggaggggagagtatgaggagggtgactggcagcttctcctccagactcctagccccgaggtgctgatggagatgctcaaggccagcaagcccctcaggccagcacttcgcttgcagaagccatccattcactcctggggtgcagggcacgcaagagagcttcccattgcttctgctctcctcagaggtcccgggctggatggaggctggtacttacccaccccttttagcttttagggattaaggaagggtcaagccagccactgctgtggccctgcccagggcttggttgagggaacggcttctggctgtatggctgcatgtgacaagccacgtcccctcccacctctccccaaacccctgcatccctgtattcacacgggtcactctgactcagacaggtactattcgtaggcagtgtagacagcaggaggagcaccgggcttgggcttcctctgagccgtgatgccaaaggttgcgactcctgactctggataatttttagttgctctttgttttctctgccgcactttcctggtgccccacgcttttctctcttccttcccctctcattctccctctaatgtgtggtgctttggtgagcaaaccctcagcagtcctgaccttcgggtgaccaggtgcttgtgacctacaagtcagagtccactctcacagtcggccactggatttccctcactggctctcaggagtgtgaccagagtagactcggggcatggccattggggtcatatgtttatttttcattgtgttttgtgacctcagcagggtgggggtcttcctccttactctaagctaaatctaggtgaggtttccccttagggagcccagctatttacaaagtacacacgagggagcaggctggtcattgacttcgggctggaccgttgccctctgagcagagaacagacccattttctgggagctgcccgagatcactggagaaggcagccagcagcagctgcactggaacagtcagagcagggagcctcttcctcaacccagctttttgtcattcacttccttttgttctctctctggtcactgcccttacctgaccctcacagaaagagagctctgagcaggtgagggggtctgcggtggctcctgtcttccctgcagcagggaaggagggccgtgtggtgctttgctagataggacggtttttgcaaagcacctggagatgtttgctgggagatagactcccactccacaaaggtgctgggtggctctccggacaggagctggcctgactctcactcctctgaggctttcctggggcctcctcccatcctgccatgagcaattgtttgctcttgaaaacctcactgcaaggctgaagctgacttctgattcaccaccccagggcctccttatagttctctgcacacaataggtgcttcttggatgttcttgggtttggaaataagtggaaaatacgggatgtacccctgggggaaaagcctgggttgggtttagaaagatctcaggaaaatgagtttctcttccctcagggtggctgtgatacaggttccccatgtccttgccgtgggtcatccttgctgtgggtcatccttgctgtggagatccattccccacctttcctgtggcccaaccttttatttaaatgtgctaccctctgcctcaaggcttggttcctggaaagtaaaggtgaaaacatcccctttcacccctctgcaaaacaaacaagcaacatcctcaaaacccaaccccatgcctcacagagcttcctgtggcttctccagcctttctccctcacatcaggaggtagatagctctgaaatgacagcgccacagccatagtgactgcatgagccatctgaacctgcagtccaccctccctggaaccacaccagaaagagacctgggttgtcgttttcttgctttttgttttgttttgttttattattttcatatcacctccatcccataaagttgtactgtgaactggaagatggtggaatgttttggaatttgatagactttcggcaaccagttctactaatgcttcactcctggctctgttcagggaggctgcccaggaggaagactggccattatgcatccccttttctttccagtgcccagtatgctgttttgaggtgtcaaatacaaataaatctgggcttagggaaggagagaccttattccaaagcatgattgcagaaggggaaagggaatattgcaaaagggagaggaaggggccttatgggaatagtgaaaaggctcagaccgaccgatggcaagatctgcgtctgattggtgtacctgaaagtgacggggagaatggaaccaagttggaaaacactctgcaggatattatctacgagaacttccccaatctagcaaggtaggccaacattcagattcaggaaatacagagaggggcggagcag

SEQ ID NO: 215572 - DNA, 1630 bp, Homo sapiens
  misc_feature (2)..(2): n is a, c, g, or t
  misc_feature (4)..(5): n is a, c, g, or t
  misc_feature (10)..(11): n is a, c, g, or t
gngnntccanngccgggcagtgggcaggtatggctgagggcgtgtgagcgccgagcgctaagggccgccgccaccatgccagggggcgcaggcgccgccaggctctgcttgctggcgtttgccctgcagcccctccggccgcgggcggcgcgggagcctggatggacaagaggaagtgaggaaggcagccccaagctgcagcatgaacttatcatacctcagtggaagacttcagaaagccccgtgagagaaaagcatccactcaaagctgagctcagggtaatggctgaggggcgagaactgatcctggacctggagaagaatgagcaactttttgctccttcctacacagaaacccattatacttcaagtggtaaccctcaaaccaccacacggaaattggaggatcactgcttttaccacggcacggtgagggagacagaactgtccagcgtcacgctcagcacttgccgaggaattagaggactgattacggtgagcagcaacctcagctacgtcatcgagcccctccctgacagcaagggccaacaccttatttacagatctgaacatctcaagccgcccccgggaaactgtgggttcgagcactccaagcccaccaccagggactgggctcttcagtttacacaacagaccaagaagcgacctcgcaggatgaaaagggaagatttaaactccatgaagtatgtggagctttacctcgtggctgattatttagagtttcagaagaatcgacgagaccaggacgccaccaaacacaagctcatagagatcgccaactatgttgataaggtgagaccaggtgtgtactttgtgggaaaggtgccaggtgccagcacttccaagggcactggagctgccttctgctggattggctgccccagccatcttctgaaagggaatgagcagtgccatagaggcccagggcggtcatgacagagccctgaactacgtacccttaggcaagtaactcattttctttgtgttgcatttttttttcttttgttctgttttcagcttataaatagaaaggctgtcgtaaatcaatgtgtggtttttttttgttatttttattttcctggtggaattttaaaaaatgaaatcttatgccaatatctactataaaagttagatgaaaacagactgctctaagtgggagctggggtgaggacccagaacactgtccttctgaccccttcctcttacccctgcagtggctcccgagcagcttggggcatggaagagcccagtttaagaatcctttaaggttctttaaggttccttccagatacaaagcccagggattctctgacttaggagggaattgaggtaggtcagggtgggaaagacacacagccttaaaagttgagaagtgggctgtttgagaagtgggttgcttgagaagcggattgtctgagaagtgggttgcttggggctaatctataaagtctccatctgtaaagttatcctaaaattatgtcttgtctcttaggaaggatgtgcagtggttaactttcctaggtcaggaccttttacaagatgctcttcggaaatacctacatttttgaattttactagaacgggctggtctgggacttggaagtacatt

SEQ ID NO: 215573 - DNA, 423 bp, Homo sapiens
gttcccttcttcgtagaacaagtgtttttttaatttccacaaaaatctccatcactctctcatttgcttctaacgactgaaacctctgttgctcccagaagacaagatttaattcatttatccgtttaaagtaagagtctaccagccaggagtggtggctcacatctataattccagcactctgagaggccgaggcgagtggatcacatgaggttggaagtttgagaccagcctgaccaatatggaggtcttatctctactaaaaacacaaaattagccgggcatagtggtgcatgcctgtaatcccagctactcgggaggctgaggcaggagaatcgcttgaacccgggaggcagaggttgcggtgagccgagatcacgccattgcactccagcctgggcaacaagaacgaaactccaactc

SEQ ID NO: 215574 - DNA, 607 bp, Homo sapiens
ccatgtagcttcatgagtacatataaagaaacaaaaaagtacttcaaagtaaaagaatcttcatctgggttggttccaagtctttgctattgtgaatagtgctgcaataaacatacatgtgcatgtatcttcatagtagcatgatttataactcgtcatttacattaggtatttctcctaatgctatccctccccctgccccccaccccatgacaggcccgagtgtgtgatgttccctgccctgtgtccaagtgttctcactgttcaattcccatctgtgagtaagaacatgcagtgtttggttttctgtccttgcaacagtttgctcagaatgatggtttccagcttcatccatgtccctgcaaaggacatgaactcatccttttttatggctgcatagtattggtacatgtatacatatgcaacaaacctgcacgttgtgcacatgtaccctagaacttaaagtataattaaaaaaaaaaaaaaaaagaatcttcatcttgaacaccgtctttttaaactataccttaccgctattgttcaatccattcgtcttagggaatgaaagaaaagtgtatttttttcttactctttaaatacctttcaa

SEQ ID NO: 215575 - DNA, 358 bp, Homo sapiens
gatgtaaggtagaggggtgctagaaatctttctggaaaataaatgtgacactgataatgaaggccctctctcacaaactgagaagttttaacattatccccaggtgacaggaattattatagagctttcagtaggtgattaatcccatttgtggaatgcagagtggaacttaggaatgcaaggttggagatgaggctatgtattagcaagctgtaaagtgcttttagaatttaaaatggatagcaggcccacgggtaatgttggataaatgttcattacagttaacaccagtctatccttctgcttttttcactcagtgaccatcaatggtagtaattttcaaaagagattcagaaat

SEQ ID NO: 215576 - DNA, 275 bp, Homo sapiens
tagtaagtgaccaaatgagaattcaatccctggctgtctggctccagtaacactacacaaatggtgcttgccacttaatgagcacttggtcaatattctctcttattattagatgggatctctgactgggaggggagaagggggagaggaaggggctctggagcctgggaggaggcttaaggagacctcggggagagggctgggggcagctaggggcagagccgtgttcctttttgtatactatgtcaccacagtaaaatcacttcctctatcaa

SEQ ID NO: 215577 - DNA, 367 bp, Homo sapiens
ggcatgctccactatgcctggctatttttttccccctggagacaggatcttgttgtgttgcacaggctggtttcaaactcttggcctcaaagctagcctcccaccttggtctctgaaagtgctagaattaaatagaattaaaggtgtgaccaactgcacccagcttatttatgatgatgatgatgatgatgatgatgatgatgatgatgatgtttgggagatggagtctctgtcgcccaggctggagtgcaatggcacgatctcagctgactgcaacctctggctcactgcaacctccacctcctgggttcaactgatttttgtgccttagcctcctgagtagctgggattacaggcacccgccatc

SEQ ID NO: 215578 - DNA, 375 bp, Homo sapiens
gctaaactgtggtatatccgtaacatggaatacaggttgagcataccaaaagtccaaaatgcaaaatgctctgaagttcaaaacttttagtgctaacatgacacaagtggaaaattccatacatagtactccctgaagtagctcccctatcatacacactatgccccagccaggatggaaacagacagttccccataaggctcctgtatcacaagagatttattttcaaacccattctttctttactgaaggtgtaatccttgtggagatttagagtttatgccagggtctcaaattcagcagcctacactgtggcagatcctcctcttacagagctgttattcccaaagctctagttcctggaggcacatacct

SEQ ID NO: 215579 - DNA, 487 bp, Homo sapiens
ggcatgcaactcaattggttatcagagaaacgaactttttaaaccagaaatgttgtatcactagacagtcagcagattggctaaaaccaacgagacagataaggccagagttgatgaggaggtgggatggggcgtgatgggacgcttgtccctcatggtggctgtgacctcacctcttaattttggaaaactttggcaatatcttctaaagcggagcaaacccatggcttgtgacccagcagctctgctctgaggcgtgaacccacagccaggagtgtcgccggagccgtgttcatcaggcctgtgtgccctgcggaggtggactgggtgaacacactgccggctacttgcccaggggagcagcatggaatgagctgcgtggagacacccgtgctccgcctgggcgagccgacacacacatgctgggtggaagaagcgcagtgggtcagcacatgtgcaaggccctcgtaagttgccgccaatcgaa

SEQ ID NO: 215580 - DNA, 256 bp, Homo sapiens
gtctcccctcttctcaggtgactggggtagctctgtctgccactaaccacatgacagtcatttatattagcatacagagccatttatttcctcttgtctcaacctgtccattccagaatcagctctgagcctttcctctgcataacgaaaaagcccagtgtttttcccaaaacaaaaagcagtcttttcccttaggtggattgtcccgcttcctcttgctaaacaataaacagctgaagctttggaattgctgtgt

SEQ ID NO: 215581 - DNA, 437 bp, Homo sapiens
ggatggcaccagggcacagcccagcctccctccggctccctaagcagttccgagtggacacgagcgtttcattcactaagtcactcgagcttgagagagacgcatgaggggctgcactctggtgagcttcgaatctccttttgcacacctggaaggttctcgtgggtgttctttgtcctcggatccagagtgtatctgatgccacacgccgcacacctgatgccacacacctgacgccacacacctgacaccacacgccacacactgcgcacctgacgccccacatggcacacctgatgcgcacacggaacacctgccacatgccgcacacctgatgccacacgctgcacacctgacgccacacacctgacgccccacacggcacacctgacaccacacacctgaccccacacacggcacacctgatgccacatgct

SEQ ID NO: 215582 - DNA, 571 bp, Homo sapiens
tcttttctttgtgaagggcaggccccctggaatgggttcgccccgagagtctccgtcgaactagttcgacggagatctccaagattataattaagtcacttctgctaaaatttcactcaagaaatgaggaaaaaataataatatatcccccctgagataaagttataaaccaaacaaatttattaaaagaaacaaaaactatcgtaaaatttgaatggggcttaagaaatcagcacatattcctattaatataccatatgattatgctctattttagtttatctcaaataacattaaaacacttaagagccaacctacatttttcttttaaagtattctttttcagaaacctggccaaattgtgtcacttgagatatgcaaacatacctgccaaaaacagaaaaattccaggaagagcctttgaaagaaaataattcattaggaagttgaagtagaaatctaaagagtaactaaattatagagtttgaaaattttcagaaattgagtgcctaccatgtctaatctaacgtctctcaagatacatatatatatgtatctacatatgtattat

SEQ ID NO: 215583 - DNA, 1043 bp, Homo sapiens
tcggcaagcagtagggaaccattatcactcctttgtcaggtatcagccagtagataaatacatattttgaagaaaggatttacatgctagttcctgctcaaaaaaaaaaaaaaaaaaaaaacttcaaggaatatgaatcatgcctggaaaggaaataatttagacatatataaataaggtggtctgaggtcaaagagttaattaaacttttaggaactgctatttccattagagaaatattcttagataaagccagatctgtgggaaacaaagctagaattgccagtaccattcaatatatttattttgtaaccaataaatcaataaaaaagtttaaagagtatctgtcatgcatataataattaggttgaactcagaataaagaaaaaattaagagatgtggttcctgacctcatgaaacttatattctatttttaacttgaaaattaccaaagttgtcccttttcttttttaacctacagtatatggctttctacataagtgattttattaagtccaggacccaattagttgtaagcaacatgcatctccaagattataattaagtcacttctgctaaaatttcactcaagaaatgaggaaaaaataataatatatcccccctgagataaagttataaaccaaacaaatttattaaaagaaacaaaaactatcgtaaaatttgaatggggcttaagaaatcagcacatattcctattaatataccatatgattatgctctattttagtttatctcaaataacattaaaacacttaagagccaacctacatttttcttttaaagtattctttttcagaaacctggccaaattgtgtcacttgagatatgcaaacatacctgccaaaaacagaaaaattccaggaagagcctttgaaagaaaataattcattaggaagttgaagtagaaatctaaagagtaactaaattatagagtttgaaaattttcagaaattgagtgcctaccatgtctaatctaacgtctctcaagatacatatatatatgtatctacatatgtattat

SEQ ID NO: 215584 - DNA, 479 bp, Homo sapiens
tgagacggagtcactagtcttcttttggaatcacatcaggaaagggaagttgttagtgcttatgccaggtagctggaagacatctttgtgatatttatgaagatcagccctgttgggcaatcgttgcctctgccagaatgacttacccatttatctaataaagggaaacatctaaattcttgaacatgtaataattcacttgataaaattcaggtttttataaacaaatcatattaaaaccccaaaagttaattaacaggtgataaaccttgcttttacttccttgtcccatcacattcattcatagtcataatacactgacaattattgagtgcctttgatgtgccaaaagcacttgctaaatgctttgtttggaaagggatgtttgttaattggggtggtacctcccaaataatgaaacatacacacttttgttttattgaggatagggttttatcattccacagctgttccttgag

SEQ ID NO: 215585 - DNA, 175 bp, Homo sapiens
ggatccaccattggggagcattaactcattctgagtccagaggaggtcctgtctctgagtgctgtctcagtgcagagggagaggaaggagtaggcagatagcaggaagcagagctctgagtaatatcgcgctgctctggaacatctgtttctcctcacctgtgtagaacagtagc

SEQ ID NO: 215586 - DNA, 334 bp, Homo sapiens
cggctgcagcctcggaatagccggtcacaggccactgcgctgctgtcggtgaaaggcagcccgggacctgaggccgaacgcaagctcaggccgcagctaccaagggaacctgcctaagcgggcggcacagaagggagcgccggggacgctctggttttcagatcccctttcggaaggtgagattgtttttcataacaggcaaaggaagataagccccgcgcccggcgaaaccctggccctccctcgctgctgcctctggccctgtgtgcagctgaacgcagctcttatttaaatcatgttgaggaattaatactggtgcactgacaggtttttt

SEQ ID NO: 215587 - DNA, 535 bp, Homo sapiens
agaagtcataatctaggtctttttagtagacaaagctaggaaatgtttgtttttttgagaaaatacattgtgagttcattccgatatttacattcaaattaaaagctttaaggttttattatgtatcttcttttatatctgaatcccttttctcttatgctgaaaaactgtaattacattaacgtaactacttgtttgctttactctataatattttcagaataacattacaaatattaacattatgattactgaaaacagtacatgattttttttgcaatttttttttgcccttagaatcattacagtgttttatagtcatttggaataatttttctctgttaggctatgttgctaactcaaaacaaagttagatgcatttgtttcactgtgcttttactaagcttgtctttttggaaaatttcatttagttttgctggcagatggttccaaagtggaaaaaatataagatctatttagatgagtgtagcttttaaccttgtcttttcctacccccagctaaaaaaaaaaaatt

SEQ ID NO: 215588 - DNA, 518 bp, Homo sapiens
gaattcatactggagagaagccttatgaatgcagtgactgtgggaaatctttcccttctaagtcacaactccagatgcataagagaattcatacaggagagaaaccctatatatgcactgaatgtgggaaggctttcaccaacaggtcaaatctcaatactcaccagaagtctcatactggagaaaagtcttatatatgtgctgaatgtgggaaggccttcaccgacaggtcaaatttcaataaacaccagaccattcacactggagagaaaccctatgtttgtgctgattgtgggagggccttcatccagaagtcagagttgattacacatcagagaattcatactacagagaagccttataaatgtcctgactgtgagaaatccttctccaagaaaccacatctcaaagtacatcaacgaattcacacaggggagaaaccatatatatgtgcagaatgtgggaaagccttcactgataggtcaaatttcaataaacatcagacaattcatactgga

SEQ ID NO: 215589 - DNA, 816 bp, Homo sapiens
tgcagtcaatctcctacctctttggtcactgcaatgaactctttataatgaccagtttactttatgttcctataattttgtctctcatataaatagaatcacatgtcttttgtgtccagcttcttttacttagtataatgtgtctgagatggacccatgtcgtcacataatatcaatagttcatactttttgctgctgagtagcattccattgtatagatatatcacaatttgtttattcattgaccaactgatcaactggcttatttccactgtaattctagttttaaagtatactgatttgacagaaaacaagaacctgccaatgttagtgctgaggttaaagagatgattagcaaaaacagaaattgggaccagaaatagaatatacattctagacaaagatatgcctttctttaatatattctttaagcagcatctattaattcaacaaataattgaacatcaagtcccaggcattatactcgctatcagtaatatgaaaatctaagatggggtcccttgtagtctagttcaggggccagaaaactagatacagctcatgggccaaatcctgtcagctgcctatttttctaagtaaggttttattggaacacagccatgctcattcatctatgtactgtctatggctgtttttgcactaaaatggccgaaccaaatagtctcaacagactatacggcccacagggcctaaaatatttcctatctagtcttttatttttaaaaagtttggctgggcacagtcactcatgcctgcaatcccaatgctttgggaagacgaggccgggagatcact

SEQ ID NO: 215590 - DNA, 677 bp, Homo sapiens
tacatttagaaatgcactgggaatgccagtgctttgggaggccaaggcaggcggatcacctgaggtcaggagttcaagaccagcctgtccaacatggtgaaaccccatctctactaaaaatattaaaaattagctgggcgtggtggtgggcacctataatcccagctactagggaggctgaggcaggagaatcacttgaacccaggaggcggaggttgcagtaagccgaaatggcaccattgcactccagcctgggcgagaaaagcgaaactctgccaaaaaaaaaaatggagccattggtttggaagagattacttggcgagaaggtacagagtgagaccagtagagtcctagcatactcccctgaggaactagtaaatgttgggggagaaatttcaattttccttttctaaataaaatcccaaattctctccattattctatgctgatttggtcgataaagaggctaagagaggaggatggtgcgtagtatttaagtggctcaactaaaatgctgcctttggtaatgcattctgtgtaatggtatttttaaggttttcatgtgatactgtttcatatgcatttctgagtatggatgtaaactattttaatgaaacagatgcattcaggcccttgcatattcttttttcttgttgaagaggaaggttgtgggactt

SEQ ID NO: 215591 - DNA, 155 bp, Homo sapiens
cccacccaacaaaaggagagatggcttttacagcctttagattaaagtttatgtactagataacaatctttaaaatctgacatcttttgaagcataaattaagtttgaaatttgagtgtggacccatttggagtttgtgtccagttaggcatact

SEQ ID NO: 215592 - DNA, 298 bp, Homo sapiens
ttacgggcactgattctgtatctaggctgcctgtgttcaaatatagactctgccatttattagctgtgtcaccttgggcaagccatttaacttctctgccttgtttcatcattagtaaaatggagagatgtcaatttatgtatcttaaatgactggaaggattaaacgaactaatatggtaagtgtcctgtgaatggtggtcaccttatcaacttcagtaacacatctttctctgtgtctgttttgctctggctacaatggattttttttgtttgtttcatttttcattgagaaagac

SEQ ID NO: 215593 - DNA, 147 bp, Homo sapiens
gccactcaaaccccttttaacccaggtgccagaattccttgctcacaaagctctgactctacagatatgtgaaaatattcatggagaattttctcctggactcttgttttaactttttttagggggaagatcaggattggctgacta

SEQ ID NO: 215594 - DNA, 311 bp, Homo sapiens
cgactcttgaggatccacgaattcatcagccagcagtgtcagcatcaccccagaacttgttagaaatgcacattctgaatcagaagctcaaggtgggcccagcaatgtgtgttttaacaagcccacctggtgattctgatgcatgctcaaatttgagaatttgagtccccaactggtcatttaggttgtttcagtcttttgctattacaaaccatgctgaaattaataacattatacatttttatttcacacttgtctgtgtatttgtgggataaatttctcaaaattggtgggtcgaaggctatgcacac

SEQ ID NO: 215595 - DNA, 532 bp, Homo sapiens
gctggtcctgaactcctgacctcaggtgatccacccgccttggcctcccaaagtgctgggattacaggcgtgagccaccacgcctggccagtacactcttccttgcaccttgcttttttcacctaatgtgtgttgcagatccaatcatgtcagtacatagggggtgggtgtgttctttaacagctgtatggtatcccacttgtactccagtttgcttagaatgctagttctctagtatctggtccctgggccagcagtgtcagcatcaccccagaacttgttagaaatgcacattctgaatcagaagctcaaggtgggcccagcaatgtgtgttttaacaagcccacctggtgattctgatgcatgctcaaatttgagaatttgagtccccaactggtcatttaggttgtttcagtcttttgctattacaaaccatgctgaaattaataacattatacatttttatttcacacttgtctgtgtatttgtgggataaatttctcaaaattggtgggtcgaaggctatgcacac

SEQ ID NO: 215596 - DNA, 481 bp, Homo sapiens
ctgtaggactctgatgttgagatctcagaaataagacaagtaactgctttgtattacacctgcgtaaaggacaggcacactgatcaagggtttgactcttttcaccgacaataatctggtgcccaacattgggcctcggagaagactcaggaccctgaaggagttgcccaaaactggagctaaggtaccagcaggagcccattgaagcctcaccgaattcgagcttctccttcggtggaactgattatgaaaagagaaaaggagaatggctatggcctcaaaccacttggaaccctgattttcctaaacttggcctctaatatccacccccatggaacatagcatctgaatgcaacagcaagacagccgtctacaaaccaagaagagtgccctcgccagaaaatggatttgctggcactttgatattggaattcccagcccccaggactgtgagaaataaatttctgtcatttaagccatc

SEQ ID NO: 215597 - DNA, 454 bp, Homo sapiens
agaatcaggtagatctccatatctcttctgtataactgactcatcaaacaatcatgtcatgttaatttctacttcctatctttccatttgtcccttcttctccactttctatgttataggctgaattgtgtccccttacaattcatatgttgaaatcttgtcccctggtacttcatagaataatactttatgtggagatagggccttttaaaagtaattaaagtaaaatgaggctgttgcgtgaagcccaaatccaatatgaccggtgttcttataagaagggggagagacatctagaatgtgtatgtacaaagaagaggccatgtgaggatgcaatgagaaggcagtggtctgcaagccaacaggagaggcctcaggagaatccagtgttgtcaaccctttaatcttgagcttccagcttccagatctgtgagaaaataaatttctgttgttt

SEQ ID NO: 215598 - DNA, 292 bp, Homo sapiens
gggtcaagaggggagtgaattcaacacttggaggaaagacttgatttgagctctgattagatgtgaaatttggtttagctgaaaatggagagatggaggggcaggtcctctcatgcgagaaagagggaaagagtgaatggagttgggcgtgcaaggatgtgggcataatagaatgaaagtatgaagaaatgagcgatgagaaactcctaattatgcatggcatttatcaagtacctctcttcttagaaagctcaaatttctacatttttggttcccttggagtagaaaacaa

SEQ ID NO: 215599 - DNA, 443 bp, Homo sapiens
ctctgtagtccttcatgctcttgctccttggctccctctttcttgaatctccactcttcccatcttgataaaccattacctctgagtctagtggtttcttaactcacttgtacattagaatcatcagggaagctttaaaaaaagaaactgatgctgactgggtgataatgatgtatcagtgtaggtttatcgattgtagcaaacattattgtggcatgggatgtcaatatgagtaagggaggttgtgcatatatggggacaggggctatatgggaactctctgtactttctgctcaattttgctgagaacctaaaatactctaaaaaagaaggtggtttttttgtttgtttgtttgtcttaatggtcaaatggtcctgggatcagaatacgtgctaagcatggcaaaaaagatgatcaacatcatttagatagtgctattctt

SEQ ID NO: 215600 - DNA, 377 bp, Homo sapiens
ttttttatggctgcataatattccatggtgtatatgtgccacattttctttatccagtctatcattgatagacatttgggtttgttccaagtctttgctattgtgaacagtgctacaataaacatacatgtgcatgtgtctttatagtagaatgatttataatcctttgggtatataccctgcaatcccattactaggtagtatggcatttctaaccaccctttccttccatgagcttaggcctgggagttgcagtgagtgggagccttaaatctaccaagccgcaaatttctgtgttcctgaggcctctcaaggcatcaacatcttgaatagaaaataagtctatccttaaagatacagtacatttaaagattaaa

SEQ ID NO: 215601 - DNA, 177 bp, Homo sapiens
gttgaactcttaaaattctggaatgtttattttattttattcattgtcttgagaggagcaaaaggaagcgagagggcatagctttgaagaactggcaatttggcaacttctctccccttgccacccctcccccactatcttagctatttgatctgattaaacagctttggaatggta

SEQ ID NO: 215602 - DNA, 300 bp, Homo sapiens
atagtggggattacatttcaacatgggatttgggtgaggataacatccaaactatcttgcccttcttttaccatcaattcttgcaggcagcctcctctgtcctcccattcactattactcttttcagtgtgaccctgtgcaagtaactcactatcacctgacctcaatttcctcacttcaaagggctgttgtgaagaataaacaggttcatatatgtaaggtgcttaaaacaatactaaataaaggtgctggttgtgatactggtttatatcattcatgttgaatgtatttcataagaaa

SEQ ID NO: 215603 - DNA, 513 bp, Homo sapiens
gttggaagtaggtgtagcatccatccaactgaaccgaggcagggaggggatatgaggcttagaatgctccttaggtagacattcagccaattcttctgtttttatctccactttcacacccactttcagaagtactgccaattctttggcatttggggtcttctccaagggttgcttctcagcttttctcattacaagttcaggaatccattttctcagatctaggttggttaactcacatccatcagctcttcaacttgcaaaattttgttactttgtttcctgtctaattctctttttctctaaagttttatgccttaaatcagtttactctccattctaatgggctatggggaggaagtgaaaaatctgtcaactttcctgaaaagtctgtctctccactctttgtcctaaatatttcttcttatacatacacattcctattctgagattgaagatctgctcatttgctgattcagttttagcgatctattatcattaattcggattctc

SEQ ID NO: 215604 - DNA, 367 bp, Homo sapiens
gacacgtaggttgtttgggggctactatgaatatggttgctgcaagcattcatgtgcgtgtcttttggtggcctgggcactcatttctgctgcatgtaaacccaacggtggaagtgctggtctaagggatatgtgtgccaaacttcagtagagattgctgcatagttttcaacatggctgatcccattttacaatcccaccagcagtgtttgagagttgtgattactctgcatcctcgccaacacttgatattatctgtcttttcattttagccaccctgatggtccagacatcactgattctgttgtgaaccctggtggggaaccagtgctccccaatgggtaggaggacgtgagatgtggggagc

SEQ ID NO: 215605 - DNA, 246 bp, Homo sapiens
tgggaggagtgcacaaggcgaggagtttgagactagcctttgcaacatagctagactccatttctacaaaaaatttttaaaacaaacagggtgtggtagcatgcatctgtagtcccagctacctgggaggcagaggcaggagaatcgcttgagctcaggagtataggttgcaatgagctatgattgtgccactgtactgtggcctgggtgacagagtaaaactttgtctctaaaaaacagaaatat

SEQ ID NO: 215606 - DNA, 539 bp, Homo sapiens
cacatgggtttgcttgcagaatttatcacttaattttcagaattcttaaagtcatagaaaaataggaaaaaggaaattaacttagaatagttggcttcttaatcagatcatcagttgatcagaatttgatcagatttgattaacagcaagtttttttcctcatgtgtgttatagaaatcacatatttctgtacttgttcattgataccaactgtcaggtttttctgttgtatgtttgtatcacattcttatggtagatatttgtgataataaatttgcttgccttacacatgaaagatggctagattttagtcaaagaataatttcttgcattttcagtttctcagttgaatggctctagttaattataaccattactgtttctcccacttatacctatttatcattcacaaacatgtttagtctttttcaaaagtccagatagtatgaaaatggccgtttcgttgaatcctcttacattattaacaaaagtttgtcccactgaagatagctgaatggtaataagtagaaaaagtttta

SEQ ID NO: 215607 - DNA, 508 bp, Homo sapiens
tagatcttggcgtcattatagcaaagacaagtaaggtacatcaccaaatgttatggagctgtggaattggggatagtttctgtgtatatcacaggggctttctcctctgatgcttatgtgtttgttaccatcttctctctatagagcatgaaattaattcaagaccagcctgggcaacataacaagatgctgtctctactatatatatacagtatatagtatatacaccatatatatagagtagttatatatatcaatatatatgtataacatatatatatagtatatacatatgtatctagatatattttatatatgcatgtgtatatatgtggtggctgtggttggcagacatttgtagccctagctactagggaggctgaggcaggaggatcccttgcactcaggagttggaggctgcagtgaaccatcatgaccgtgccactgcacttcagccagggcaaaaaaaaaaaaaagtaaaatggaaagttcagtaaaaagaaaagaa

SEQ ID NO: 215608 - DNA, 109 bp, Homo sapiens
tactttgttctgagcccttctcaggcagaggaggtcaggcaggtacacgtgcctttgggaagaaggtggtggaaaaatatggaataatgagcccttctgtcgtcttctc

SEQ ID NO: 215609 - DNA, 407 bp, Homo sapiens
gccactgcactccagcctggatgacagagtaagacctcatctcaaacttaaaaaaaagagtatagcatatacactcatacagcacgtgatacctgataataataaacgactgttactagtttatgtatttgctatactataccttgtattgttattttaaattgtactccttctacttattaaaaaaaaaaaggtaactgtaaaacagcctcaggcaggtccttcagtagggattcgagaaggcattattattatagaagatgaaagctccatgcgtgttattgcccttgaagaccttccagtgcaacaagatgtgggggtagaacagagtgatattaatgatcctgaccctgtgtaggcctaggctaatgtgtgtgtttgtgtcttcatttttaacaaaaaatact

SEQ ID NO: 215610 - DNA, 775 bp, Homo sapiens
catcctttttaaaaatctcattcctttaatggagtatctttagaagaaaaaagaaagctttacatgtactatttgcatggaatcagcttataacaaagcaggatgaacagggtccacttagttgactgttgtttttgcaggctttttgaagtagaaatacaatttttttgtttttactcagaattcatttggcattaaaggctccccataatgtgatttcattagttgtgtactttaattcagatgttgtacggacttcggagtcagacaaaaatcccattttaaacatttaaagagccatatgtacttggtcaaatctaccatctcttttgtgttttgatttcttcatcgcaaagtggagagtagtaagtaccatccactgccagacactctaatcactactttctctctctctttccatatagatatatatgggaatatatgtatagaatgtacatatatttttatatattctctcatatatatatatttccttgatgtgagtgggtatataagctctcatttaatccttgcaacaaccctgtgaaaggtagatggtacctgttttacacatgaggagaaaggatcaatgatataagtaacaagctcatgttcatacagtaactgtatttactaagtacagttctagagacatgggaagcacttcataagtaaaacagcagcaatggtaagtttaaaaaaaatcagataatagaaatgttaaaacaagaatggaatttattaagtgctaaaaattttacatttttaaacttca

SEQ ID NO: 215611 - DNA, 616 bp, Homo sapiens
catgagattatacaagtctgacaattcgatgttcacatcccatgtgaattcaagaagagtgatgttgatgacaaaagaatgaaaatgattcaacagtgtcatcagctctgctagagtaacagtgcaacacagcttagaatttccacatccgctatgggaaatggcatcgttctcgacagcactgggactgaatctctgtgaagcaggggtttcgtctgtttcactaacacttgtccccaagtgcatggctgcctgcctggcacacagaagttgtcccatcaatgtttgtggaatacatagatggaaggtatcccactgagctgcaaagtagtgtcttccttctaaatcagaaccactcctttataacaaatcttagaatggactgcggctgaggctccacgactctagcagacgattccctttactttagcatttcaaaattttctttggtgtctgttttcaatgccaatctaattgcttactgtctcttaagtcaatactgttttctcttcatctcttcttcaaaaaaattttacattgctggtcctttccaataaatgcctttccaatgaccttcaattactgttttctgaaataaatatctgtaattaatgta

SEQ ID NO: 215612 - DNA, 430 bp, Homo sapiens
gcattcaaaggtgtttttttaaaaacaatttggaaggaagagaatgaagatatacaaaacagaaaacattgtgatgtggtagcaaatgtaaatttattatagacttttatacatttaaggaggtttcagtttgtgattcacaatagtggggaacttctcaaagcctcttctaagatacaagaagaagccataattagagcagaaaagagattgaatcaatactagtctgatttactattccatgttatcattagggaaatgatataaagaggagacatacagtaatgggcttttccccctgtgttgtaaatcagtccttctttaatcctttgattcctcttccaggcactttaaaccaggagagcatttactctgttaaatcattatgtttaacatggcatccttctatttgagcatctgctaaaaaaaa

SEQ ID NO: 215613 - DNA, 484 bp, Homo sapiens
acgccattctcctgcctcagcctcccaagtagctgggactaccaggtgcccgccactatgcctggctaatttttttgtatttttagtagagatggggtttcaccatgttatccaggatggtctcaatctcctgacctcgtgatctgcccgtctcggcctcccaaagtgctgggattacaggcatgagccaccgtgcccggccaatctatattcttatatatagtttctgttgctcctcattctttactgcacttctaagattctatttgggatcattttccttctgcctaaataatgccatttagtatttcttttagtgcaagtctgctggcgatatattttctcatatttttcttgtctgaaaacatctttagttcaccttcatttttgaagggtattcctttctacactttcattccactgtcatctgctttccattgcttttgttcagaagtcagctgtcaaccatgctgttgctccactg

SEQ ID NO: 215614 - DNA, 601 bp, Homo sapiens
cgcggtggctcatgcctgtaatcccagcactttgggaggccgaggcaggcgaatcacgaggtcaggagatcaagaccatcctagctaacacggtgaaaccccgtctctactaaaaatagaaaaaattagccgggcgtggtggcgggcgcctgtagtctcagctacttggcaggctgaggcaggagaacggtgtgaacccgagaggtggagcttgcagtgcgccgagatcgcaccactgcactgcagcctgggcgacagagcaagactccatctcaaaaaaacaagaaaaaaaagaaaatagctgaaggtctagaaagagaaatccacgtgtctccaaggaaacctgcagagctggctgaagtgctgatgctgcaacaatccccactgtttgctgcaagctcactccttactgcttcagtcatcactgatgtaagacacaatttaaaatttgacaaactccatgaaaggttacctgcattcaaatttttttattaacctcagaatttcaaggctacctatacatttctatcagtatttccctatagaagtatttttggtaacactatcttttttttcctcagacctctcaaaaacagtgttt

SEQ ID NO: 215615 - DNA, 799 bp, Homo sapiens
ttgttaatacataccccacatttaaccaagaaaagccacagaggaaggtactgcttcataaaaccaatgtcccttgagcatgtcccttaatatgccacagacactatgccaagcccatcacaggcattgtctcctgtcctcaccccaccctatgggtagggcctgttagccccattttacagaggaggaggagcgctcccagagtcactgcccgcaggtaagtgggagaggctgtgcctccagcactgtcaaggacgggggcactggaccccatttctgatgaaccgaatcttcgtctgagtgggccttggtagcgcagtctcacaacctttctcaactttctcactaaagctgctcaagcaacagaggacagagacactgagggatgtggacacagtccaaggtggcagccttaggtggagagttctctggagttttaccaaaaccaaaagttttatttcataatatatgctttttgttgtcttactgggtaaaatacaacataaaatataccatcctaaccatttttgagtgtgcatttggtgacattaagttccttcacagtgatgtgtagctatcacacgcccatctccagagctccttcctcaccacaaaacagctccccgccccagcctccagcacccccattccagctctgtctctgtgaatttgactactccaggaacctcacaaggagtggaacgacccactattcattcttctgtgactggcttatttcacttagcgtgaagtccttgaggttcatgcatgttgttgtagacgtgttttaatgttaaaa

SEQ ID NO: 215616 - DNA, 393 bp, Homo sapiens
taatgaataaatttcaatgagatctttatttagtttgctttacttagagacatttttatgaaggaagcttttaaaaatactgtttattcttttttgctgaaatatatatgtgtatatttatatatgtacatgagacgtacatttaatgtttaacaaatagtcataaaatgaacaatgtgactactaccaaggtcaaagagtggagcctgcctcccatgctcctcccgggagactctttagtcagtctgtcctaagggaacgaaagcacaattaacttcttaaacactctcaggggagagacttgttttgaatgaatattttgttttgaagtattagaagagtgttgaaaagataaattcaattttttttttctagaggacagagaaggggggt

SEQ ID NO: 215617 - DNA, 760 bp, Homo sapiens
ggcgtgagccactgcgccctgcgatttgcagttagaagttagtgtgtgaagaaatggtgcagaattatggcatgacttttacccatgttttgaatattagagcctcctaaacatgtctagcacattaaactgtagtctagtacaatatgttagtcattttatttatttatttatttatttatttatttatttatttatttactatagaaggagtttcattcttgtcacccaggctggagtgcaacggcacaattacggctcactgcaacctccgcctcccaggttcaagcgattctcttgcttcagcctcccaagtagcggggcttacagtttgtgcgtcaccatgcctggctcatttttgttttggttttttttcagtagagacaggttttcaccaggttggccaggctggtctcacctgacctcaggtgatccacctggctcagcctcccaaagtgctgggatcacaggagtgagccaccgcgcccagccatgtcggttgttataaaaaggtctttctcttgccaggtgctgcagctcacacctgtgatctcagcattttgagaggctgaggtgagaggatcccttgagcctaggagtctgagaccagcctgggaaacataaggagatcccatctcttcaaaaataaaatttaaaaattagccaggtgtgtgcctgtgatcccagctacttggtaggttcaggtgggagtgtgcaggagagggatctcgatccagacccaaagagagggttcttggat

SEQ ID NO: 215618 - DNA, 418 bp, Homo sapiens
ttcgtctgaataatgtggattacctctctccagagggtggtgtgagataggaggatatgttaagcatttaaagattcctgacgtggagtcagcattcagtgtttgctactactgttctcccggaaaggagaggaaatggaacttggacatgaagaagctgggaaatacacacagcaaccttttgaccatgacttccagccccggccctttccatcagctctcctctccatctgtgtgtgtctaattttttttttaaatttgtatttttttgagacagggtctctctctgtctcccaggctggaatgcagtggcgtgatcttggctcattgcagccttgacttcccagactcaagcgattttctcgcctccacctcctgaatagctgggactacaggcgtgcatcaccatgcccggcta

SEQ ID NO: 215619 - DNA, 366 bp, Homo sapiens
cccacttttgagagcttccttgggattatggtgaccttaacaaagcttgtagcctataggtgactctgtccactaacattcagaagaaaaaatctgagcagtgaatgatccagggacaagactgttctttcaccaagtataactcaagcatacacaagctagcagcaagggttcagagattcccaagctattggaaaattataacttttagttccttaaaatgtgtgttagaagccaccagtcatcaaacaaaatatgtttcctttttcatccatgataacaagattgtagcagggtatgtgaatagaccacatttcccagcccccttgaagttggatgtggctgtatggcttagttctctccaaa

SEQ ID NO: 215620 - DNA, 762 bp, Homo sapiens
tgctacaaatacatggaaattaaatattctgctcctgaatgatatctgggttaacaatgaaaccaagatggaaattttaaaattctttgaaatgaatgataataatgagacaagttatcaaaacctttgggatacagcaaaagcagtgctgagggaaagcttatagcactaaatgcctacatcagaatttcagagcacaaattgacaacctaatgtcacacctcaaggaactggagaaacaggaacaaaaagctagaagaagaagtaacaaagatcagagcagaactaaatgaaattcaaacacacacaaaaaaatacaaaagatcagtgaaatatgctgtcgcttcgaaaaaataaaattgatagaccatgagctagattaatcaagaagagagaaggcccaaataagctcaattagaaatgaaactggtgacattgcacttgacaccacagaaatacaaaagatcattccagactactattaacacctttatgtgcacaaactagaaaagccagaggaaatggtcaaattcctggaaacgtacaaccttcctagattaaatcaggaagaaataaaaccttgaacagaccaataacaagcagtgagattaaatcagtaattaaaaaattgccagccaggcatggtggctcatgcctgtaatcccagcatgttgggaggccgaggcgggcggctcatgaggtcaggacatcgagaccatcctggctaacatggtgaaacctggtctctactaaaaaaaaaaa

SEQ ID NO: 215621 - DNA, 281 bp, Homo sapiens
ctaacaatagttgattagttagaccttttctgggttttgtattgattatcttggtgtgcatttaattatttttctgaattcttcatggataatgacatagtaattgtgattcttttaataccagttaagcagtatttggcaacttaaacttcctgggagcctaactttgctatgttaagtgagtcaggtgtgctttttatttcccttgtttctcattttgccctgtcagtggatggtagatgctttgtatatcttaaatcccttaaaggatcttaaagaca

SEQ ID NO: 215622 - DNA, 651 bp, Homo sapiens
ccagtatcatttgtcagaattaccattcattcccaattgaattgtcttggatccttgttaaaaaccaatttactgtaaatgtgaaggtttatttccagactctttattctgttgatctacctatgccagtaccaccacatcttaattaatgtagctttgtagtaagttctgaaatcaggaagtgtgaggcctccaatttgttctttttagattgttggctattctggactccttgaattgccatatgaattttaagtatgcccattttgcaaaaatgtcagctgggattttgacagggattggacatccaactcacttataatcaaatgaatcttctcatttcccagccaaaattctgttgtgccagtaggagacagatgtccaaatccttctttatattgaatccagtttttcttgaaatctacactgccatcaagtctcttctgaaacacagtccatccatttccagacccatcgatttcacagtagactaagaattgctggttagctttcagaggtttaataaagtaaagcccgctctgtttagctcccttattggcaatgtcttgacaatctttcccagtgatatcatggatttgcaccgtgtctttgcaaggttcctggcactgtgcttcaagctgggctaccttc

SEQ ID NO: 215623 - DNA, 187 bp, Homo sapiens
gcagagtgtggttagcttcttaggaggctggaagccagtggaatcctatagagaagtatatattctttttaaccacatttgtatacttcctaccttctgccgtgttataaatggataatctggttatgatagccctaatcctttcctttctgaagaaaaagcaagctatccccttctgcattttgcc

SEQ ID NO: 215624 - DNA, 338 bp, Homo sapiens
tctttaggctctagcctgattttctggctcataaggccaaagggagctggaaaagtccccacggcaggactcatggtggagagagaatgatctagaggattcaggcctctgcatactgtgtctgggtccctccttaaagaatgataaagacaagtaaagagcttgaagcagcctggagtccagccagaaacctttaactgagctttaaaggagatggtcacaacacttttcagaatactggcaaaggcctcctgtggccaggtttgtcctgggatgagcaaaatttaatgttaacctgctgtatctttgcttttaatatatctgcttgcccatcacaa

SEQ ID NO: 215625 - DNA, 782 bp, Homo sapiens
ggaaaaattaattacatattaaatgcagctctgttcttgcctaatccatcgtaaaagcaagtcccaaagagtcaaactttgtccgagtcccttagccacatgttataacaaatctccagattatttatggaaatacaaaaatatccaacagccaacaagataaagttaacagtatcttacatgcagttcaaattactgagtctgcaaagaagcaggaaaatacaaaccatattgagaaaaattaatcacttgaaattggccttcaaatgatactgatgatgatagtcattaaaacagttatgactgttggagaagctaacaaaaagattgaacatgttaaatagagatactgtctgattaaaattacgtgtcaaagacatactacattaatggcatgttagactttgtcaaagaaaagataagtgtacatgaagatacagcaatagaaactatccaaaatgaagcacagaagaaaatagaatttggagacaataactgaaaaagtatttgaagaaataatggctattttccaaaatagatataaactataaaccaataagcacaataagcataagaaagatgaataaaactctgctaaaacacatcataatcaaatcacttaaagataacttttttttttttttttgagacaaagtctcgctcttttgccaggctagagtgcagtggcacaatcttggctcactgtaaccttcgcctcccaggttcaagcgattctcctgcttcagcctcccgagtagctgggattacaggtgcatgccacc

SEQ ID NO: 215626 - DNA, 595 bp, Homo sapiens
gcaatggcgcacaatcttcgctcaccgcaccctccgcctcctcagcctcccgagtgctgggattacaggtgtgagccaccacgccccgccaacatttgctttaagagacttaaagtacttgaggagtctaggtttgaacatacctgaaaaattgctgacaagagttaaataacagttcaggaaaattacagctctttgaaacactagaggaaaggaaattctggataatagcctattttgttttattaaaaatgtgtaaactttttttctttttgcctcttgacatagttacatattttcccctgtatttgttaaaggaaaaataagttgggggagaggtcctgctgtgttcttttttttttttttttaactaaaaaagtttttttagagacaggatcttgtttcgttgctcaggctggagggcagttacacactcatagctcactgcagccttgaagcttctggcttcaagcgatcctcctgcttacgcctcctgaagtactgttattacagacatgatcccgcatgcccagccccactgtgttcttaaactggatgtactgagtaaaaatgaaccttgttttgaaaaaaaaaa

SEQ ID NO: 215627 - DNA, 89 bp, Homo sapiens
cgttttcacgagtaggtgttgaattttggccaaatgttttttctgcatctattaatatggtcacctacctccccttctgtcgtcttctc

SEQ ID NO: 215628 - DNA, 517 bp, Homo sapiens
ggcagcttttaaactatactagtgcttgggcctcacctcaggctaataaaatcggtatctctgagggctgtggctgtactagaatgccagacagaccatcatcctgatggctttgtgactgaaagaacagcaccctaggaaacgggcgttatttgttgtaactttagttctgctgcgtatgaaccatgcaaccgtagacaagttccttacttaatagagtggaatggttaataatatgattcccagaatccagtaagcccggtgtgcatcctggctctgccacttacaagctgcgtgaccttgggcacgtgatttaacctcttccaaactgtgagcgttaataacattatctactcattaaagttttgaaaggattcaatgggataatgtatgtaaagtactacagtgactgagtaaatactaaatgttaaaaatgtcttaacaattgttgctcatttactttattttcacatggaagtgagaataataataaaacctacctcatagggtggttcca

SEQ ID NO: 215629 - DNA, 331 bp, Homo sapiens
agactaacagattatcagagcggggtcttttccaccatgttttgcagccttatcagcagaaaactgtactaaagtaacaccacagatttattactttactaccttctgttatctctttttctctaattgtctaataagagaatcgtctaattctcttattctctagtaagtcatattacccctacctgatttttttaatgtggaaaacacttgtattattatagaatttaaaatgtaaaattaatttctgctcattgtcaacaaacaaaaaacttcaaaaatatagagaagaaaaattacccaggtaaattaaaaatcacccaaaattaag

SEQ ID NO: 215630 - DNA, 434 bp, Homo sapiens
taaaatgagtgggaattgcttggcaaatttgtgtttgtttttatctttatatttgcacatactgaataaagataattttaatcctggggaagaggtagaaaaaatctcatgattttagttttctctgttagtattgcacgacataagcaccagagagatgacttttttcctcctttggttcatttgtattttacttgtcctattccaaaagaacagtattgaaatgagacacaggtatcaataaggaaaatttccagagccagaagaaggaaggaactgtcagggaacaattagtgtgacgggaaactatgttatgcttcctcagaaagtatgacaaatatgttacatttacttgagtttctggaaactgcacatgagggatatagcattaatttcctttgtcttgttggtattctgttttaccattcatgaag

SEQ ID NO: 215631 - DNA, 568 bp, Homo sapiens
atatggtaaaagcaaaacagaagttaaaatcagccctgtgtcaaatctgcatagttttaggcttcagggagtgtctctgtatgttgaggcaggaagtttagtagaattccaaggaagtaagagaggaacaaacatttgtagattttgccttctatgggggaactcattcaatcatcaggagaactcttcaataggttttatttgctccggtttacctagatgaaaaattgagacccagaatccatgcttttctttcctggttacacattagaatcaccaatgtgacattaaaacacacacaacacacacacacacacacacacacacacacacactgcacacccattaggatggctgctatcaaaaaagaaaaaacaaaaaaatcaggggccaggcacgctggttcacacctgtaatcccagccctttgggatcacctgaggtcaggagtttgacagcagcctggccaacatggtgaaatctcatctgtaccaaaaaataaaataaaataaaacaaaaaacaacacacacacacacacactgcacacccattaggatggctgctatca

SEQ ID NO: 215632 - DNA, 395 bp, Homo sapiens
ttaggaaatgaccttcagaggagttgagaaacttgctcaaagctgcacagcatagtaagtggcagaagctgactttggggtctctctccatctctctcctgctcttccaatgccacaatgtctcttaccttgaaaaacactgacaataatccaaagaaaggggaaaaactgacctttggcttcaagtttcattcattcactcaaccaatataacaagcactgttctgagtgctaggcgcatacgggtgaacaaacccaagatcgctgccctagggcacttactattcaacagggagaagacagccaataccaataacaaaactaagtaattaaattacaaattcattcgaaggtgagagatgctgggtgggggaagtaatgggtaagaagatcag

SEQ ID NO: 215633 - DNA, 692 bp, Homo sapiens
atatcatttcagctctctgctgcttagaaagtaatgcacagataagaagccaaggaatgcaaatttattttggcattcattaggcttgaaatgtaaataaaaaatgacgtattcatttaagggttgatcaaataaaacaagcaatttttaatgaatgaagttttatagaagtaatttcaatccaaaagaattaagcttttaaataagacatatttattgtgctaaaaaacttgtattttcatcttcctaatacactaaaatggcacacagaataatagtgtagcacacaatacaaactgatatgtgcaatcaataattctaaaaattgttgttttaagtctttctttggaagtccttaaatgcaaaagaagaaatttttaattttgtttaatttttaaaaacatttttcagggttttctaatcctggtttaaatagtttatgctgaaatcccagttaatctggcttattcactcaaaagaaaggaattgtttaaatcaactataattaagctgatggttgcatttcaggctttgaattccgatcaagtttcaaattggttattattttggaggttgtgctttcatgttcctaggtatttctttgtttgactgtgaaaatatttaagtgtgaaaaacctagagagagagctttcttttaagtcactaaaatcggattcttttgatgttagaaa

SEQ ID NO: 215634 - DNA, 482 bp, Homo sapiens
cgatcaactcatgcctaatcttgttttatctatacccttcctatgtctgtatttttctaatttgaaatatatatgtatatatttccctctcctttcccagtagaagccttttggcttttgtacctacaagccaatagtttgtgggaaatttgcttcctcagaacttctgggatagggggacttggtaatagtcattagaagataaaactggccagatgtggtggctcacccctgtaatcccagtacttggggagggctaggtgggatgatcacttgagcttgggagttggagaacagcgtgggcaacatagcaaaatcccgttctctacaaaaataaaaacagccaggcgtggaggcccgcatctatagtccaggaggctgaggtaggaggattgcttgagcctgggaggtggagattatagtgagtcggtaatcgtgccactgcatttcagtctggaggacagagtgagaccctgtgtaaa

SEQ ID NO: 215635 - DNA, 425 bp, Homo sapiens
caaactattggcttgtaggtacaaaagccgaaaggcttctactgggaaaggagagggaaatatatacatatatatttcaactattattacatttgcttcctcagaacttctgggatagggggacttggtaatagtcattagaagataaaactggccagatgtggtggctcacccctgtaatcccagtacttggggagggctaggtgggatgatcacttgagcttgggagttggagaacagcgtgggcaacatagcaaaatcccgttctctacaaaaataaaaacagccaggcgtggaggcccgcatctatagtccaggaggctgaggtaggaggattgcttgagcctgggaggtggagattatagtgagtcggtaatcgtgccactgcatttcagtctggaggacagagtgagaccctgtgtaaa

SEQ ID NO: 215636 - DNA, 611 bp, Homo sapiens
caggaagcatatgtactttgacttatacttgcttgtctccttttctttggaattctaatctcactaaggtcagcttttctgataatttatttaaaaccaacaaaatactatttttaaaagaaaacactaggccgggcatggtgactcacgcctgtaatcccagcacttttggaggccgaggcgagtagatcacctgaggtcaggagatcgagaccagcctggccaacatggtgaaaccccgtctctattaaaaatacaaaaattagctggacatggtggcacacgcctgaggtcccagctactcgggaggctgaggcaggggaatcgcttgaacccaggaggcggtggttgcagtgagccgagatcgtgccattgcactccagcctgggcgacaagagtgaaactctgtggcaaaaatgttgaaggtaaattctcttctaataagtaatagttaaaagagtacattgaattacacaattcctggcacagttgagtatagtagtagtaaatgccagatggcttttcctataagctacatgactttgagaaatttacctctattattgctagtaaaatggataatataatagtacctgcctcatagggtgcta

SEQ ID NO: 215637 - DNA, 257 bp, Homo sapiens
tcaattggtgatgcctgccatgggctttggaagaaaggtggggagaatggcggcattatctgggggggtgggcgtggctggagagaagagggttgccatcctatataacagcagcttctaaatagcctctaaaatagaatctttgggcggggcgcggtggctcacgcctgtaaccccagcactgtgggaggccgaggcaggcggatcacgaggtcaggagaccaacctggctaacacggtgaaaccccatctctact

SEQ ID NO: 215638 - DNA, 200 bp, Homo sapiens
ttgcttttgtaggaatccaaagctaatctgtccctgatccggattgcacgcacctgtgccttttggggcctttctgcattagttcttccttctcttctaacctcaaaaatgtgttttctctgttggctctttccctttaacatagaagtatactcacgcttttgttgaatcttgaaataaaaggcttcctttaccacata

SEQ ID NO: 215639 - DNA, 415 bp, Homo sapiens
agagggattttcataattatatttatacttctctgaggtctttggtgtctggggttgtagattgtgtccatctgtacttaacccatgcacacagagtgttgtttagtgaatctgacttgaaactccatgcaaagtcacagtcttggctgggtgcggtggctcacgcccttaatcccagcactttgggaggtcaggaggtcaggagttcgagactagcctggccaagttggtgaaaccccatctctactaaaaaaatacaaaaattagccgggtgcagtggcaggtgcctgtaatcccagctactcgggaggctaaggcaggagaagcgcttgaacccgggaggcggagtttgcagtgagccaagattgcgcgtctgcactctagcctggggggacagagcgagactccatctcaa

SEQ ID NO: 215640 - DNA, 465 bp, Homo sapiens
tgcaggaatgcagttaatctttgaactggccgacctaggaaaacaaaatggatggcctcgtttctattctctactccttttccacacacaaaaaaaatttagatgacagtcttatcgtaaaacaggcttatacttttattgtatttctaaatcgactttcagatatattttttgtcccacaggaaaagttgctgccaatattagcctttttaaattttaaagagtatatgtactagataaattttttgatgcagaatgaagacaagttctcactgaaggacagactgtagaatgtgatctgaatctagtaaaactggctattttatggtgaaccagtttaacccattcctggtgatggtaatagtgctagctatcattttagtgagcacctactatgaaccagatacaatgctaggtgttttatttatgttaattccatctcatgacaaccttcagtgacgtcaa

SEQ ID NO: 215641 - DNA, 574 bp, Homo sapiens
tgcttcctaataccaaggaagaagacagatttagtgttttgaaattgagggttgttgaacagacattggtaaacaatgtatccagcctgaaagtcttttcattcctggaggagaggtttccaacttctgtttgaacagggataatatggtacttttcaaagctcaaccataaaaactgtacactccatgacttgatatattaccctatgtaattgtccaacttctaataataagtttaaaaccttctatgttacttttggaattgtgttacgctcactcttcttggggattactggaattaacaggttgttttatgaaaatattattttactgtcaaaataatcaatttgaaaaaggtgtttttttttttttttttatggagtttttgctcttgtcacccaggctggagtgcaatggcatgatctcagctcactgcagcctctacctcccgggttcaagcaatcctcctgcttcagcctcccgagtacctgggattacgggtgcatgccaccacacccaggtaatttttgtacttttagtagagatggggtttcaccatgtcagccaggctggt

SEQ ID NO: 215642 - DNA, 119 bp, Homo sapiens
attattagatctcaaggaaatataagttaaaaccaaaactagttattaattcacacctcctagaatggctaaaattcaacagaataacaccagatttaggcaaggatgggaaggaacta

SEQ ID NO: 215643 - DNA, 178 bp, Homo sapiens
agcctgggcaacatagtgagaccccttctctaaaaataaaattaaatgtttaaaaatctggaaactaattctggagaggactggagtctgagattctgaaggtttattttggatacattgtacctcaattttatgatcacgaaaatgcaagtctctgcatgtctgacccccaggaagg

SEQ ID NO: 215644 - DNA, 314 bp, Homo sapiens
aacttagcagctaaagccacacacatttattctctttgaattctgtaggtcagaggtcccttatgggtctcactggccgagatcaaggtgtctattcctttctggaggcttgaagggagaatcggtctccttgccttttctagcttctagaggctgcccgtgttcctaggctcatgcctgtaatcccagcactctcagaggctgagatggaaggattgcttgagcccaggagtttgagaccagcctgagcaacaaagcaagactcctgcctctacaaagaaaaaaaaaaaagagagaaagagaaggagagaatg

SEQ ID NO: 215645 - DNA, 520 bp, Homo sapiens
taaaaacctgaatccaagctgatggcctcttgccatcttgaaaggagagactgcttgagaaacaagaaagaaaagcagggccacgacacaggagacaaaacctggcccacacagctggggcccctggatcagccatgcctaaccaggtagtgacttgacacaataaatgatcttttctagatttaagctaccttgagtttggttactgtcacttgcaacataacgctgacacaatgttctgcgggttaatgagaggctgctggttgctactaggtcccacttcctaccctggctaccatttcgggtctgactgtggcttgttgatggcacctgggaggctgagctaagtccccaagccctccattcatgcaaacacaccatccctctctcattgtgggccccggactacattctctcgcctgccacctcccaccttttcttttcttttcgttgcgttttttttcgttttttttttttttttttttttttttttttggggggaaagtctataaggaaggag

SEQ ID NO: 215646 - DNA, 1663 bp, Homo sapiens
  misc_feature (887)..(887): n is a, c, g, or t
tctctctgtagaatgagaataagcccaagtctacagtaactgtagctaccattaacagcccagaaaggtcacggagaacttgagtaccaattttctcactggagtaaactgacccgtatgtgctagtggatcaagaagaacaaataaaagcttgcaaccccagtttctttgtccctctgcagcagagcatcacaacctaaactgatgcacattcttatttttttctgcgttaccaccctaagtgcatttgaatgtttccagcaagttactgcattcctaccacccctgaaagcattttccaaaaacatgttttagtttaagttgactggtggtttggcaaacaaaaggctggaatatggcacgatgactcaaatttaaattcaatgccttaaattaagggcatgctgttgccaagcccctgctgggccttgatgtgcatcagcatcctggccccttcacacaggttcctctgccacagtgaccttggattcacttaaggctgtacatgcagtggccttcctctgatggagggtggcctcggccacctgggctttaaactggtgctatctgggatggagaaaaggccaaccactgcagcagcaataaagccaaaagagcagagccacgggcccatttgaaaatgatgcacagagccgggcgtggtggctcacacctgtaatccgagcactctgggaggccacggcaggcggatcgcctgaggtcaggagttcgagaacagcctggtcaagatggtgaaaccccgtctctactaaaaatacaaaaattagctgggttgatggcacactgctatagtcccagctactctggaggctgaggcatgagaatcacttgaacccgggagccaagatcgtgccaccatcctgcancctgggtaacagagggagactctgtctcaaaaaaagataaaaagaaaaaggaaaagaaatgatgcacagaagtgattgtgaccccacccttctgaaacttcatagccaactgcctctaccacatcttggtactggggtcattaactttgagggtacagggtgggcccttcaatggctggttaaactgttagtgatttcacaggaggaaatctgtatctcttggaatttctggccttgttagtcattattattagcattcagacaggcagatcctgcggtgtctaggtgcccacggaagtgggggacactcacagacggggggacatggccacagaattggagggggctgtgcagaaaaaggaggccacctgaaaaagtgggagatgcccacaccaccctagatgtagtagggtatttgaagaagtaggagggtacccacagaaattagggttcccatggaaatgggggaagactaagactagagcatagactcctaatagtataaaataacttaagcatgcactctcaatttatgcatattcataaattcacttataactcatatacctctaaaagatgccagtaatgatgtctaccctgcagtgttgctgtgagaatgaaattgaatttcaacctggtaaatgctgtagaaccgcgcctggtatgtggtaacattcaaggagtgtaatggttgttgctgttactgtcatcatcaactttagggaccttattgtggacattagaaaatacacaaaatcagagattaaagatgatat

SEQ ID NO: 215647 - DNA, 1758 bp, Homo sapiens
  misc_feature (887)..(887): n is a, c, g, or t
tctctctgtagaatgagaataagcccaagtctacagtaactgtagctaccattaacagcccagaaaggtcacggagaacttgagtaccaattttctcactggagtaaactgacccgtatgtgctagtggatcaagaagaacaaataaaagcttgcaaccccagtttctttgtccctctgcagcagagcatcacaacctaaactgatgcacattcttatttttttctgcgttaccaccctaagtgcatttgaatgtttccagcaagttactgcattcctaccacccctgaaagcattttccaaaaacatgttttagtttaagttgactggtggtttggcaaacaaaaggctggaatatggcacgatgactcaaatttaaattcaatgccttaaattaagggcatgctgttgccaagcccctgctgggccttgatgtgcatcagcatcctggccccttcacacaggttcctctgccacagtgaccttggattcacttaaggctgtacatgcagtggccttcctctgatggagggtggcctcggccacctgggctttaaactggtgctatctgggatggagaaaaggccaaccactgcagcagcaataaagccaaaagagcagagccacgggcccatttgaaaatgatgcacagagccgggcgtggtggctcacacctgtaatccgagcactctgggaggccacggcaggcggatcgcctgaggtcaggagttcgagaacagcctggtcaagatggtgaaaccccgtctctactaaaaatacaaaaattagctgggttgatggcacactgctatagtcccagctactctggaggctgaggcatgagaatcacttgaacccgggagccaagatcgtgccaccatcctgcancctgggtaacagagggagactctgtctcaaaaaaagataaaaagaaaaaggaaaagaaatgatgcacagaagtgattgtgaccccacccttctgaaacttcatagccaactgcctctaccacatcttggtactggggtcattaactttgagggtacagggtgggcccttcaatggctggttaaactgttagtgatttcacaggaggaaatctgtatctcttggaatttctggccttgttagtcattattattagcattcagacaggcagatcctgcggtgtctaggtgcccacggaagtgggggacactcacagacggggggacatggccacagaattggagggggctgtgcagaaaaaggaggccacctgaaaaagtgggagatgcccacaccaccctagatgtagtagggtatttgaagaagtaggagggtacccacagaaattagggttcccatggaaatgggggaagactaagactagagcatagactcctaatagtataaaataacttaagcatgcactctcaatttatgcatattcataaattcacttataactcatatacctctaaaagatgccagtaatgatgtctaccctgcagtgttgctgtgagaatgaaattgaatttcaacctggtaaatgctgtagaaccgcgcctggtatgtggtaacattcaaggagtgtaatggttgttgctgttactgtcatcatcaactttagggaccttattgtggacattagaaaatacacaaaatcagagattaaagatgatataaaatactgagatttctgttttattatttttctacctgattttctttccagtaccacttcagagactgctggatcaatttctgtgcccatttcaa

SEQ ID NO: 215648 - DNA, 694 bp, Homo sapiens
  misc_feature (597)..(597): n is a, c, g, or t
  misc_feature (620)..(620): n is a, c, g, or t
atggtgacaagagaagctttactgtgtcagccatctggctgcccaaagcagaaagcagagctcccctgcagtactctcactcgcccttcttatcgcatcaggccccgctgactccgccccgcaacactctcactcgcccttcgtgtcccatcaggtcccgctgactccgccccgcaatactctcactcgcccttcgtgtcccatcaggtcccgctgactccgccccgcaacactctcacttgcccttcgtgtcccatcaggtcctgctgactccatctcctcagcgtctccaacatgtcccttccttgccacctcttgcctggattactacagcagcttctaacgagtctccctgcctttcagttctccgcaccgcttcaagtgttcagtctggatggtctgtcactcccagcgccaaaactgctggacggcttccctttgccttcaggacgaagtccgtgctgtctgacataacttataggaccttttagccagcctgggcaacatagcaagaccctgtctctaccagaaaatacaaaaatgagccaggcatagtggtgtgcacctgtagtcccagctacttgggaggctgaggtngggaggatcacctgagcccaggnaagtcaaggctgccagtgagccatgatcacaccactgcactccagcctgggccacagagtgagaccctgtctca

SEQ ID NO: 215649 - DNA, 590 bp, Homo sapiens
ataagattaatgtgtttagagctattaagattgtgaagagaaaggcaagaagtttagcctatcaataggaagcacaccagtgcctgaacctgacttgagttttgaaaaagctcatttcttaaaaacattcttagaaaattgggcttcacggaatagatatgtttggaaatcttggttcacatatgtataaggaatatccagtttctccctgttttcaagaatagccacttcacatcttttaggtggctctcaaatgtcggacaggagcagttgttagggtttttcaaatgtaagtcagaactgttgtttggagaaaactgaattttttcatttcgtaagattataatttctagaaatatctattaaaaggtggaaattacattaaagatagtaagtatattgtgagtatgtgaaatgaattttagaaatgatcacctctgtattattttaatagagtggaacaaaaatgttttaaatggttcttactttggaaatggatatcttaaaaattctgatattgccaccatttgttctacaaaactgaagcatattaagagctggagtttataaataaatctgttttaatcata

SEQ ID NO: 215650 - DNA, 890 bp, Homo sapiens
tcctgagtagctgggactacaggtgcctgccaccatgcccagctaattttttgtatttttagtagagatggggtttcaccgtgttagccaggatggtctcaatctcctgacctcgtgatccgcccgcttcagcctcccaaagtgctgggattacaggcgtgagccaccacgcccagctgaggcaagacttctgtaagtattcttcaagcagtagtacaagagttaaatatgtattcttcttttttaagctggtaaataaatttcctttttctacccattttaaagtgtgttggttatatgggtaaattgaaatgtatttcttttccttttttcttgcatagccattttaaaaaatattttttaaatatttaaagtataaaatatttttaaaattttttaaaaattttgtgggttacacagtagatgtgtgaaatgtatttgtaggtttaacttctgtgtagtttaattattttgttattaattggccattgataaatgagtctattttctttgctaatagagttgctgtcaatttgtaagtatgtaaagtttattatagagtatattctcacgtgaattattattttcatctgttgttctttacattgtcattatttttggctatttgcataggtaacattggtttaaggagagagacctgtgatcgaacagtgtcttgtgtctaatctgagaaagaaagcatccagtcttatcatcatgtatgatgttagctgagggtttttaaaataaattccttaaagcaggaaaaaaacaaacaaaaaaaaaaaattggggggcgcgccgcggccccggaaaaattttcaaacccttcgtgggggggggggccccatgggagggaactggccaaaggggtcccaaagaaacccggc

SEQ ID NO: 215651 - DNA, 428 bp, Homo sapiens
ctcatactcaatttagtcttctgcagttatctgcactattgataataacaaccttaaatctacaactaaactctgtagccagtagagaaacaagcagaaagttcattcaggcagcaggtcccaatacacacacacacacacacacacacacacacacactttcatacatatactcaatttagtcttctgcaattatctgcattactgataacaacaaccttaaatctacaactaaatgctttagccagtagagaaacaggcaggaagttcattcaggcagcaggtcccaacacaaccccatcccactccaggttgaaatcaaacagatgagtttctaagattccagaaagctcaaattccaaagaaatgctctagtggttactgtaataatacttcaagaaaaggagaggatgggctgggcacagtgg

SEQ ID NO: 215652 - DNA, 288 bp, Homo sapiens
gaggcagaggatgcatgagccgagattgccccatcaatcaaaattgacactccatctcaaaacaaaaacaaaaacaaaaaacaaataactactttctgaaactctggtagttaaatggctcttgtttgtttctttataataaggcacagtttttatggagcctgagcgttgttcttattccacaaaggacttttttttttttggcaaggggataaattactctgtcctaattaaaatttaattttgatgggaactcttttctctcccccagttttttgttgctaaggc

SEQ ID NO: 215653 - DNA, 361 bp, Homo sapiens
gctgccccaccttgagataatggggctgtgctgtcatacccctgtattagttggccagtggtcccccgagggtggcgatatacctcccagtgtctctgggtgaagcagctcctgtgagtgaaagatgattatctggagaaggccacatgtgtaaacctgtagcaccaactctcacagcagaagctgaggcctgggtgtaacctgacactgtaagcatgaccaaccatcttgatttgctcaggaccaagggattcctgggatgcatgggcaccaacagtgtctactacattgactgagggtcttgataaaagttttctcagtcgacgcggccgcgaatttagtagtagtagtaggcggccgc

SEQ ID NO: 215654 - DNA, 237 bp, Homo sapiens
agtgggaccaagcttttctgcctcacattagcagggatgattattcccctaaagtattctgtagtccctcatacaaacattccttggggttaccaaatgtgactcctggtggcagggatggtttaggttctagcttgcaatccactgtacctgtaaagtacaacaggtaaaacattacaattcaagagtctcaaagtagcaaatcataactcagagtattatcttgcctcgcagaca

SEQ ID NO: 215655 - DNA, 227 bp, Homo sapiens
taccaaaaaaccattatgccacacaggaccatatttggggcttttagtgtcccctgtccccaagatccttctattcaaaatgtgagctcatgcatggtttaaaatttgtgatggtgtgcagtggacacatggtggattgacatatttttttctttacttttgaatagttggattttttttttcaagacagagtctcactctgtcacccaggctggagtgcagtggcg

SEQ ID NO: 215656 - DNA, 590 bp, Homo sapiens
atggctggttctcttgggatcagtgatgacaccaggcagtcagagtaaggctgtgctctggcagggactgatgaggcctggaggagcagggatgtgcacgactcacaatatcttttttctttttcctttttggcatttaaaaagcatcagattacattgtgaataaatccatattggaaggttatttaagtcattaagcaccagtctgccaaccacataagctgtatagtagcctctagcaggctgcttaaaggaaagcggcctgaagattgatccaggatgccaggacttgcatcctaaaagtcaggctctttgtattcttctgcctttactactgagggaaaggagtaggggaaaccaaggtagagtttcacgaacctccactttccccctcacatcagctctcagcaccaaagaggcaagttaggaaacaacacaagtgtccatcaacagactaaatggatgaacagaatgtactatatccacatagccgagtttcagccctagagaggaaggcaattctgacacatgctacaacatggatgaaccttgaggacattatgctatggtgaaataaactcatcacaaac

SEQ ID NO: 215657 - DNA, 440 bp, Homo sapiens
atcaagtgtgttttggtagcagcaagatctggttttggattcccagcttcagtcttttactgtcagctcatctcactctatgaaacccagttcttcaattgtaagcaacagaaacatcggtcaaactggttttagcccaaaaatgaattgattggttcttaagtcatcaaggattttgtttattttgcttcaggtctggctggatccaggggctcaaaggatagccttagggctctttccccttttccactgtgctcctctccggcgtcactctgtcctgttatccacagtcttcctcctgatgggtgaggcagggagggcaggatgccaatcactccagacttacatgatccacttgggtatgccggggggctggggtaggggaagatgtcccttcccacttcagtttattcaatatagagaaatttcaggaaacattt

SEQ ID NO: 215658 - DNA, 219 bp, Homo sapiens
acgggcattgtgaaaggctggccattgatgtgaggaggaaagacaaggatgactggtttttagagtaggagaattagccgggtgcagtggctcatgcctgtaatccctgcactttaggaggctgaggtgagaggatttcttgaatccaggagttcgagaccagcctaacttaccaccctaactcattccaattacctgctatctgctctgccctgactc

SEQ ID NO: 215659 - DNA, 466 bp, Homo sapiens
ctgaggtgaagaagatattatatgatccatcaaggaatacaaattaaagaaagagaccctctataacaaattgacaagacaaggtgtgcagacatgacagatttagagggtgcctacaaagcttggccactttcttttgcataatttttttaatggatccataactacaggacttcaggacctacctggattggattgagaataaaacaagactgcacatattgacaaaatcaaagtaagctgcatatatttaatggaaaacatatttgtaaaatggtatacctccaaaaaaaaggtctgttaaacttatacaaagagatgtttaattaccaaatggtgcacttccaaatcaaaaagtccaaatgaattttttaaaaaactaggccttgatttgcatttctctaatgaccagtgatgatgagcatttttcgtatgttttctggccacataaatgtcttctcttgag

SEQ ID NO: 215660 - DNA, 421 bp, Homo sapiens
cagggctggagagccagcctgaaggccctgggacccttctatccacatagcaggagaaaagtcagctatgccaagaaaaggctggttgggtatccgagatcacatgccaagttttgcaggctgtacaagaagcatgaagccagtatccttcactcatggcagaaggagaaagggagccagcatttcacatggcaagagaagaggacagagaaggggagaggaaggaagcaccagaaaatttacagcttaaaacaagaaaacgtattatctcacatgatctgtagatcaggaatctggtcacagcttagatgggtcctctgtttaggatctcacaaggcttcagtcaaggtgtcatccaagttaggttttcatctgaaggctcatctgtgaaagaatctgcttccaagttcacccaggttgt

SEQ ID NO: 215661 - DNA, 422 bp, Homo sapiens
aacaggcaccagtctttacagagtgaaacccatggtgacacatttaggccctatctgattggtgactgaatggctgattccaagctacagcttgaagcctctgagaggcgtccccagagcactcccaagcctctcccgactctgagaacaaggggggtagggctgagaaactctgctgtactcagggtttcttttttatcctggaagctgctgcaatccacaggcgagggtggagagggagtgaccgagagcaggacaggaagccactccacaatgaacttgaccagagaggcagtgtagtggctaacactacccatccggaggccggactgcttggctcaagcctagctccgtcagttatcggctgcgcatttcgacaaagccacttaacctgtgagccacagtcctgtcctctgtaaaat

SEQ ID NO: 215662 - DNA, 757 bp, Homo sapiens
attggtacttgtttcggatcgccttcttgactttgtactattttcaggatggatcccaatttagaatcttcttgaagatactatatatttactaaacatattttgagcctgggtaatatagtgagaccttgtctcttctaaaaaataattaaccaggggtggtggtgtgcacccgtcatccagctactgtggaggctgaggtgagaggattccttgagcctgggaggttgaggctgcagtgagccctgatcttgcctgtactccatccagcctgagcaacagaacgagaccttgtctcaaaaaaaaaataattatgaaaataagtgttaaaagtaataaacatatattgcagtagaatcttcaaataagaaaactggtgccacattggattctatgatttcatggtgtgaaatgggataatttggggatgttataccagatttgaaaaatgaaaaaagaaggaatgggcatgcatggtggctcacgcctgtaatcccagcacttcgggaggcagaggcaggcagattacatgaggccaggagttcaagaccagcctggtcaacatggcaaaaccctgtatctgctaaaaatacaaaaactagccgggcatggtggtgtgtacctgtaatcccaggtacttggaaggctgaggtgggaggatggcttgaacccaggaggcgaaggttgcagtgagctaagattgggccactgcactccagcctgggtgacagaggcacaccctgtctcaaaaaaaaaa

SEQ ID NO: 215663 - DNA, 452 bp, Homo sapiens
attggtacttgtttcggatcgccttcttgactttgtactattttcaggatggatcccaatttagaatcttcttgaagatactatatatttactaaacatattttgagcctgggtaatatagtgagaccttgtctcttctaaaaaataattaaccaggggtggtggtgtgcacccgtcatccagctactgtggaggctgaggtgcccccaacccatcactccgtgagcagcatcggtgtttgcacactccctgcttcaggcttcacccattccccaaaggcttcatgggcccgctgcccccctgacctcagttttgcctctggtagggttgccttccatggccaggtaagtcctgacagtgcctctccctcctggggcgtcccacgaaagtattttgacatttctctttcttcagtgtatattgacttgttaataaagcactttgtagtgaca

SEQ ID NO: 215664 - DNA, 410 bp, Homo sapiens
tagctatccacagtgagaaattgatctctttctctaacagttgcatagtatatatttctgcatcttttttctcatctagaaaactaagaatcagagcaattacattagaattgcttataccttttagtaagttgaaaccaaaactaaggctcagatcctctgactgctaatgaaatccagagttcttcttccatatcacatctagtacagcacctagaatgtgttacgtggcattatcaagtttagttttaataagttaaatagcttgtgagggggtacaacagagcttcctttgagatattttctttgacagttcagccatttagggtccatagaattgtagaactggaagagaccttggagatcacctgttacagcccccacattttacagaggcactgagctcactg

SEQ ID NO: 215665 - DNA, 340 bp, Homo sapiens
tccgagacagagtttcagtctgtcgcccaggctggagtgcagtggtgtgatctcgactcactgcagcctctgcctcccaggttcaagcagttctcctgcctctgcctcccgactagctaggattacaggcgcctaccactacgcctggctaatattagtatctttagtagggatggggtttcaccaccttggccaggatggtctcaaactcctgacctcagttgaaccaccctccttggcctcccaaaatgctgggattacaggcatgagccaccgtgcctggacctaaactctttctttatggcaatccccctgtcttgataaatcggctttgcttagg

SEQ ID NO: 215666 - DNA, 407 bp, Homo sapiens
cttttctaggaaggcaagcagaaaagactttttttaaagctgtttttaaaaaatgggatggtgccagtcatcctttggagagccagcaaattatgaaggtgaatcgttcttttacttggctgaaaacatgttttaaaagatactgaataaggccgggggcagtggctcactcctgaggccgaggcgggcagatcacgaggtcaagagatcaagaccatcctgagcaacatggtgaaaccccatctctactaaaaatacaaaaattagctggtcgtggtggcgcagtagtcccagctactcgggaggctgaggcaggagaatcgcttgaacccaggaggcagaggttgcagtgagcccagatcacgccactgcactccagcctggcaacagatggagactccgtctca

SEQ ID NO: 215667 - DNA, 472 bp, Homo sapiens
atttgcatttccctagatactaaccatgctgagtgtcctgtcttgtgtttattaaccattcatatatttttagtgaaatgtgtatcaaatcttttgcccatttttaagttgacttatttgtttgtcttcttactattgggttgcatatgtttttgatataagtcctttatcagatatatgatttggaaatattttctaccaatctgtggtttgtttttcttaatggtgtcttttgaagtgcaaaaggtttgaattttgaagtacattttattgattttttcttctatatattgtgcttttggtatcatgtctaataaatctttaccaaacccacagttacaaagattttctcctgtcttctttttatactttttacagctttatggttttagctctaacaataaatgtgattttgaacatacataagactatttgtaacaaacacaaataaattgaattgttgggcacttgt

SEQ ID NO: 215668 - DNA, 772 bp, Homo sapiens
tatcaggaaaagaaacaccgaaataaactctgtttccatttattgcattctagcactggttctaccaaatatttgttggatgactttaggtaaagcatctagcctctctgtcttgattgccacacccacaatatgagataaatattattctgcatacttcctgggagagctgggaagataaaatcagatcattataccacataaagcaaagcaataacacttccatattttagcttcccacactgcctatctgtcctattttcatttattcatttatactttttaacaaacagttgctagtagtttgcttaatgtaagatatgggatgaatattttcatgatggcccctgcatctaagttatcatttagcagtacctgccttatctcttgtacagaatcagattagacagcataggaagaatgaaaaggtgaggtgggataataaggaatgttgtttgtggaaacataatggttgcttcaatttgagtgtaaactgtcctttttactgaagcaattgcaaccaagtgtgttagtttacaggtgcctacattgcttttttggcttaggtattgtttgggttttaatagacaaatcaactcaatcaaagaaaccaactcaatcaaagaaagatgggtctacatacaacaaaactgaacaaaatctgcaagaagagtgattcatacatgggctattgaggcaacatgaaatggacattaatcgactaagtaaaaaacagatttcttgaagaattaataaagaacttttgttttgg

SEQ ID NO: 215669 - DNA, 258 bp, Homo sapiens
ctcactgtagcctcgaaattctgggctgaaatgatcctcctgcctcagcctccaaagtagctgagactagaggacaaatcaactcaatcaaagaaaccaactcaatcaaagaaagatgggtctacatacaacaaaactgaacaaaatctgcaagaagagtgattcatacatgggctattgaggcaacatgaaatggacattaatcgactaagtaaaaaacagatttcttgaagaattaataaagaacttttgttttgg

SEQ ID NO: 215670 - DNA, 239 bp, Homo sapiens
tgaaagagaagaggatgacaggctggcaaatttattaggtgtgacaggagtatgtctcatcaagttaccgtggtgctggcctgtctccatgaaagatgccagaagccatcatctttgtggctgccctcctaaagtactagttagagagacagcctcttatctggccttatgggtctctgtgtgctgatgaggagccaccccagacccaagtgatgttgaaccccttctgtcgtcttctc

SEQ ID NO: 215671 - DNA, 671 bp, Homo sapiens
caccatggctcacacctgtaatcccagcatattgggatgccaaagcgggcagatcacttgaggccaggagttggagaccagcctgggcaatatgctgaaaccccttctctactaaaagtacaaaaattagccaggtggggaggtgcacgtgtgtagtcccagctactcgcaaggctgaggcagaatcgcttaaacccaggaggtcgaggttgcaatgagccagtgagctgagatggtaccactgcactccagcctgggtgacagtgagactgtctcaaaaaaaaaaaaaaaaaaatgccaaattcttctccctaaaacttacaaagcagattctaaggaaaatacagcaaaagcgaacctgcccccccagcaatgattgatcgactgattttacagtggagccccaggaactcaaccaaagtggagcaggcaggcagacctgggggctgttgttccaggggagcaggggtacagaaactgccccacaggctcggaggctcatgacctggtggggaggacgctctgacttcgtgccatttaccggggttgcttttggagctgagccaacctatgactcttcagaaattttaaaaccaaagaaaatgattaaaaactaaagcaggggctgggcatggtggctcacgcctgtaatcccagcactttgggaggcc

SEQ ID NO: 215672 - DNA, 166 bp, Homo sapiens
atctctgggaaaaaagcaaggtctaatattcaaagcttggcaaacatgaccaagactttttctctttcctttgaattattttagttccctaattttttgtcccatatgccacttaattctttttattttgtattaaaagttgtgctcttgtctcaaccttctttct

SEQ ID NO: 215673 - DNA, 130 bp, Homo sapiens
tcttcagccaccagatgggattcatttgttaagataaacaaatgaaaatacttaaatacttacctaataaacactaaaatttgctgacattctcttattcttttactttcttaatgaacttgctttcact

SEQ ID NO: 215674 - DNA, 447 bp, Homo sapiens
ccagagttagggggtactaaggtaaaaataagacatggtccctggccctcaagaacctcatgtactaatacgggaaaaacaaaaaagtaaatcagctattataatacagagatatggcctgaatgtttttggtatcatagagcaagagtgtctactaggatacacaaaacgcagagaagccctcttgaaagaggactcttggcctgagtcttaaaggaaactcaagagttagccactgaataaaagcaagttagcatgtaaaatagtacaactgtgatatatattaatactatattctttcattcaagaaatatgtcttggctgggcatagtggctcatgcttgtaatcccaggactttggaagggcgaggcagggggatgacttgaggtcaggggttcaagaccagcctgcacaacatggcgaaaccctgtctctactaaaaatac

SEQ ID NO: 215675 - DNA, 583 bp, Homo sapiens
aagccaccctcctgactcacccacaggaagctgccctggccctggagcctgccccgtgagcccctctgcttgctggttcaatggccctccagcagcagtggctgtggcagctgggttctcggcatcttcagacacggattcttgagcagcaggatggggctccatctccctgcgtgcagagcctgccacagatctccctcatccactggcttctgtgctgacttcggatgaagccagtggtgccgcctattgggaaggccccggcctggtgttgtttgtccctggctgcctcctgctctgacaccatcagcatcctgttgccaaggtcatggatcagtgcggtgctcttcagggtgtccggccagctggggtctctgtcctgtattccggcagaggccccaggagaaacagcaaatgcctttgtccattccatacaaatttcatataaatgtgagcagcttctgatcttccgtggcgtattcgtccagttgatggccaaccctgggtacctggacctccaggacctgctgcactgggctgcccctcggctgtgtgtgcactcgccacgtggccctccaggaat

SEQ ID NO: 215676 - DNA, 355 bp, Homo sapiens
ctaaaaatacaagagattatctgggcatagtggtgtgcacctgtaatcccagctactcggaggctgaggcaggagaatcacttgaacctgggaggtggaggttgcagtgagctgagatcttgccactgcactccagagtgggcaacagagtgagactccatctcaaaaaaataaataaataaaataaaaataaaaagagttgttgaagtcttgccttcctcttggagcatcccctcaagagctgtttcaatatctctttcctcacagatatcattagggtgcagcagagttctaaggtactgataaggcttcaaataaaaacctatctgacaaaagagtacagtcttgtgaagtg

SEQ ID NO: 215677 - DNA, 401 bp, Homo sapiens
cacaaatttcttcagggggtgaggaaaatggctgagaaaggtcatgccagaaagagtctatcttctgaattaacagggttccaagaatgacttctgtaaatgcttgacactctagaattggtgtgctgccagtcattaaggattcacaaatactaatgagagccttataaaaattgctatcatgtggtctcagaaaaacgcatggaaacaaaataagagtgatggaccaaattgttgagtgtgtggaatcaagccttgaaagatctgtgatcaaagtgtacaaataaaagtgcaaaaggcagaacactgagaacagagagggccatttagaattcaaagggtgtaactataagtctagaattttgattgggccttctcttgctcaagggtgtcagagagtt

SEQ ID NO: 215678 - DNA, 438 bp, Homo sapiens
agtcagcaagaccacaaacccactgggaagaacaaacaactccagacgtgccacctttaacagctgtaacactgactgcgaaggtctgtggcttcacttctgaagtcagcaagaccacgaacccaccagaaggaagaaactctggacacatctgaacatctgaacaaactccagacacaacatctttaagaactgtaacactcaccacgagggtccgcagcttcattcttgaaagtcagcgagaccaagaacccaccggaaggaaccaattccagacacaatattacctcagaaactccgcttgtgcctcttctcagtcaatcccataccccccgcccccagtgcacacacacatatcaaggcaattgttatggatttctgtcactataaattagatttgtctttcctaaagtttcaattaaatggaataatatacta

SEQ ID NO: 215679 - DNA, 335 bp, Homo sapiens
agaatcgcttgaaccatcaggcagaggttgcagtgagccgagatcgtgccattgcactccagcctgggcgacgagagagactccgtctcaaaaacaacaaaaacaaaaacgtgaaattcacacagtgagctccaacttcgtggtggtcaccagacggctgaatgggcccccttccgtgcagtgcagtatttaccaaattcctaagagcagggctggggcttagatgtgtcttaccgtgcccggcccagggctctgcacacagtaagtgctcaatacgtgcttgcacgtcagtgtgattcctaggtgagtgttccatagccccaaaaacacccaag

SEQ ID NO: 215680 - DNA, 175 bp, Homo sapiens
tccccttttcctgcaatgggtgatgcatgtagttactctctgccccatctcaccgagttgagtggttgagagcaaggacttgggagtctgacagcttgaattggactctgggttccaccactgacttgggcaagccagtgaacctctccataccccagtgtcttcatcattagaa

SEQ ID NO: 215681 - DNA, 215 bp, Homo sapiens
tagtgataggcactaatggacagtccctctggtgtggaataagagcctggcatgggagatgtagtaaacatcagagatgcactctatgttctcggctcttgtagcagccttgaactgagtttcattctagtctagactatgaggcttgaaattcctgatgttttatccacaggagccaaagctcaccaaatctagggttccttgaggagtggaga

SEQ ID NO: 215682 - DNA, 338 bp, Homo sapiens
cttatgtaactttccaggaatgctgaaagactttccgggctccgtgaggttgggaatgggggaaaggcagagggggctgaaggtgggggttagggcagactcgagggacaaggaaaaaatccactttttccatacatcactacattggctgtttgtgacaagaagttattgcaattaagatacaagccggatgtgtgggctaaaaaacctcagctgatatcacaagcatttattgataatgaaaacttggaggaagagatctggaaaattgttgtctttagtggtttcctatgcaagagaacaaaccatatggattaataaaaaagtgctctacctta

SEQ ID NO: 215683 - DNA, 351 bp, Homo sapiens
agttagaggatagaactagaacgcatctgaaatcctactttgctttagtgagacacaccacgagcaggcctcctattctatctgaggagggcatggtagttcggaagaggccggcaggagcacccagagcaactgagaggcaagtgcagggctatgagaaacagtaggaggacctgggattacttataggctggagaagcagcagccaggggatttaagtcttcgggtacagaaaaggatgaggggtgatcaattgcttctcacctccatggagggcaaggcattagtaacaggatttcagtgacaatacagggattctgccctagctatttggatcaacttcttgacaaa

SEQ ID NO: 215684 - DNA, 598 bp, Homo sapiens
acagcgtcttctgtaactttaagatttaacatttcagattattttccactggggctcccatcgatgctgagttctggctacttttttcccctgatgctgaaaggttcgattcttccatctatccatcaacaaatcacattgaatgacggtgctcagtgacccaggatgccactggagacaaaacacactatacatattttctggtctccctggaaaattagtgcaaacactttcatcactgcggagaagggaaatatgcgcggagctgtgaaaatctgctttgttttttgtttttctaagaggagatttccccctccttcaaacagtgaaatttatattgttctttgtctgcaaattaaccagttaagtagaattcctgtatgtctctttcactttctgcaagccaaggcccctctttctctccaccctgtattcatacatagtccaggatcaccccctgtccccctccaatgctgcttgaaatttcattccattttcgtcctgacttgttcaaagtaacatttaaaatattttaattcaaattcttatctcatccatcctgtttaagttccattttaaagaatcttcttttcttatg

SEQ ID NO: 215685 - DNA, 564 bp, Homo sapiens
gatgttaaatcagctaatcttgttttcacagaattgatttacattgctttaatgacttctaattaattcagtgttactctttcactctagaatatttaatgtattgtttcttaagtattataaaatgtatatatagcagactcaagccatatttctgtgatacagcacattcagaataacatgtaagaatttaaaaatgagaggaaagaaatgcagtgtggcacagtaagatttctcttttaaaatcaaacttttaaaaaaaatctggtttccttaatagtttcctttttaatttctcagtattctggcagttgtcagatcatggcgttattcctgtcggtgggccatggaacagggctgctatagcttttgcactttaagttatcaggctgttggccaacttctctttcttttaaaatagtgaagaacatagctacctgctgtgttcttttcttctgggctcatttctgttcactagttcaaatacaaacagtaggtatagtgaatgagatgcttttggtgactttatccttagagttaatcatgttgaagactcctacccaa

SEQ ID NO: 215686 - DNA, 305 bp, Homo sapiens
gagaggatgaagccagtgcatggactgcttagaggccagcagcttggaggctgtgttctgaggaggtgaaggtagaaatgaacacatattgaatgcctacaatgagtcaggctgtgctggggttttttggtttttgttttttgaatctgaggaaatggaaaatgaaagaagttccccctttaggtgctgggccccaacaggttcagggtactggatgaacagagagggcaaaagcagggcatgtccacactagagctgagaaggggcagagaggaggggtttctccaggggcagtgcactggaga

SEQ ID NO: 215687 - DNA, 409 bp, Homo sapiens
tacctactaatatgtaggtgctatatttggaacaagggctatagagataaatgaagcacggtccctaacttgaagcattcagtctagcagaaaaatcctaagaaattacgctataatactaaagtgctgaatcaggaagagataatgtgttaaggagtcaggaaagtgaccttttgagctcagcttaaaaggtatgtggagtttgacaagtatataaggttaagaaagaattttcaggcagaggaagcaggatgaagaaaggaactaagacattaaaaagagcatggagtgcttgggaaaggaataaatgcttagctggactgaggggcccagtgcagggaagaaaggagtgagtggcaaaaaattcagtctagccaggcatggtggctcatgcctgcaatcctagcac

SEQ ID NO: 215688 - DNA, 242 bp, Homo sapiens
catttctagtcacttcagttctggccaaactgttatcaactctagtttctgagggaccgccagcccaggattcctattggggtcacctttgtgcctccctatcttaagagcacacttgggcgggtcggggcgggacgtgctgggtgtaggtgactcaacaccggacagttttgcttccagaggctgacacgctcctgcgcggtagttgttaaagggttgggacacgaagatactcttcgcct

SEQ ID NO: 215689 - DNA, 440 bp, Homo sapiens
gtactgggatttcaggcatgagctatcacgcatggccttaagttgtacattttcaattggtgacttgcacggcatgtgaattatatctcaataaagctgctactttttaaaaactacagtctataacttcctaactactaaccaatatctgacatattattctacatcaccttataactccatataatgagaaaagcattgaattcagtgataaaaccagattactggcaatcctaaaaccgtagacaagcaacaagttctgagcttcaatttccttgtaggggaaaggggagtcctctctggtacaccatcttatttttatcccaataacagagttgcatcctagagtaaattgtgtttattctaaaatcagtttatgtctgttgtatttactataattacatagtttagttgcatattacatcaaaaatgagtgcaaa

SEQ ID NO: 215690 - DNA, 447 bp, Homo sapiens
ggaatttgcctaatgagaaccaggaaacctcatttgcccttgctggctacatcagtgagcctctaaactaaagtaggagggagaaaaaatacagtggtccctcagtatctatggggtattggttccaggacccccatagataaccaaatctgcagatgctgaagataaaatggtgtcgtatttgtatatcacctgcacatacccttccatatactttgtcatctctgtattacttatgatacctaatataatgcaaatgctatgtaaatagttgataacactgtattgttttttatttgtatctttttttttaatttttttttttatctatggttggttgaatccgttaatgcaaaacccacagatatggaggaccaactatacttgataaacctggaaggctgattgttttggagaaaagtaggtattaagatgaaagggagaatg

SEQ ID NO: 215691 - DNA, 453 bp, Homo sapiens
gaccagtcccccaggcatctatctgtctccctcagtacatagcattcctaatgcagactggtagaattgggtaattggaattatgtagagctggaattttgtctgttaggtgagatagcagggcaagggagttgagtatatgggcaggatggctgctgagtgattgaccatggaatctaagctggataagcagtaaagtgaagacaggtgaggatagggttaagggctgctgttttgcgattttgagctgcctgtacttacatgtttgtctcccacacaagttcataaactcttcaaaaaaggatctttttttattcatcattgttatctatagcatcagcataatatctaactcataatgagctctccataaattattgttgaattgaataatggcttaaaactctgttccttaaagctaatagctatactcacctgcaactttttctaggc

SEQ ID NO: 215692 - DNA, 527 bp, Homo sapiens
ccaaagggaaacctatatttatgtaactgtatactgaattctgacaaaataaaaaaagatacatcattacgaaaatgcgcattttcgtaatgaagtatagaggagtccctgattaacccctgaattgaaagaagttatatatgacgttattgggataactggagaaatttgaatatggactgggtatcagataattacattgtaccaatgttaagttatcagagtgtgataactgtattatggttcactagaataatctcattgttcttaggcaataaatgctgacagttttaggctcacaaaacaacttacacagtctcatgtttattacttcatgcctttgaacatgctattatatctacacagaacatctgtctcactttcttcaccaagctagctcttacccttccttcaaaacggagaactgagaatcctttcctgacccatgtggcataaactaggtgcccctctgtgtcccagtggtctgtaatacatataccaataaattctttacaatgttatattgt

SEQ ID NO: 215693 - DNA, 422 bp, Homo sapiens
tagaaaagattagcatttgaactggtagactgaataaagaagactgtcctcaccaatacagctggacattatccaatccactgagggcctgaacaaaatgcagaggaagggcaagtttgctctctgagctaatgcattcatcctctcttgcccttagacattggctctccaggttcttgggcctttgggtttggtctaaaactctaccatccactttcctgggcatccaacttgcagatggcacattgtgggacttctcagcctccagaatcacatgagccagttcctaataataaatatctttgggtgtatatatacatatatgtctgtgtatgtgtgtgtctatgtgtgtgtgtgtgtacaaaagcacacatacacacaaaaagatatacgtgtgtatatatacatatacacatatacac

SEQ ID NO: 215694 - DNA, 524 bp, Homo sapiens
tcctgggttcaagcgattctcctgcctcagcctcctaagtagctgagactaaaggcacatgccatcatgcccagctaatttttgtatttttagtagagacagggttttgccacattggccaggctggtcttgaacttctgacctcaggtgatctgcctgcctcggcctctcaaagtgcggggattacaggcatgagccactgcacctggcctaaacccctaattttagtaggtcagggaaatagatttgaaactgttctcctatctccttggctgtagcaacagactaaagccttcttcactgacaatacttattgtctcagtgattggctttctgtgctgggagtagtgggacttagaccaaagccctattttggtaacaatttcagtcatgtgagcccctgggtggagaatccagctatactgtacctgacttaaactgtgagataataaagatgtgtcgttttaatctaatttgtggtaatgtattacacagaaataaaataagtatagcctgaaactaat

SEQ ID NO: 215695 - DNA, 555 bp, Homo sapiens
gtgatactcaagtgatccacccaaagtacaggcatgagccaccgtacctggtcctggactaatagtattttatattgatccgtgtgcacattaaagtttgggaagtactgctgctggcatatgtataaaatgatacattggctgggtgtggcatgggatttctttttggggtgatgaaaatgttcagaaattagtgttgatagatgcacaattctgtgaatatacaaaaaaaccactgaattatgtcttttttttttttgagacagagtctcactctgtcacccaggctggagcgcggtggcccgattatgtctcacttcaggctcacttcagtgacatcctgggctcaagcgatcctcccaccttagccttccaagtagctgggactgcaggcacgcaccaccacacccagctactttttgtagagacggggtttcgccatgttgcctaggctggtctcgaattcctgggcttaggggatcttcccgcctcggcctcccagggtgttgggattacaggcatgagccactgtgcctggctgaattgtatacttac

SEQ ID NO: 215696 - DNA, 440 bp, Homo sapiens
ggtgctgcagggtttcacatggagttcacagttcgcatttcatcctgagtgcagggaaagccatgagagcgttttaggggagtgacatacttgggtttctagttgaacgatggcaatcactcatgttttctgaccagcacacgcttctgcccactacttcaccctcactgtcatcccctgtggtaggcactctgtcattatccccattttccagatgggaaaactgtagctaataaagatgaagtgcctcgcccaaggcgtcactgctagaagggatggagcccacgctctttccctctttgctgcagaatgttccctctgagccgtgttgagacaggcaagatgggaagaagtagaaggatttgagatagataacttggaaccacgaggctgcttgggtatgaggcagggggaagagaggcgacagggcagggcccagg

SEQ ID NO: 215697 - DNA, 366 bp, Homo sapiens
tgcagtatatcgagggattgtgaaaccatcaccacaatctaattttaagactttttccttctgccacaagaaaccctgtgccccttagtggtcacccactcttccctccacttgccctatccctaaataatctctcatctcctttctgtcagtataatttgcgtatcctgagcttttcacagaagtggaattttgcagtgtggagtcttgggcgtctggcttctcctgcccggcacagtgtcttctgggtttattgtcttgtggcacatgtcagtatcccatttcctctggtggctgaatagtatcccctgtgtgaatacgccacgtcttgtttcccccttcgtccatggatgcacagacacggag

SEQ ID NO: 215698 - DNA, 544 bp, Homo sapiens
gttagctgtgggtttgtcatatgtggcttttatttgtagtgaggtacatactttctatacataatgtattgtttttatcatgaagggatatttaattttgtcaaatgccttttcttcatctattgaaatgatcatacggtttttgtccttcattccattagtgttctgtgtcacatttattgattggcatatgttgagccattcttgcatccctgggatgagttccacttgatcatagtgaataatctttttaatgtgctattgaattctgtttgctagtattttgttgatgatttttgcatttgtgttcatcagggatattcttttttaattgtgtccttgcctggctttgctatcagggtaatgctatccttataaaatgagtttagaaatattgtctcctcttcagttgtgccgactagtttgaggaaaattggcattcattctttaaatgtttggtagaattcagcagtgaagccatcaagtcctgggcttttctttgatgcgagatttttattactgctttgatttcattactcactat

SEQ ID NO: 215699 - DNA, 700 bp, Homo sapiens
catgatttctcccagatcacagtggtagaatttctagtctattatcaattacagcctcgttttatataaacttgaggtgaaacctctagtatagtttcctttagtaaaacaacacatacttgatcattcaatttgtgactggttttttcagattaataacataggatagaaatgtaagttttatttttaaagtcaccattgtgatgaaaatgtgtacgtctgaaaaatgtgattatattatacttagttgttatatagtgtataatatatttagtggctgctgtaactaagatatttgcaataaatgtgtaaaccactgataattagaaatcatttgttaaaagtgatgtttaaatgcagagaaagcatttttaaattcaactcagattgataacaggtttccttcacacataagaattattttttatctgatatttttaaatcaggtacagcttatatttttacctagaatagcctagagaagaaagtatatgggaactctacttaatgcacgatttttctataaacctaaaaatattctaaaaattgtggtgttttttttcctagtcctttgcaaaatacgggctaattttaacgtgcctgccctaaagcccctagatttcaaggctaccgggctttcaccttcgcttataaacctccattcctagaacagcgcggctcgattgttcgtcttttgcct

SEQ ID NO: 215700 - DNA, 506 bp, Homo sapiens
aaacctatttccttcaatgatacagcccctagagcacaatggatgctcagtagatgctaattaccataattatcattatttggagttgaaaaaatgagccttggggtaatataattattataactataattaataattatactcttctcattacattttggaggtgcagaaaccctggtatacttatctctaagtttagtccttttcccactgtacacagcggcttgtcccactgtgctgaaaactaccattcccctatcttctatagtaatagaaattctagatgattgtatgaccaccagctaagattacatttcccaggcatccttgaggcaagatgtggccatgtgactagtttggctggtcgaatgcgcgtggaagtggtatttgaagcttcctggttaggtatttacaaggaaagggcctgctttcccttgtccctttccctcttgggttgactgagtggattttgacatagaaggatataaacttctatcttgtgtaaa

SEQ ID NO: 215701 - DNA, 203 bp, Homo sapiens
gagaagaggtctcactatgttgcctaggctggtcttgaactcctgagctcaagtgatcttcctaccttggccttcccaaatgctgggtctataggtgtgagccatcatgcccggcttgagtatggagatttatacaggatctgagagcagtaaacaatagcataatatttagacactcacatacccttctatcagctgtaccc

SEQ ID NO: 215702 - DNA, 318 bp, Homo sapiens
catggtcactcatatttggttcagaataaatcccttcaaatattttacagagtttgactcttttcattgacacctatttggcccttctttgataaattacaagttcagtagaggccacccaaggataacccacagaagaagttcttcaatttctgtatgaactattcgtaatccatcttaacaggacatttacaaagtttggggcacgcatcacaatttgcatttggaaagtatttgaataatgttcacaaggtaaaattcattgattttggtgaactaattgtggacaacatgttaataaaatttcaactaattcta

SEQ ID NO: 215703 - DNA, 264 bp, Homo sapiens
gaagtcacaagagaagaaggatgcggtcacaaacttaaccagtgctcttatttttcccttctcagggaaaaacaccagaagaagctggggttttatattcattggatggaaacagatatttctcctgggaattctcccaaccaaatagcccttttctattaggctgtgtctgtacatccacaagaggaaagtctataggactgattagttttcacaatcccatttaaataaaaaaaagatctttagttgggcatttaggagcaa

SEQ ID NO: 215704 - DNA, 313 bp, Homo sapiens
gggccaggaggacaccaagcagcctggccaagcaaactacagaactttccctttaaggaggtggagaagcctggggataacaaacggagaaagaagatagtgaataactggtccatgaatgacggaagatgggggagatccaaccagaaaacagtccacagaagtgagtcactgaaggagaaaagtgaccttgctaagaacacgtgagaagaaagggaagcgggtatccatcctctcaaacaggaggggctctaagaaaaggggactgtgcaagtgccccacacacaacctggacatctgcaacagccgacca

SEQ ID NO: 215705 - DNA, 647 bp, Homo sapiens
atgagggacgagaactgtcaaaccaaggtctcttttaaactgtgcttatttatggcttgctgtttgatttggtgctttttcctttaatcatttggtgccaggttttcctatcagtcctttcatgtcctatatggttggccaacacctacaagggggaggttggtcacctaagtaatctcatattggtgaaaaagccaaggtatctgaaaggggttttgtaagaaaaattttaggatcggactataccaggaaacagcttcctgcctagctataggttgttaatttgtctgaatattttcaaaccaggatgcttttggtgtgttggataggcttttgagtagggagagatactatcttgaattgtgctaataatttaactcaacagcatctaacaaaggcagtcttattcttggatcatgtgtacagatcatagtctgaagtggaataagcagaatgttgttctcagtgtgagatgttatttagaacacactggaaacattgtgatgtcattgtgcactgaggcagggaaatgttagtctacattttatggaatatgtacttcaatgtttgcattgtacctggagtgataaaaagcaaaacaggtactcaagacctgtctgggctttggcctttgggcacattccccc

SEQ ID NO: 215706 - DNA, 478 bp, Homo sapiens
acaataactaggggaatttcccccaagggagcacgcttttggatgtctctctccagtcctaacgattggttctttgatcatttgacatttgcccacctgcttcccaggtttaagtctcttagcaatgaaaagagaaggcaacaccagtgaaagtcaaaactaagatatactcacattctttgtttcacagggttaaggtgattttatgaagctaaaactcaagatgcccagtttagtcaaatctgatgtaatttgctactttagttaccaaaataattgaatttccaacgaagcacactgtcatttgacctgtattatcacccacaagaaacagcaagttattttggactatttgttataactgtatttttatgatttttcctgattgaaaaagtaatatgtgtagtctaaaaggcaggaataatgaaatacgaaagttggaaaataaaaatctcctctgctaagtagccaccttcta

SEQ ID NO: 215707 - DNA, 397 bp, Homo sapiens
tagtgacttaacacaaacctattattttacagctctataggtcagaagtctgcagcgagtctcatgaggctaaaatcaaggtgtccacagcagtcattattctacccaccagagacacagaagcttgtcctggcaagaatcctatctgtaagctctacagaactagcatttcctcaatttccatctgccaagatgctaacagagaacacatcaagtaggtggaacacacaagggactgaccttgacttaaagcaagtatggcaatctaagatctctgccatgacatgactatagtttatgaaccatttacaatggtagtaatatcacattattcattgtctgtataccatgtgccccagatattaaagccaattgatgcatactgtctttcactcaa

SEQ ID NO: 215708 - DNA, 429 bp, Homo sapiens
agagtttagataaatagatttaatacttcccttctgcatcttaatcacgagtttagcttttagggaaagtggtcaagcagtattttttatgttgttctcggtacgttttcataatgaaatcttcaacttcccatggcatttctgaacttgagagtctgcttgactgagatattttttgggctttttacaaagctgttaatattatctttaaagtagttcaagcgttttagtgggtttcataatttgagggacgactaagtgtccagggatgttaattctgtggttcttttaaggttaacatattaccattgtgatccctttttttaatgcaaagatgtcacatctttattgagataatttgcatgccataaaaatgagcttcttaaataacaatgatttttcagtaaatttacttgtttatgaaagaat

SEQ ID NO: 215709 - DNA, 399 bp, Homo sapiens
agccgagatccgtacttttgcactccagcctgggcaataagaggaaaaaaaaaattgagaggtatgtcagtgcatacaacagacagtgcttttgtctatggcttttggacttttggactgtgattcacaggtacctatctctgccttatacatgtgtgtatataaaactgaaattagtttcatgaagcaatatttgcctttcatgtgatgcacttgtattacattcattaaaaaaggatatggctcactaaatttattttacgatccacaaactgattgtgacctgcagtttgaaaacccctgattttagatactgatctattggagtaaagggaagatggagagatttggattccagtagatcttggttcgtctggcttaacagttttaggtaatttc

SEQ ID NO: 215710 - DNA, 370 bp, Homo sapiens
tggtgagaaagttatgagaggtaggaaagaagatactgaaacactgaaggtggaagccgtttggacacagtaaaaggaaagcctcagataagcatgagggaaaggaaagaacgaatttcagagtgtttgcatgcctatggtaggcacaggatgcaatgagacacgcatgagagagtgcttagagggctccccccatcctctctgggcctccatttccgcatccctaaaaagttaatttttttttcctagaataaaacatgagagatattcaacttgaagcctaggaaggccactgtaaaatgttacaaattttaaagttagtggcaaaaataatacatgtgtgataattcaagcaaagacctatttaaaa

SEQ ID NO: 215711 - DNA, 105 bp, Homo sapiens
ttttgtttcttattcctttgtggctaaaagtatgttcccggcttggtgtggtggctcacacttacaatgctggcactttaggatgccaaggcaggaggatcactt

SEQ ID NO: 215712 - DNA, 413 bp, Homo sapiens
caggtggccgctggcaatgccactgactagccacacaggcagcagaggccctgtagggaccacagttgatctagacctctggggactcggagagcacacaccagcttctaaaacgcaggcagggacatgtgaggtttctacatgtgcattccgtgtgtcatgtcactttgggggtggtgacagggaaagtggaaggaaaccagccctcagcatggccaagtcccccgttagctgagccccaaactagagattggaagaaagtcttgattgaaaaaccatttcccagccaggcgcgttggctcatgcctataatcccagcactttgggaggtcgaggcgggtggatcacctgaggtcaggagttcaagaccagcctggccaacagggagaaaccccgtctctactaaaaatacc

SEQ ID NO: 215713 - DNA, 440 bp, Homo sapiens
tttgaaatctgtgggtggttctggaaccaatctcccacagatactgagggacaactactttatttgaattgttgtttgtcatcacaaatttcctcaagcttgatcccacccttgattccacaagcttgattccccatgaaatataagtaagatttctgttccttcaacaatggatgaaagtgcttctttcttcacaatatagttagatcgaacttttgatttttgagaatctgagaggtgaaagttcggtctcatagttttaatttgccttcctattttaagtgaagcaatcaatcttttaatgttgatgaacctttttgtagtttttgtgtgaactagtcattccctcattatgtcctttgcccattcttttactggtggtggtcttttacttacttcatatgttaagtaattaatttggtctgggtctgcgatctatc

SEQ ID NO: 215714 - DNA, 374 bp, Homo sapiens
ccataaacataagtaatgttttgctttgataatatgcagcaccacaccattttttcttaccctgcttagattgggcaggcacaatcgtagctactcaatggttatgtgttggctatcaaataggtctctgctgtaagagtatgattaggaagctggggctcacagatacgatcaaatgcatctagtgaaactattaatcacaattttcattttaagataaaaaagaacactggctgagagaggtaagtggtttgtcaaaagtcatgtaaccactctgtggcagatccaccaactgaactcagatcaaattccaaatgccaagctctttaccttatttcatattgcataagagaacttcagacaaagtaatttgc

SEQ ID NO: 215715 - DNA, 599 bp, Homo sapiens
cgcagtggctcacgcttgtaatcccagcactttgggaggcctaggcgggcggatcacgaggtcaggagatcgagaccatcctggctaacacggtgaaaccccgtctctactaaaaatacaaaaaaattagccaggcgtggtggcgggcgcttgtagtcccagctactcgggggctgaggcaggagaatggcgtgaacccgggaggcggagcttgcagtgagccgagattgcgccactgcactcccgcctgggcgacagagcgacactccgcctcaaaaaaatttgttgcttatgctttaaagtatatgtaagtacattcttgctttaaagcatatctaaatgtgttatttaaaatgaatgcagggctttctcaaagtaagggttaaggagctggacaagggctgttggttagttcaaagccacctggactccagaaactcctgattataaaagaaaggccaggagtcaaactcacatatagtataaatatcacaaattcacatataagagaaaagaggctttcctatttgaaacacaaatgtcaataaacttttctgatggaacaaattgtacaaggtaggccaacagactactatttt

SEQ ID NO: 215716 - DNA, 903 bp, Homo sapiens
cagagatttttaaaaaaacatttatttcaaggattcttaattaagttataggtattgttacacatgaatcaaggacttaaaagaaacaatactgcataatatccagtgtaatagtaatggtggcaaaataaatagtttgaatattaacatcaattcaaattgctgagtttccttgattactggacagacttggttccctgaagtctaaattccttagattatcacacaactcacacaaggcctttacgacttgcctacaatctaccactcagtaagacttttcttttactgtcctcccgtgctgccgccactcagaattttataatgttccttaaaattttcattctctttcatcatcacatcatgactttgtatgttgctaatttccttggtctctttttcttcctgatatactccttcatacttgaagtatcatctcacctgaaaaacttttttttctttttctttttttgagacagggtcttactctgttgtccaggcgggagtacagtggcatgatcatagcttgctgcaaccctgaactcctggactcaagccaattctcccaccttaggctccagagtagctgggaccacaggcatatgtcaccatgcttggctaatttttttttctctatttttagtggaaacaaggtctcgctatggtatccaggctggtgtcgaactcctgtgctcaagcgaccctctcacattggtctcccaaagtactgagattacatgaataagtcaccatggccagtccctgagaggtttttctaactctcccaaacaattatttactggcaacacagcaataaacaaaaacaaacaagaattcccacttttgcaaaacttacaatctatttttagtggactgtatgtttttaggtcagcctcctcaact

SEQ ID NO: 215717 - DNA, 850 bp, Homo sapiens
cagagatttttaaaaaaacatttatttcaaggattcttaattaagttataggtattgttacacatgaatcaaggacttaaaagaaacaatactgcataatatccagtgtaatagtaatggtggcaaaataaatagtttgaatattaacatcaattcaaattgctgagtttccttgattactggacagacttggttccctgaagtctaaattccttagattatcacacaacttttactgtcctcccgtgctgccgccactcagaattttataatgttccttaaaattttcattctctttcatcatcacatcatgactttgtatgttgctaatttccttggtctctttttcttcctgatatactccttcatacttgaagtatcatctcacctgaaaaacttttttttctttttctttttttgagacagggtcttactctgttgtccaggcgggagtacagtggcatgatcatagcttgctgcaaccctgaactcctggactcaagccaattctcccaccttaggctccagagtagctgggaccacaggcatatgtcaccatgcttggctaatttttttttctctatttttagtggaaacaaggtctcgctatggtatccaggctggtgtcgaactcctgtgctcaagcgaccctctcacattggtctcccaaagtactgagattacatgaataagtcaccatggccagtccctgagaggtttttctaactctcccaaacaattatttactggcaacacagcaataaacaaaaacaaacaagaattcccacttttgcaaaacttacaatctatttttagtggactgtatgtttttaggtcagcctcctcaact

SEQ ID NO: 215718 - DNA, 111 bp, Homo sapiens
actctcccacaggacctaaatatactcatcatcaggcctcactgagactcattctacctcaccctttcccaaggggctgctcatacttctagtcccatcacactctccctc

SEQ ID NO: 215719 - DNA, 773 bp, Homo sapiens
caaccattagtagtcatctacaagacagccacaaattatgtttctccctgctctgatcactctggtcaacattaaactagctgccgacggatgagagacaggaggcgtggaactaagtttatctcagagaaaagacatctatcctccactgatcatctctgtaggtctccacacatcaagctctgcttaaggaagctacacaagacctttgcccttgtatgggcgaggaagatggggtacaagggtcgggggcattgttcatgaaggaaggtaagtgatagtttcctgctcaccccttcgttttaggggtcaatctcatatgtagacggcaaatgaagttttttccaagtctgaagtaaacaaacagagatgagaggtaccagtgaacttttgtaaacagactaactccctattgcttgactgtacgcataacctgatttgataaaatgctgaaaagaacacactctatcttccttttgcctctatccagaatagacaaattggggtgttttgaaaatgttcatgcctggccttgttactcatagctttaccttctcagaggttaatgacaaagtgatgttcaggccagtgactctgacctcaaaatatgttgccatcattaataatgatttgcaaagagtagaacatcacaattcgtgatggagggcgtgatacaggcacttaggtaaagtgtactcagggtggaaaaacctagacttgactaattactggcaaagagatgctaggaacttgtccatctttactcatacagt

SEQ ID NO: 215720 - DNA, 233 bp, Homo sapiens
gaatttccactaggatgcccagattagttgatagacacattccaaataaggccccgtatgaactggtgtggacagagagccagtgtgatttggtggttattattaatcagacttcactggtagtcataggctgggaagccttgaaaaaattgtttacattagtctgtcttgtgaaagcttcttcaaagatgctctgtcagcatgttagctttgtattacagtggaattcttta

SEQ ID NO: 215721 - DNA, 609 bp, Homo sapiens
tttcctgactagaggcagggattggaattatgtggccacagccaaggaatgcccagggctaccagaaactggaagaagcaataaaggatcctctcctagaggctttacagggagcacggccctgctgacaaattgattgcagacttgcagcatacagaactgtaggaaataagtttctgttgttttaagccacccagtttgtggcattttgttatggtggtcctaggaaagtaacacaatgggttttgcacactattatagttacacctaggtattttattttttggttttgagttttttctctgtttcctttttgctgttgttcctgtaacttatggggttctccattatattttcctagctgtatgcatataagttacgtttttctttttactaattttatattccattacacaacttaattcttttactgcttaaagtaattttactgtaagttcagttgactcttggatttttcaggtgtaaaattagtcatctggaaaaggatttttttttttgagacagagtctcgttctgttgcccaggctggagtgcgatggcacgatcttggctcactgcaacctcagcctcacaagctcaagcgattct

SEQ ID NO: 215722 - DNA, 453 bp, Homo sapiens
caacttttttttctaatgactttttaatacttcttcttatctgagtaaaaaccaggaagtgggaagcaaatgtacaaaaaccagcaatacacacacacgtgtgtgtgtattttcatgtacatatgaatgtgtatgtgggtgataggaagaagagaggatgcatagagaagatgatctcgatcaagtttgatgtaaatgtaatagcaaattagagtacattcttgtcttaatcttttctgtaataaagataaaatggggcattatgttcatatgattgaacaaaagtggatgatttcaacctttttcttctcagccattaaaagaagaatttgaaagaaacagtctttgcatacatatacagagagtttgtcagcctttcttcagacacagccagccacagtcagactaaacattcgaagacgttacatattacgtccacagtggaagtatttg

SEQ ID NO: 215723 - DNA, 451 bp, Homo sapiens
aaggagagctcttcagcagctggaggagggagcacattagaaagagcccctctggtaagattgggggtaggaggccagatgagaacctctgcagttgttctccgtgctggtggagatggaaggaagggatgaattcaagtattgtttaagagagaaaaatttctggccaggcttggtggcccacctgtgtaatcccagcacgttggaaggccgaggcgggaggatcacttgagcccaggagtttgagactagcctggccaacaaggcgagaccccttctcaacaaaaaatttaaaaattagcctcgtgtgatgcgcacctgtggtgccagctactcaggaggctgaggtaggagactgcttgagcctgagtggttgaggctggagtgagctgtgatcacgccactgcactccagcctgggtgacatagacagaacctgtctctaaataaat

SEQ ID NO: 215724 - DNA, 517 bp, Homo sapiens
tctgttacgtaaatacaacttatttaaatgggaaaaccgcaacaaagaaagaactgtggtgttgggacgggcttccactccacctttgtgtttcggctcattcccttcttccaaccgaagagccacttttgacctgacttaagcagattttcaaagctgtgacaaacactattaattcagaaaattagtcctgacttacctgtttttcaattaacaggaactgagctcatttggattccgttcagacttgtagaccttttgctgagaacagagagacacagcaacactgctggaatgaaaacggctaaggtttattagttcactaggaaatgttttccgagtgagtgtatggtgtgaaaaggcccaattttgataatggatgtgcctctctgagcttttaattccatgtttaattgggcacaaaattcaggctctcagatttagtgtaggtgctggccagaataatcaaaccagcagtaaaatgaatggagtatggcgagacttccagctttgattc

SEQ ID NO: 215725 - DNA, 400 bp, Homo sapiens
gccagggactttcccctgggtggcacgctggggagtggtgtcagagccaggatttgaacctggactctctgaccttgagacccctaaccattcccatcccaaaggagacaaaggagatcagtctcacggaggggacactgaggatggccccagggctcgggagtgactatggttccacatacagacgagggaagaggcaggatccccgggtcactgttgggggagcactggtgtgggaagcagatggaggggggccatacccaggggccactcggtgggcccactgacctgtgaacctggagaagaggggcatctgggtgggagctgaagggccgtgggtcagccagcacagggcacacccgaactgggtgtcccctcgtgggctcccgggacctggcac

SEQ ID NO: 215726 - DNA, 428 bp, Homo sapiens
aggagatagtatcagatcccacaggtttgatcctacaagactgcccaacttcagatgccgactgcaaaccccaggctgtggcctgatcagctggctataaattggacttccaatgacccccaccttgaattctattaatttgctggagcagctcacagaacttggggaaacactttatttacctctactcatttattataaagaaaggatacaaagagccagatggaagagatgcataaaggaagatgctgcaacccaccgagaacaacattagactatactatgcccacattaattactttccccctcatcaccttagaaaatactttcatttttcagtattgtgtggacacctgtgagctggttattttgaaaaaggaaaaacccaaccaattaaaatggactgctctattaaagaacataacata

SEQ ID NO: 215727 - DNA, 545 bp, Homo sapiens
cgttgagtacagaaaaaatggaagcagcaagaaagagtagttcacagagctgccaaaagaggccactgtgaagataagatgaaggcaaaatataataataatcagatttctttaggcatcaaaaagattataagtatgacaccggaaaaatagttctttctgcaaatcctcttcagtggtgtggtttaatgaaaactctgtaatctcctttccaagaggaccataattttcttgaattctaggaagctgaagataaaaatccttaacgatgtatccttatactatctacaacatacaggactcagggacacccacacagggagaatctcatgtgaagcctgaaggtatgctgccataaggcaaggaactgcaagcaactaagagacagacctggaacagatccttgcctagagccatcagagggaacacggccctgccgacgctgggatctcagacttgcagcctccagaatgactaatggcattttaaatgagatgtgaaatttggactttactactgcagacctttggctatctagtcaaaga

SEQ ID NO: 215728 - DNA, 600 bp, Homo sapiens
gtagctgggggagggggcaggctgggggtgttgtcgtacaaaggaagctgctcaatgaggaagctcaggagagctggagagctgatgctaccagatcagcccacaatcttgatgggatgggagttgatgagtaattgctccaggcttcctgtgcttctgtggggcacctctgagttttattctgcacagtttctcagagtcccttgtgggattgagtgctagttctcactagtatgcagttactattattaatgcatagttcatcggccttcctcttttctgtttcatttttctcactcccttacttctttctcttatgagcacctctgaggtaaattaatctgcacccaagtccttgtttctagctccacttttgggggaatgcaaatgtaaacagtaaatgtgtttggacttgtgtgcacacactggtgatgattatcaatgagaatgtctctgttcttgaatgttcatcattacgttatatgtttccaaatgggtttttctatctactttggagggtttgactaacgtattactttggtgtttctatgctgtgttcaccccttcccattttcaaatatattttaaaattctttaaaa

SEQ ID NO: 215729 - DNA, 147 bp, Homo sapiens
cctaacttccacaatactgttctaaaactggaactgttctattggtatactggcagataaattgaaaccaaatgttccaccttgaattgcctctggatcaaggctaagatcttcatcaatatcatttgaagagaactgagcaatcat

SEQ ID NO: 215730 - DNA, 601 bp, Homo sapiens
tatatacatgtatcagtatttaagtgccaaatataatctttcaaaaaccacacacacacaaagatatttaaagaaaatctaagaccctaagaccctagggatttcagactttccatttgcctctttatctttgctccattactcaaattgggagtgtgagagtgtatcatttaaacatgagcccttatccctaccagtgaataaggaaaggccttcccccagtaaatatccattctctccattctttctttttactccaatgcttcttaaatggcaaatggcaggcatcttttggttggctgcttcatgctcacagtgttttaaaaggcaaggtaacaagataggttttaggcttgggtgcaatagaaatgcttttgtttcacatccagatctcaagcatttcatgtaccaccagatgtaaccatttgcatttatgacccctggtttcagctgtattttcttctcctagtttcttaaatggcagaaaatggccttatttcaatctagagcagcactattcagtagttttcaacagatacatatctaaatgcaaatcaaatatgtaattttaaattttctagtagctacattttaaaaagta

SEQ ID NO: 215731 - DNA, 1231 bp, Homo sapiens
ctaatacttatttcaaatccagtaagttacctttggagcctatgtacattattgcagtttattataaaggcaagtacattattgaggtttattataactagttaataaaagacgcacaccggcaacttcactgtggtagctttgtagttaataatcttctacatcagcattttaagtgacagactggaggcctgaacatgacttagataggagtgaatttgtatttttgtggagattgggacatactcacctgtagtttctaatgagaacggtgatattagttctatagctgtttctcatggaatccagaatactttgaggaatcattatccattcttttactcaaccattcttgaactacttcatgctttttactcatgtacaacctattggaggaatgaatttgtattcactcttattggtctataaaaggggctttcctatgtttgtctctctgtaagtaaacagaacaaatgttctatatgacagctgttcaaatatttgaaaattgttggcctgttccctttctctctctctcttgtttttcccctggctaattatccttggttaatttgacggcagattgagggcctcctggatgcatggtcctatcccagctgctggaaggaataccaaaaaataaataggacagttttgtactaaataaagagtttttaaaaccaatgtttaagccatccttgtttgctgtggtttccaagcctgtcactattctgaagatctttctggacatgttctgatttgtgaatgctcttgatgaaaagaaaaaggcagtcaaaattagaatctttaaacgggttggcgcccttacgcgcttaaaggactattactcccttcattcaggcttcattcatttaacgtgagccagaactctttcttcatacctccaccactcaacatctccatctctttctctccgcactcttagaacgcatctaaactaggttgcctcatccgcctcatgacactctgtgtaaccccgcgctcctctcatcccccaactccccctatatctcaaccacccgcggccctagcatatgcgccatggctcaacgccgcctctcacactgccgcgctcttggcgcagcactcctgtctcgaggcccctcgctcttgcgctccactccctcctcgctccttcacatcctgtctcatatctccatccctccctcgtctactcctacggctcccactatacccactccggcccgcg

SEQ ID NO: 215732 - DNA, 790 bp, Homo sapiens
agtatcctctttcagaagacttttttgaactcccaggttgagctctgtgcctccctttcagttttccatcacgctcaatatctttatcttgttctttaggctcattcaagtaaaattatctaccctgaagtttcttttgtgggtttttcctcctcattagattctaaagtcctcatgggtggggattgtctttactcagcatttttacctctagatctagtaaagttcttcataaatgtcagttaaaccaaattaaatgggtaaaagctggttttcaataagatgtagtgagagttccataaatctattgtagctttggaagtgagaattgtttctactaaactatcactgaaaaaatgtcaccaaaattaaaccccataatgcagctgtcccagaaaagggatagacttaagtcttattgctgatttctgattctaatttgttttgaaacaggttgttttttcaaggtgtcttaatttttctagctacaaaatagctgtggacattgtgttcattgaaatctgtggggcttgctattctcactgagtcagcatattatgaatgcagtttattattcccaaaatgtcgtgcatgcagcttaatcagtgcagaagtgaagaccaagagccttggagcagttgtactgatttgacattttcgtggaatcaacaaagaggatatatctccatgaggcaagctactggatttctctccctccctatatttcaagctataaacacagtttccccattgacatttattagaaagtaacacaaagcagattgctagg

SEQ ID NO: 215733 - DNA, 447 bp, Homo sapiens
caatttccctgatgtcccagtgataaaagccttacagcttctttctctactcaggatacaagtgaacaaatacattgcatttggttgtcagggtccccaaccttttttatttcctccatgacatagacttttgtagagtccgagatatttatcctgtaaacggtcccataatctggattatctgagttccttatgattagactcaggttaattggtttttttatatgaatacctaagtattttggggtgtttctcattgagttataccaggaggcacaaaaagtcttacacttggtgagtttaatggtttgattaagttgttttcgtttgttatacactaaaggttcaattatcctttgatgttaagaggcaatctatgcggtaatattttgagaacaagtgattatcccattccccaataaatagttttaacatctgtggatactt

SEQ ID NO: 215734 - DNA, 573 bp, Homo sapiens
gaaaccatcattttcagcaaactaacacaggaaggaaacaccacgtgttctcacgcataagtgggagttgaataatgagaacacatggacacagggaggggaacatcatacaccggggcctgttgcagggtgtggggtaggggagggatcgcgtaaggagaaatacctaatgtagatgacagattgatggctgcagcaaaccaccatggcacatgtatacctatgtaacaaagctgcatgttctgcacatgtatcctagaactgacagcattataatgataataaaaaaaataatggagatagcattagggatgtcagaaggagagcaagtttgatttcagatacactgagtttttaatgtcataagagatttaaactatacagtccaaatttttggagaaggattgagattttgttttcctattacacagaagaatcgaaaatgaaagattttattttctcagcatggatgcatccaggttttgtgtagctgaaagctttatacaaattggaggtaggggacctcttgatacaaaactacaaataaagtactaaatggagtctttatttaat

SEQ ID NO: 215735 - DNA, 439 bp, Homo sapiens
tcagttcagaaggcacagggattgtattcaatggtgtgtggtttattgacagaggttctttttgagaaatgtgtccctgggcaatttcatcattgtgcaagcatcaagggtgaattttcacaaacctacaaggaataccctactacacacagggtatgtggattagcgcagggttcccagacaactaacctgtacagcgtgttactgcactgaacactgcaggaaatggaaacaccatggtaagtatctctctatctaaacacatcaaaacatggaaaaagtttagtgaaaatatggtattacaacattatgtggccacaaacatatatgtggtctactgttgactgcagcattgttacgtaacacatgactttactcaaattgacgtgggttgggggggactaaaaataaataaaacctgccaagacgaatcttaaaa

SEQ ID NO: 215736 - DNA, 345 bp, Homo sapiens
ctttgggaaatgcagaatcgatgcttggaatctttgcctttatttaccagttttcagaataatgagttaatgagtcagtttcccctctgaagggcaagagtgagttttttgattgatttttagtgtcacaatgaagtcatagatttaaagatatttgctcttctttgacccatcacagtgaaacacctacctcatgctcaaatcgtcgcatccatggtcaacagcagcctgtttgggttggctcctgagacctcgcggtgtggggttagttttcttgctctctggaatctgttccaggttcacgctggacattttctgcccagatctctttttgttttcatctcc

SEQ ID NO: 215737 - DNA, 618 bp, Homo sapiens
caccacaagttataaacaaaacattactattttattcaaagtaattatgagatattagttctttacaatgttatgagtataatggttaatagagctctatactgcctaataaggtggtcatgaaccacatgtggccactgagctttagaaatttggctactccatgttaagatttataaataagtgtaaaatatgtgtgggttttgaagagaatataaaatgtaaaatattcatatttttgtattgattatgagtttatacaataatttggacatctcagtgaaatcagtaaaattaattttatctgttttttgttttttactatggcaactagaatatttaaaattacatatatggcatgtattatatttctattgagctgcactactataaaagttctacttgaatttagagacaagaacttactgtaaggttataaaattttaagaaaatgtctgtgtgaaaaggattttgttcctaaaatgtgactgaatacatcctcatctagtctctgcttataaacatttagcattacttgaaaatcagtgtttttaaaaaaattgcagtcctcatcagttgttcttatataaacctaaaatttaggctccaaataatttt

SEQ ID NO: 215738 - DNA, 648 bp, Homo sapiens
tgtttctaaaagaataaatgaatagttttttgttaataattaatgtaggcctctgcttacctgctttatacattctttacctgcctgtacgtagcacttgcctatgcaagtattcatttactgaaaaagttaccaactttgtagccttgaaatcatttaaaaaatatgttaactgacttgaatactctggttagaagcaaaatgcataccttctacttgaaggaatttgttttcacctttactgaaaaaaatacatatttagttgtattttaaacactacttattttgacatagtaatcactttatagttttctaggaagttcatctttgtatgcattttatatctcctattcttttcttgtaaagattaggttacaattaaaataattcaaagatcattgggaggtactgcattaaactgtgggttggatcttgccttttgtcttgttcaaactgcacctctccttttatttttttcaatctgaagatagtagcatgcttagagcatgaatgtaagccatgtggtggctaagatagagaaggcagagatggatgacttcagaggaagtaagtgtttgacaggagactggactgggtgatggtgtgaaccaaagtcaaggtcacagggagaaaaagagcaggctggct

SEQ ID NO: 215739 - DNA, 553 bp, Homo sapiens
gagggctgcttttggcctcccctttcaaccagtggaaatctgcatgttaggatagagacttgcgtgaagtatcatctggtaatcatccttgacaatgttcaggattatgctggagggacaaacaagtaattccattgcagtagcagtcatggaaatatacaaatcatagcagctttccaatcagagctgtggagggggaaatgtgggagagaaaacctcttcctctgtctgctccccctgcccttcatttctggatccacttgctcactcctcgaatttctcttcaggtttggaaaggtatcacaccatctctaaataattctgggctccctcattttgaaagctcttgcaaagctaaataatcttcttcgtaggtaaacataaatcattgtctaccttctttgctccttgagtagaccttttgatacattcattaattatggccactgcctggtggtgcagtaatggctgagtcactgccgtgagcatctttcctggaacgctcccatttctgacactgaacccgaaaatccaattcagtgttaaagaggcc

SEQ ID NO: 215740 - DNA, 261 bp, Homo sapiens
tgatcagtctaggtaaaggtttctcagtttttgctaaacttctcaaagaacatttggttccattggtttttctgggtttttattttcctatcctctatttcattaatttctgctctcatctttatgtttctctccttctccttcctttaggtttagtttgatcttctttgcccagtgtcttaaggtggaagcttaggttattgatttgacatcttctttacatcagtaaagaagatctacccccatacatttcactctaaa

SEQ ID NO: 215741 - DNA, 551 bp, Homo sapiens
caatgagttagtctactcactatgacttaccaggtaattgcttcacctagactccagtgttgcaatggaaagactgaaacaattggacagttatctggatcagggcacttattaatttgtaagaaaaggaaaggattcatttgtctgaaattgccatcttgaaggttttcattgatctaagataaattccacctcattcctgcagacacagacttgttctgaatttaaaaggaagagattgctgtttttaaagacaaaaattataaggctgggtgtggtggctcatacctgtaatcccaacacattcagaagctgaggagggataattgcttgaggccaggagttcatgatcagcctgggcaacatcatgagaccccatctctacaaaaaataaaaagttggccagacatggtaggcactcatagtcccagctacttgggaggctgagttgggaggatcgcttgagcccaggaggtcaagattgtaatgaggtatgatcatgccactgtactccagcctgggccacagagtaagaccctgtctcttaaaaa

SEQ ID NO: 215742 - DNA, 598 bp, Homo sapiens
ccagggaagctagcagtgcagccttcaatctgtggctgaaggtcagagagaccgcatgaagtcactgttgcaagtcccagaattcaaaggccaaataacctggagtctgatgtccagtggaagggggagtggaagcaagcatctggcatgggaagaagaaagaaagaaaaccagaagactcataggcgggataagcaaacttatcccacctttttccacctgctttgttctagttgcactggcaggctcccagcggggaggctgcgagtgcacaggacatacctatgttctatatatgtgagatctatagcctaagtgttcatttatggagggattttacatggtattgtattttgaaatgtcagtgcccatgtgtttgttgctagcatgtagaaatagaatcgacttttgatcgtttatcttatgtctagcgaccttgttaaactcacttattagttctaggagggctttttagagggtagattccttggaattttctatgcggagacaatcatgttatctgtaaatgagggcagttttgtaacttcctttcctgtctgtgtgccttttattccttttcttgccttattgactggca

SEQ ID NO: 215743 - DNA, 449 bp, Homo sapiens
ctgatagtcccttagagttagttataatgggatttcggttaaaatttcttaaatatgtattgaatgctcaatgcgtagctcaattatgtagatagatgcttgctgttacacagggaaaacatgactcctaccccaagcagtttaatattctacatatgtacacttctaataaaaaagagactaggaagccatctcagtcatcttcactataaatgaatttctattttagaaatttagtagttgtaattctataataatatatattattggtgaaagtataaatggttctattatatgccaaattgtctttaacccgttttttatcttcttctgttaaaacttagaaacagtagaacttgattaaattctataattttttggtaagcctttcatcacaaatttataaaagctattcagttttctccataaaatcaagtttgttttccatt

SEQ ID NO: 215744 - DNA, 421 bp, Homo sapiens
  misc_feature (406)..(406): n is a, c, g, or t
  misc_feature (410)..(411): n is a, c, g, or t
  misc_feature (414)..(414): n is a, c, g, or t
ttgccagaacaacatgccacaggacactgctctcccctggaaaaacaggtccacccagttaggaactcagattctgaaccctcgcagccacggcattctgcgagccttgtgtgacttccctaaaaaccacaactgctcctggaagctcatctttctaggccagaagacagtattccttagaaatatggagacaaatctaggctaaaaaggatgatgtctcacatctgtggagcacaaagcatgtgccaggcactgagccaaaaaggtttttgtttgtttgtttgttttctgattttggttttggttttggttttttgagaaagggtctcgctctgtcgccgaggctggagtgcagtgagctgtgatcatgccattgcactccagcctggggaacagagcaagaccntgtnnccnagcaaaa

SEQ ID NO: 215745 - DNA, 1554 bp, Homo sapiens
ctgccactgcactccagactgtggacagagcgagactccgtctccaaaaaaaaaaaagaataatttgacctgtgtttgagggtgggagatatgagaaacttctcactttagcaggatatgctgagggttaagatatctctggaaaatctccaaatgctatgtcatcaactcattaaagacagaggcatctccaaacctgtacagtcttgtcacctctcagacatcagaactgcagagtggcaaatccaggtaagattcaaaacccaattcatgcattcactgtacatttattaaacacctgtaagttgtcaggcactgatctagggactgagaatataaacatgatatatggaagtatacccatccattattatttacctttattatgcccaacctctcaagggtgcaggcaggaagttcttctcctgttgcctaaggagcaccaaataagtctccattctcatttctgtgcctctgatcatggggtacccacctgaaacatgcccatcataactcacctacccaaatcctcacatccttcaaggccagcttaagtctccctccttttggaagccctgacttccactccatccctaaatgatgtctctgttctctgagctgctagcaattacagcgagtaataccatccaccatccatttatttagaaatttattgtcctgcaactgatacttttatttcttcaacaaatcttaagtacctacttatattgctttttaaaatcttcctgtaaagacctggtttggtactcagtgcttaatatctattaataacaatttattagcgccttaggcttatatggtccaagctcactcaaactgaagttacataaagtaatggggaacaaaagctaacgaaggcatttctaaatgaacttccacttcttaaaaacctcaaaagaacaaggaaggaaaaagaaatcaggctatgaaagcgctgctgaactaacacatttaactcacactaacaaagcacccccaatcccccttcgaagccacacaaaactgatgtttttccctcggtccttacagctccagattgaagcgtttaacaacagaccttggaaaagtttacagcatccttcggtttcctaaacaagtctctctgcctttatttctagatgaataagcccctggatgaatcctgcatatgccacttagactaatccaatgaggttcactacaaggaactacaatttgaacttcaagcacaagagaggctcaaagacgaacatcttgaaaatgatacatccagaggcaattttaataaaacaaaagcgaggggccaggcgcggtggtcacgcctgtaatcccagcactttgggaagccgaggcgggcggttcctgaggtcaagagttcgagaccagcctggccaatatggtgaaaccccgtctctactaaaaatacaaaaattagcctggtgtcgtggcgggcgcctgtaatcccagctacttgggaggcagaggcaggagaatcgcttgaacccgggaggcggaggttgcagtgagccgagatcgcgccactgcactccagcc

SEQ ID NO: 215746 - DNA, 623 bp, Homo sapiens
catggtggctcacgcctgtaatcccagcactttgggaagctgaggcaggcggatcacctgaggtcaggagttagagaccagtgtgaccagtatggcaaaacccgtctctactaaaaatacgaaattagccaggcttagcggggcatgcctgtaatcccaactacttggcaggctgaggcaggacaatcgcttgaacccaggaggcagaggttgcagcgagccaagatcgcgccacggcactccagtttgggcgacaaagcgagactccgtctcatttaaaaaaattaatatctctactgactagggaagtaaaaattagaataaaccaccatttcacatccatcatagtgacaaaaacataagtcttaaaaatgtaggccgagtgcggtggctcacgcctgtaatcccagcactttgggaggccgaggtgggcgaatcacaaggtcaagagttcaagaccagcctgaccaacatggtgaaactctgtctgtactaaaaatacaaaacttagccaggcgtggtggcatgcgtctataatctcaggaggctgaggcaggagaattgcttgaacacaggagatggaggttgcaatgagccaagattgtgctactgtactccagcct

SEQ ID NO: 215747 - DNA, 549 bp, Homo sapiens
gctttaaatgtctatgaatatctaaagttctgggtattcttacagaaacatctgatcatacttctgagtaaaactttctactgagtctgatgttcagttgctcagtattatttcaataacatttgtagcaacactcactgcaggaacaagggacatattccaagaaaaaaaaggaaggaaggaaggaggggagaaaaggaaacattattataggtcatgagagttcagggaaaattaatcatgatctttattattttagttcaaagtgtcttcttggaacacttgtataaaattgtagcattattattctatattattgctctgttgtatttacatatgcatctgagaatttagctaatatgaactatgtagtttataacttaataattatttattatatatttgattttaaatgttcatgtttatggcttcttatttaagacctgatcatattaaatactacccgcccagtacaaccgtcttttgtgattccctggaaacccttaattcaatagtcctgactgaaaataaaagattatccttagtctc

SEQ ID NO: 215748 - DNA, 485 bp, Homo sapiens
tctttctatacctctacctcagtttttcccatgtgtatgtgtgtgtggaatatgttctctggggtatgttaatatataaatggtattatatatcataatttatgcatcatgttattttgatacaaaaatgacttgaagctctattgttcatatatgtagttccaacttgtttttttaaccactgcttaatatttcataatatgaaaaatcattatatttaggaattactaattacactattacttgagtaaaccctttttgtacatttctcctttggtacatgtcttgcttctctttccagaatatattgaagtattttgatacagttctaaatgaactagatgattagctttctacctgctgctaagatgatttgattcactaatttattcacttcagatacctgtattgatcctacatttaaaagttgcttgtgctgggactgaagatgaaaatgtatgcagaccctgtctttgacatgcaca

SEQ ID NO: 215749 - DNA, 429 bp, Homo sapiens
agcatggagacatatgcatatgcgttcagtctgggaaagggagagtagtttcaggtggccaaagtgtgaggtgtgctgggggtgggggtgatggttttggaaattctgttaaaaatatatatatatatgttcacacacacatatgcgtacaaatataatataatgaaacatcatataatatgtaatacagtaatgtaatatctggacagtgcatatccttaaatactttcacttgagaccatttgagaccagcctgggaaacagagcaagaccccatctctacaaaaaaactaaaagttagccaagcgtgatagctactcgggaggctgaggtgggaggatcacttgagcccaggagttcaaggctgtagtgagccatgatcatgccactggactccagcctgggtgacagagtgagaccctgacttta

SEQ ID NO: 215750 - DNA, 214 bp, Homo sapiens
atgtccaaaccagtgcataccttcattgtaaccttgtcattctccataacaactttgaatttattcttgtgggtcccagctatatcataacaatttgtaacaagaaatatgttttgttttcttatattttcaaagtgataatatgcctagtccacagtagtcacttcttaagtagacagataaacaaaaataacattaaacaagaaaaacattt

SEQ ID NO: 215751 - DNA, 112 bp, Homo sapiens
atctgtatgatggtgatcacagtaggatgtatctgagagagctgttttaagaaccaaatagatagcatatgataccataacgtaaggtgcgtggaagctctcagtgagttgc

SEQ ID NO: 215752 - DNA, 500 bp, Homo sapiens
cttctatatagtagacactcaaaatgcttattaaactgcatttacattcagcagagataaacagagtggaaagctgccatagcattacctgtggaaatgaatgaaagcctgtgattcggatcctaatgggagaaaagtgccatggcagaaggagattctgttgagaagataaatgccctctgactatgtcttcttcaatcctcaaaaatattgccattatgtttgagagcagttgataaagcatagtgtgctgggaagagtgctggagaaggagtcagttgaccttcacgactgtccaattctgcaatgagcaagctgtgtcactttgggcaaatcatgggttctctgtttctctgtttcatctataaagtgaggcaatgaaatattatgatcttaaattatttctttacagttatatgacattaatcaattcctgacttccttcttccattggtcataaatatgtgtatgtatgtataatatattcatagataatgtgt

SEQ ID NO: 215753 - DNA, 152 bp, Homo sapiens
tcaaataagcattctacttgagtctgatggagaaactaaggtttgatgcagtttaatagcttgtaaatgttaaagagcagtatttagcctaagcatattcacccacttacaatataggagttctgtttttttatatcatattccataaatat

SEQ ID NO: 215754 - DNA, 367 bp, Homo sapiens
tggccagggatggacgtctatcatctagtcagtccatccttcccacgcagagtaggaacttctcattggccagatgtgttgtcaagtgtggaatctgagtggaggaatagggggcggaatcaaagggggcgggggaagtcacaaaagaggagccatatactcatcgcctcttgctattggctggaagaggaaataaagttttatggttggcctacgctcctgcccattatcagccaggtctttggaggtgggagaaaggatggaatcatgtggcgtgccacttctttcaaaggcggccgaggggaggagtaacaagggaatgcgggaggggaaccgcttcccaagaatctctgcgcagagatcctta

SEQ ID NO: 215755 - DNA, 396 bp, Homo sapiens
ttctcatcttattttttgtttctttgggtggcatccttactgggaagagagagttcttgtaaatattaaattgcctttgtaagaacatgagctttgaaatcagacagacgttggctcaaatccaccctccccacttaccagctctctaacctctctacatctcaggctgtcccttctgggagatgaggttgttataaggaataataaaactgcctgcaaatgcctaacactgacacggcacaaagcagggggttggaaagtgttcattctccagttgttctgctaataatgggtttctctgcattttagccaggcagaagttttttcccaggacctgggtttgagacctagaattatgggagaactcatctcaagttaattagaggaaatgaaact

SEQ ID NO: 215756 - DNA, 1189 bp, Homo sapiens
gttctaccttcttattaaaatcagctcctaccttcaaaaacctgcaggcttttctttagctatgtatgaaaccgactgatatctgtcttttcaagaaagggtaggggaataataactaaattcctctgaaacactaatgatggaaaactggaaagcatactttagtaacacttgacttatgaatagtgtccaagtttcttactgaatcttgggttggtccatctggtaattgtagcattgttgccccaaacctcctcaaatataatagcggtttttttcttttcacgacctgtgcaacctgtggtagtctgaggagctctggacttggggccagaggttggggttggtggaggatgaggagcagttttatttaaaatgactaagtgcaaaggtaacagacaagatgttactgtaacagaaggcagttggctgtcctcagaccaccacaggatgccttgaatgtgttccatgggtcctggagacttgggagaaggaaagatgaatttagtaggggatatcagactatgtagaagagaagaatttactgggcttccttacttgtaaggtgaaaggattagactaacattgagttattgctaagatactgaactttgaagttttctttatttaaatttttattttagtttttaataaaattttactcaattagtatgcagacttttgcatatatattttaggcctgttaatgatagttttgggttatacctttcaagatataattttaaaatatatacaactgttatgtattcataaaaattaaatatacatatttcaaaaaattacagccatatttctcaaatgtctttattatactattttcttaatataagaggtcttgaaaaatatttgttgcaggtctctttgggtattaccatgttttccttttaaaaaatatgttgtcaacaatatccaaacaataatgtttcccatattaaaaatagtaacatacaaattctggagaggtatattgacttacttttctaatcattacattgtgaagttttccagcttactgtattctagttggttttaatatgtcacattagaatttgtcttatattcacccattctatccagaaatccaaatgattatttttaaaattacaggatttttcttcaaaaaacattgagaaatttttctcatttatatgaagaaaggagaaattga

SEQ ID NO: 215757 - DNA, 720 bp, Homo sapiens
ctcagagtaaaacagtagtcacactggtctgcaaggccatatagagactcgtctccatttgcctcgcagatcatatttgctttttctttgcaccctgtctgatactggcagtgggttcttgaccctcagaaaatagaaatcgaccaagaatctaagatggacttgagcaaggaagtttattagggctttcggcttgagcagaaagggagacagcaaccagaggtatacttgcagctggctccttgaaagcaagctagtctagtttgttattcttctgtgagcttcgtctaggtgacatcatggcatgtttggggtggtctgttggatacacctttgcagtcccttgtcatgctttttcctgtgtctcaggtctcattggcagcttaaatctccacgcaggggtatgaattttatcattaacatgatgcaaaagttaggttaggataatcaaagtccctatagcacatgttcatttggggaaggtcttttggaagtccctatgctgatggcgaggatgtttgtcgttagagtgttctatttcttttatgtctgattggctgattttatgagcggaagcttcagtggctgcaaggttatggagctgggtgctgctgtagtcagcacagcaagtaaacaagtgtggaggggtcccttgtcctgccttccattgtctgcctcacctctgcccctttttccagtcataatacctgctttttacct

SEQ ID NO: 215758 - DNA, 543 bp, Homo sapiens
ctttgggagtccgaggcaggcagatcacctgaggtcaggagttcaagaccagcctggccaacatggtaaaaccccgtctctactcaagaacaattacttaaacatttttatgttcctcatgtaactagttcaaaaacctcacagtggtaaaaagataataaaagaatcgtgaaagtgtgttgaaagggactgctagattttcaaagtgtcttaggccagtattactacaaaagaaaagtgtaactggagtcagaaaatatcattacctgaatgagaaaattttatcagccattcttttaaaaagatattcataagacatacacatctgcaaagtaaagcatgtaggtgctcaaatatctgctgaatgtatgatataaaattttaagttaatattagagtctaaaaacttttctcaggctaacataatcaaaatttaggttcaaaatttcgaaaacaaaagtcttgtgtcttctgcctttatgaacttgatttgctaaagtaaatctgccatgcatcctgatcttgtgtttggcagcaagagcc

SEQ ID NO: 215759 - DNA, 431 bp, Homo sapiens
ttgagccagagaggtccaagctgcagtgagccatgtgccactgcactctggcctggagaacagaacaagactgtgtttcaaaacaaaacaaaaagatgtatcttggtatgtttttctttgagttatcctatttggtgtttgttgagctccttgaatctgtaaatttatatctgaccaaacgtgggggattttccaccttttttttttcaaatgtatttttctgccttagtatctttctttctttctttttttttttttccatttaaccctgagttgacacagcacatgtttcagagagcacagggttgggggtaaggttatagatcaacagcatcccaaggcagaagaatttttcttagtacagaacaaaatggagtctcctatgtctacttctttctacacagacacagtaacaatctgatctctctttc

SEQ ID NO: 215760 - DNA, 514 bp, Homo sapiens
gaggctctcttcactcactccacatcaaaaaaggtaaaactccatctcagatatttctgctacccagagtcccttctggatccttctccccacaggcagttcaatctctggtggcccataaatagcccataaatagcacttggcatcactgccccctatcccacgaggctcttttattctccaactttccacaccccttagaaggaagcaagttcctctccttggtgtttatgtatcagtttagcatttcagccaggacccatggctcattttgtctccaaatacagttctaatatcatccctaaaaaataaaatatgagtgaacatgactcttacgcacacacacatttaaccatacaaatttgttgacaagttttactttcttactctgctgttgtgttctgcccatttttctaaatgttactcggctgatatctttaaaactggatcttgctcaagcttcctacttcttgcactggtccattgcaataaaagacaggcgacacgtggacaa

SEQ ID NO: 215761 - DNA, 445 bp, Homo sapiens
cataactatttgcagttgtattttcctttaaatctaaattggagagaaggaaggtaattaaggcataattatcagacttaatcaagcacttatttattgagcttacttggtgcctgggcttgtatcttttgtttctgatttttagtttcgtttcattgctccagcgtgggggaatttgcctgtgtatccttgaataaatgtctttctttggaaggcagattaagtagggatttctcttactgtttatttttgtttctaactgaagttcaatgaattattcttttacccagacacttacatattcctagccattccttttgcttaagtttgcagagatttgtgcttaaaactgaataaacaatctcagggtttttgtgtgtgtgtgtatgtgtgtgtgcgtgttatatgaagtcttgctagaatgcataaacaaacaaaaaaaata

SEQ ID NO: 215762 - DNA, 405 bp, Homo sapiens
tccagtttttttttttattgttttcaaaaataaagtaagtagaacaactcattggtaaggtagttttctcttttctttggaacatttttgggaaaagaactttaccttatgttcactgttatgatctaaaatgatgataatgagatgaagagggagtcaaggataactgtgagatttttgacctggccagatggaagaatggaattgctatttaatgaggtatagacacttgctgtattctgcttaatattgtagatattttatgtgcttatgttattccttctgtgcttatcttattcctccttctagttccccagggtttggggctgtgttgtccatgtattattcacaatacccagcacagttctttgtaccgagtaattgccacctactttcctgaattaa

SEQ ID NO: 215763 - DNA, 319 bp, Homo sapiens
ctcatactaagaggaaaacagaaaatacagggttacagagttcacagccaacactcaaaacaacagactggagtatgtgtctaaggaagacatgaaatggaagggccactacagacaactggcggttgagaagataagactcagcctacatcctccagaagcatactgacagacagagtctggggtcgtttgaggctctcctctgtactgatactctccaccccactccctgagaacaactggagggagggtgcctgcctaggggctctcgagtggtgagcacagtgctgggcacacacagtaaagctccagaaaagtg

SEQ ID NO: 215764 - DNA, 366 bp, Homo sapiens
ggtcaaatattgttcagctccagtcagagccacacttcatattgcaggcttctgcctggttcattttcatttttatgcaagcaaaccatcacaagagcccgcctgtgtttaccccctgcccaggtgtattatgaacattgtctctagttcctacctgtggctcacatagctaaggacagcagggcttacctggctggggctgagcgtctcaggtgaaaagtgccacctggaggtggggttgagaatgaactccgcctgatggccatgtctgggtctggcaccccaggagtccactaagcagtcataggcaaaggatgccatttgtctcttgggttcactagtgcagtgggtgacttctgccagcag

SEQ ID NO: 215765 - DNA, 343 bp, Homo sapiens
gccatgactcgctctgttacggcctcagctccagaaacttcactgctgtgcactctgggcagatgtggccaagataagcgactccctctccccatagctcctgatcttgggctatggtttcggtctggaaagggaaactgctgggatttcttattcttaccccagccccatgttgcagaagctctattccaagcaggtgtggccaagagggctcagactctcttcccctcggcccattgtcacttgttggaagaaactccactctaagctcagcatactgagaataactgtgccctaatgattcctgacccagtttgcttatagagtgaaagttccaagccat

SEQ ID NO: 215766 - DNA, 516 bp, Homo sapiens
tcttgaactcctgagctcaagtgatccgcttggcttctccaagtgctaggattaccagtttatctctttaacacctcctccactgtggaaaagagaagagtggcactgacctccaggacctggtctggtgctgtgggccaggccctaatgttgttggaagctggctggcacccataggaaggccatgttgttctcctgttggacataaacaatcgcgcagaccacccacacaagggcactctgcaccactgatgacaggagatgaaacgagaccacctcatcattttgtctaagcagagaaaaaagcaaggtcactgtgccacccacggaataccagacatctctttctcccagctgatagaagtgactgtggcttctttacatgttacagctttagccttactccagccaaatctccttctagaaaagacagagctactggatagaattttcccacctgctttcagtactcaacacagagaaaatcccttgaccctcccccaaatcacccagcca

SEQ ID NO: 215767 - DNA, 996 bp, Homo sapiens
gcttaggtgtcatgtgaaatcaaagccctatcaatgaactttttatattctgctactgtaaaatcccttggtctgtcttgtacttgaatttaccttttatccaggcaggactgtgcagcatcatgcattgatcacttggaaaataatagataatagacataaacaggtctgccactgttgatatatgctattatgtaatatctttttaaaatcacatttgcaccacccaccacagtagaaaagtgtaaatgttgggtttctgttatgttacagtggcagatacaagattcctcaaattccagtttgcacttgcaaagtctgattttgtgatcagtaacagatactgccgcttgttttccatgaggtgtcaggctcactttgttcatttttagtaacatatctgtcaaatatccaagtcggaataacagtagtttgtcagtcattctttgggttaaaaaagatgatgtttcattttttgaagttattctttcaagttgaaaaaaaaaaaatggtgtttccaaagtagagaatgaacttgtcatgtttaagaaaaggaacagagttcattacacacagaacagagtagacaattgggagagaaatcaggatgaggatggagaaatatgagtagacagtccattcagagccttatggacagaaggaaatcatttacatttttttctaggtggaaaggaaatcatatcagaattctttttttttgagatggagtcttgctctgttgcccaggctggagtgcaatggcatgatctcggctcattgcaacctccgcttcccaggctcaagcgattctcctgcctcagcctccctagtagctgggattacaggagcacgccaccatgcccggataatttttgtatttttagtagagacggggtttcaccatgtaagccaggctggtctcaaactcctgacctcaggtgatccgacccgcctcggcctcccgaagtgctgggattacaggcatgagccaccaca

SEQ ID NO: 215768 - DNA, 578 bp, Homo sapiens
atggaaaacatcaacaccgacttcagagaataacaacttcctctgggaaggaaaaaggggccaggaaaagatacaaaggtggccttaattataactataaaaccacctttttcttttgtttttgagactatcataaaatagcataaaaccttctttttaaagaagtaaaaaaatctgaagcaaatgtgtcaaaagttcaacatataccaaacctaggtgatggatacttggatgttatcaaacaggctaataaatatatatgttaatccatatatatttcatgtgtaaaattttcattaaaagaaagtgtatgtctagaagggttccatggtagcacaacagaaaaatggaaacatcttaaatattcaccaactagaggagtggttaaataaatccattcaagggtgtattctacttttagaaatatctcaatatacaaaaaaaaaaaaatgtacatacacatataaaataaaaaacacaaatatagagcaatgccattcaatattttcatttcattttttaaatctatactgtggcactgaacttgttccaacaagcaggtgctaactacaacaatt

SEQ ID NO: 215769 - DNA, 229 bp, Homo sapiens
aagttacttgtcatcagttcccaacatgaatgctcttgctcaaataagtcacatccccattccttaaatgcaacatattaaaatctgtttatgttccatattcatttgttagtttttagattcttatctcttccatgcagcttttcctaaccaccccaggcctctttgacttctctaagcttaatggtattctttatgtatttccttcactgttctctaaaattttctt

SEQ ID NO: 215770 - DNA, 687 bp, Homo sapiens
tgttagacaggatggtcttcatctcctgcccttgtgatccacctgcgttcagcctccgagaatgctgggattacaggcatgaaccatcgtgcccaccctgggaccgaccatcttttttgttttgaagttataacacattataaatgataaataagtaacagggtctggattctagcctgggtgttctggctccagagcccatgctctggctgttctgtgatgttggatgtttaggttgcttccaattttcccttttataaataatgttgacacagaatcatgctgcattgtaacttttgcttttggccagattggatctgctggtggtcatctaagaagaaagtatttggtaacacgcagtgtacaatactaacactccttcatttactgtagttattgatgaactgctgtggttaatgtggagggaaatgtatgttatattctttgtctgaatagcttatgataattgaattaccatgtttctttgattctaaaattcacgtattcctatttttacaattcctaaatcataatgtttttgtagccagtgtgtacaattaatgtggctgtgtgtgtttctctctcttttccttcctttcttttctgagacggagtctcgctctgtcacccaagctggagcacagtggcgcaatctcggctcactgcaacctccgcctcccgggttca

SEQ ID NO: 215771 - DNA, 364 bp, Homo sapiens
gaaaactaacagcagaaatacgtggtatctgaatatattttatatttaaatctttaatctgtttggaatttattttgatgttaacctcctcactctcttgccattttctgaataatccattctttccctaaggatttatggtgttatctcctttatgtgctaaattcctatctattcttaggtctgtttctggggatttctatcctattcatttgatttgtctgcctattcctgtattagtactacactgtttttaattattgaagctttataatacaatttaatatctggtacagcacattcctcctcattattcttcttattcaaaaattttggcagtgtcacacacatctattcttctaga

SEQ ID NO: 215772 - DNA, 434 bp, Homo sapiens
aaagaggtttaattgactcacagtaccacaggcttaacaggaaatataactgggaggcctcaggaaacaaacaatcatggcagaaggcagatggaaacaggtacatcttcccatgacagagcaggagagaaagaaagagcaaatgcggaggggccacacagttttaaatgccagaagtgccacagttttaaaccattggatctcgtgagaactcactgtcatgagaacagcatggggaaaaccagtcccatgatccattcacctcccaccaggtccgtcccttgacacatggggattaaaattcgagaggagatttgggtggggacacagagccaaaccatataatcagagaaatgcaaatcaaaaccacaatgagataccatctcacacctgttaagatatccatgatccaaaaaataaataaataaataaga

SEQ ID NO: 215773 - DNA, 525 bp, Homo sapiens
cattatctattttcatcactgcatatatctgaggaaggataatgagactctactatcagtagaaggatgcttggattatcacgtgcaacactttatagcctatcttgacttttctcccaaacttcatagaagaaaagatgggattttctgactctttttaacttcctaggactagagagccaggaagacagaaaaaaggggcaaaaggggccctacttttaacttggtacaaagtttataatgggaacataatagttccagaaagcggaatagaaaatcttattaaagaaaccaaggcagggagcttcattaacattctgctcttgaactcatgcttttattagatacttatgtgtagggctattctgaggacctgctattcattttttccaataattcatattttaatgtatttagataggtaatttacatgacattatttttagaaatcatgacctatttcaacctgtcattgttatctatggcttaatttctgtgaaaagcaatgaagtctctctgcaatat

SEQ ID NO: 215774 - DNA, 411 bp, Homo sapiens
gctctcccaagagagagtgggctcctgaaggaagaaataaggaataaccagatgacgaatatgatttagagaggattcctagtacaacgcagcttgtttggaactggagaggtcgcagaacaggagtggaagaatgcgtggaacgcagagctcgccctagttgagagtcggaagggttgagcacttgctctgcggcataccaaaaggggaaattcagacacagagacatgcatccagggaagaaaatgtgaagtggcatgcacaagagtggaccatttacaagtcaaggaaagatccctggaagagatccttccctcttactactcagaaggaaccaacccagctggcgctttgatttggacttccagcctgcctaaatgtaaccaataaatttctgctgtttatgccgcc

SEQ ID NO: 215775 - DNA, 485 bp, Homo sapiens
cagtgcgggtgaggaggtaatgagacatgagctgagctatctgctgtgaaagtgaaaactaaattgccaatatggaacaaaattatgcagccgttggaaattatatttaaacaatatttaagtttaaaaaaaagactaccatttaatacacagacttaaaaatttacttacattgtgaaccaaattttaagtatctatttctagggaaaaaagtgaaataaaaaaatacagtctgtgaagttaattttcctttgtttaaaccttgcttttccacttagctgtgtgacctgagaaaatttctgaagcttttggggcctatgttctcatctataagatgaggaaagtaaaacaacatgtgtatcttacgaaggactaaatatattaatattttctaagcactcagggcaatgtctagcactttgtaaagttgcagtatttgttttttgtttatcataactattggaataaaatgtaaaaatctagga

SEQ ID NO: 215776 - DNA, 334 bp, Homo sapiens
gggggggtcttgggggccctgtggtggctcccacccctcgcctcccccaccccgtgaggctggctggagggggccagagcagctctttggaaactagggcagcagggttaggaggccggaggccctggggtcaccggccagccacacaggcaccgttttcagatgtccacttctcattgggtacatcaatcttttaactttgggggtcacagttttagccacctttcggggggtgactggagcagtaggaggtgtggggtcattttatgaatataataaaatggagctgactgtggacgaggactaagtgtgggggagaggggacgatacaggt

SEQ ID NO: 215777 - DNA, 585 bp, Homo sapiens
actttgtatctacaaaaaatactaaaaattagccagacatcatggtgtgcgcctgtagtcccagctacttgggaggctaagatgggaggattacctgagccctggaggtcaaagctgtggtgagcagtgatttcgccactatattccagcctgagtgacatagtgagaccttgtctcaaaaaaagacaaagagaaagaaaaaaaaacatttgggtgttttcaatgtttgatgattataaatagagcgactataaacttctgagtatagatttttgtgtgaacataagcttttatgtctccagggtaaatacacagaagtgggattacagggccatttggtaagtttgtgtttaactttgtaagaaactgtcaaaccagtgtggctgtaccatttgtatttcctttagaaatgtatgagagttccagttgttctgcatccttgccagaacttcatactatctttatattgttaagatatctatactgccccaaacaatttgcagactcattgcaatttgcagactcattgcaattcctatcaaaatcccagtaacttttttctatttctgcaggaaaaaaaaaaaa

SEQ ID NO: 215778 - DNA, 598 bp, Homo sapiens
tgtgcttacttcagattatctctgaaacaatcagatgtaatggccagtggatgcaaaatacatataaagtaagatttgggattaggaggctcaagggggatggatatgtagagaaaagacctaggaagaacaagaacagggactggcagaaaacacattctgagacaaaggccatttatttagctctggccagttggtttatctagcctgacatttctcaacctgggcgctattggcgttttgtgccaaattattcttgattgtagagagctatcctgtgcattatggtatgtttagtagcatttctgcctctacccagggacaatgctaagcatcctacaataaacaggatggtccctccaaccaagacttatccagcccaaagtgacagggtgctgaggttgagaagccatgtggtatataacacagatgtacacactggaggaaacgtcactgaagtagatgctggtcacttaccagtttcactccttcaggatatcctcttctttaaacgaggaggttgtgactagttacttcccatgaaaagcagctgacccttagggttgaaaagtatgtttattcccaatagcagtgaatg

SEQ ID NO: 215779 - DNA, 429 bp, Homo sapiens
aataatagagacagtctttcattcctagtgccaggacccgtctcgggtcaacgaaatctgagacagtcaaggtaacagaggcagctgttcgaatagattcattggagagtctaaggcagctctccggaccaagctgtaaagcagataagatagaaataatcactctggtaccacagcagacaggccttgtaggtactgggccgctcacagcttaatccgacttagaaagcatttttgcctctgaccttctagttgaaacaaaattagttaccagtagacttaggcgaatgctacactgcacacaggcgcataatcccaacctatataaacactaagacaattgttaacactttaagttggcctggtggaattatctccagccttctgcctgtatctggttacagcaataaattcccttctttcctagtc

SEQ ID NO: 215780 - DNA, 258 bp, Homo sapiens
ggtagatacccagtagtgggattgctggatcgaatggttgatctgcttctagttctttgagaaatcctcacactgttttccatagaggttgtgctaatttacatttccaccaacagtgtataagcattcccttttcactgcatcctcgccaacatctattgtttttttactttattttccatataaaaaggggtttatttagatgttagaatcatctagtgattcagaaagattggacatgaatccacccaggcccag

SEQ ID NO: 215781 - DNA, 444 bp, Homo sapiens
gcaaagtcacatcttacatggcgacagtcaagagaagagatcatgtgcaggggaactcccctttataaacccatcaggtttcgtgagactttttcactatcatgagagcagcatggcaaagacccgcccccatcattcagttacctcccaccaggtccctcccatgacatgtgggaattatgggagctacaatttgagatttgggtgggaacacagccaaaccatatcaatattcaagatcagctttttataaattcagggtagcaagtttttctgtgagttttggggtatagttgcaaaatactactttaaaaccaacttataaattacctgttatattaaatatgataacacaatacaccataaagtctacttgagagatagtttcgtaaaagattttatcttagatttaaagtaatctaatagtacttaaatttctaggct

SEQ ID NO: 215782 - DNA, 160 bp, Homo sapiens
tgtggcctcatgctttacagagaaaatagaagccaccaaagtgagatacctcactaattcaaagtttacagaagccgttcctcctcccacccaaggttaatcccatctcttgagttgtctcagaaaccttatgacctcaatgacccttctgtcttgggta

SEQ ID NO: 215783 - DNA, 259 bp, Homo sapiens
tctgtgtgagaggcttcaagaatcaggcttaggaacctgtaaagcacaaatttttcagagacttattttttaataataattaataaaaatataacttcattgataataggcaaatagattaaaatgtgtatattacattatcgaatgtttcctcagtctttcatataataacttcataatttttgccaaacctcaaaccacctgtaatacatttagttattatctaaaacaaattatttctttttatttcaattaattc

SEQ ID NO: 215784 - DNA, 561 bp, Homo sapiens
ctcactgcaacctccacctcctggactcaagcaatcctgccatctcaccctgccggtagctgggactataggtgtgcaccaccatacccagctaatttttgtatttttaatagagacagtctttcactatgttggccaggctggtctcaaacgcctggcctcaagtgatctgcctaccttgacctcctaaagcactaggattacagacatgagtcactgcaactggctgtcctcagcatctttatgaaaatgcattgagtaggcatcagttgggcacagtgctgagaaaggcactaacaataaaaataaggaattaaaagatttctctctggcgttataaagaaggaaatgctattaaaagaaggaaaatatgtgatgtgtgttttcatctgtattagcatagactatgtctcaaagcacatatatgcaaccggtgcctctggagagggatattgggtgggtaaagcataagatggcagggggacttcctgtatatccttttgtgtgtttcatattttgtactatgtaaatatgttccacctataacattttttagttttt

SEQ ID NO: 215785 - DNA, 534 bp, Homo sapiens
gatggagaggacagttcctccctaatccagcagagttttaaggcacacagactgatcagattccacatgggaggaaggctgggaaggatcatttacaggcagagcttcaattttaagctggaatttgaaaggagcaagaaattttacttggtcggaaagtgggtgaaaatactctgatgggaagagaggtcagagtgataggagaggagaggtttgaggcagtcagacctgggattgagcttgggaacccagtgtcctcatgtaggcctcataacgggttgttgtaaaaattaagcgaggtgaagaacctgaagcctggtaggtggccagaaagtgtcaggccttttgcaggtggtttgcttttgtggtgttctgactctcagctgaaacaggagcttgatagcagtgataataactcttacttttttcttcttcttcttcttctttcttcctttctttttttttttgagacaagttctcgctttgttctccaggctggagtgcagtggtgtgatcatggctcactgcagccgc

SEQ ID NO: 215786 - DNA, 324 bp, Homo sapiens
gtcgacctaacttttgtcatcactattaccagcattgtcatcgttatcgttatcttcgtcatcatcattaccaccgttatacctgatactgccataacaatcagaacattatgtacaggtaaaggggacttcactggggagagcaagttggcaaaatgtagcaagttgccattaagtatgttctagttttttgttaattgactgtttttataatttagtttttattcctggacactgttaagaaacactctattgtctgaggtctacagaccctttgaagtctctgggaaagtttccaaaagttaaaaaaaaaaaagtcgacgc

SEQ ID NO: 215787 - DNA, 371 bp, Homo sapiens
ttctagctaggagttgtatataggccaaattattcaaaagagtaagaaaagaaatactacttatggatatcaaattcttaaaagtgacaggttatatgaaatgtccaggaccggaaacactttagagacagaaagtagattagtagttgcctagggctcggtgtggaagtagagattaaatgtaaaaagataagagaggaatcttatcttttaagaaccgatggaaatgttctaaaactggtttatggtgctggttgtagaactcagtaaatttactgaaaatcactgaattatatagaaaatataccgcagtaagttggttttttaaatgacaaggtgatcatttggacttagcattttaattgggactg

SEQ ID NO: 215788 - DNA, 124 bp, Homo sapiens
tgagcatacgtgttacagtttgagttattttcctttagaaaccccttcaagcccttttagttatctgttgccaggctttaggggaaattttttttcatgtttgtttatttacatagtcagctga

SEQ ID NO: 215789 - DNA, 816 bp, Homo sapiens
ttgcatgattcaatttatatgaaatacctaaaataaataaatccatagagaaagaacacagattagtggttactagggaatagaggaaggggagaatgggggagaaagtgcttaattggtaagaggttttcctttggaatgatcgaagtgttttggaattagaagtggctattgcacaacactgtgaatgtactaaatgccactgaattgttcactttaaaatgattactttcatattatgtgatttttactcaataaattatataaaatgtgtaaatggtctaaacatcccaataaacagagatcttcaggctgaattaaaaaaacacccaactatatgatgcccattttaactataaaggttatatttaaattacaaaggtcatatttaaattataataaataaggttatattaaaatataaataggttaaaagcaaaacaaaaaaaaagaaaaagatataccatgctaatgctaattttaaaaagctgaagtagaccaggtgctgtggctcacgcctgtaaacctaacactttgggaggctgaggcaggagcccagtttaagaccagcctggcaacacagggagacctcgtctttataaaaaatcaaaaaattagccaggcatggtggtgtgtgcctgtggttccagctactccgaagggtgaggtgagaggatcacttgagcccagaggtcgaggctgcagtgagctgtgattgcaccactgggctcgagcctgggtgacagagcaagacccagtctgaaaaattaaaaaatactaagctggagtagatataccactatcaaagtagatttg

SEQ ID NO: 215790 - DNA, 259 bp, Homo sapiens
tttcaccacgttggccaggatggtctctatctcctgacctcatgatctgcctgccttggcctcccaaagtgctgggattacgggtgtgagccaccttgcccagccagccaccacgcctggcctcttttttttttcttttttttttgagatggagtctccctcttatcgcccaggctggagtgcagtggtgtgatcttggctcactgcaacaacattctgcctcccgggttcaagcaattctcctgcctcagcctccaga

SEQ ID NO: 215791 - DNA, 520 bp, Homo sapiens
ctcaacagtttttaaaaaatcaaaatcatatcaagatcacaatggtctgaaactctaaatcaataataagaggaactttggaaactacaaacacatggaaattaaacaacatgctcctgaatgaccactggattaaagaaaaagttaaggaaaaaatgttttaaaaatttcctgaaacaaatgaaaatggaaacgcaagacaccaaaacttacaggacacacaaaagcactgctaagagggaagtttatagcaataagcatctagatcaaaaaagcagaaagagaaaaaaagcttcctcatgctgaaaaagtgggtcgcccaaaagagggtctctagtttgtggcaaaacataatcggttttgtacagaggcttgaggaggcagtgattgatttacatagggctcaggggattgggtttaccaggtgtgccatttacatagcttgcaaaaagactggccctctgaccctagtcttttattatgcaaatgcggcctccacctggtggaggccatgatgcct

SEQ ID NO: 215792 - DNA, 473 bp, Homo sapiens
ataataaagatcagagcagaactaaattaaatagagactaaaaaatttacaaagcatcaacaaaatgaaaagttttttttcaaaaaaagataaaattgataaactgctagtgaaatggctccattttctggggtatataccctggttctttgtcacagttgagaaagaattcaagacatggacacacacaaggagtggatttaggagcggaaagtttaatagaaaaagaagaaagagaaaaaaagcttcctcatgctgaaaaagtgggtcgcccaaaagagggtctctagtttgtggcaaaacataatcggttttgtacagaggcttgaggaggcagtgattgatttacatagggctcaggggattgggtttaccaggtgtgccatttacatagcttgcaaaaagactggccctctgaccctagtcttttattatgcaaatgcggcctccacctggtggaggccatgatgcct

SEQ ID NO: 215793 - DNA, 352 bp, Homo sapiens
agaaatagcctatctcagcaggcatcgttctgctttgcttattgagccaacatttatgaagcatagacttcataccgagctcaatgcaaacagactcacctctagcaaggctcaagggaggcaacaaaagaaatagaaaacacggcccttgtcaacaaacctaggattaagttggagtggccgggcgaatatactgaggaaacattggttttcttttttaacccttttcgaagtctatttaatgtctgcctactgaatatttaattattaacaacaggagttgaccccccctggccatttttgtatgtcccacgctgggtttttccattttcagatagttaaggcaaaaaga

SEQ ID NO: 215794 - DNA, 638 bp, Homo sapiens
ttttaagacacggggtctcagtctgtcactcaggctggaatgcagtagcacaatcataactcactgcagccttgaacttctgggctcaagtgatcttcccacctcagcctcccagagctgggattgtatgtgtgaaccaccattcctggcttgatctgccttaatatgccataaatccttgcttggcatcctttcaaattcaataaacctatttacctacaaaagtagataagatcatcatgtctaccttaattgtttgcccctaatatttggatatacagcactacaaaatatttttaaaaatattgtgtccctggcattgtaacaaaaaagttttcaaaacaaagcactggatgagtccacaatattattgttaactaccttaaaaacagtcacaatatctgagaagatataaaataactgccaaagacagtccaaccaatcattcaacgtatgttaaaagaaaaaaaagcataacaagggaatcttgaatactccagtgcctgctacaccaagtgtgctctgtagactacagcatcagcagcacctaggagtttatcagaaatgaagaactgcaggtcctaactcagacctactaaacccgaaagtgcaattgaacaggctcccaaggtgatctt

SEQ ID NO: 215795 - DNA, 411 bp, Homo sapiens
tttcatgacatcatttcttatctcaagctaaattctttctctggaggaccttatctaatcctaggatgttgtatctctagctctaatctctcttctgggctccagacctgtatatcctcttgtctacaagacttttacatctgggagtcctataagtagtttaaattcaatatattcaaacctcaactcattatcaatctctgtaagatcctttttctgtgttcctgatttaaagacactgcagctcagtcattcaagtgtgtggaaacgtagaacttttgtaggctgggctgtctgtattacaagctcctgcggtataatgagtatttcttcagccacatcctttaaattttaatttaatagttctgggattggccagggaatacaaactttataatttccccaggtgct

SEQ ID NO: 215796 - DNA, 787 bp, Homo sapiens
gcgatctagaggaccccttattttccttctttattgcctacactagaggaaagacacaagtacaagaagttgctttaatttgaactgcagtacttgatgctccatgtgaagaactttaacaaactccaggctcaggaggaggccggcctgctgcagggccatcaaggaaagcacaagaaagcttgtagcagtaagaacaacaaaggaaagaaggaatgactgggggactggcagccttgttttccctttgccatttggaaggaaaaaaacctaggcttattataggaggaaaaaataataattaaaagtatgtatgatgtattatatatatacgcacacatgcacctgcatatatacatcgtactagctaatgttttcagtggtttccattttctagtgctgtagaacacaaattgtcctatattgcctcaattttaccttttttcttctctctttagaatataggaaatctgtgacatttaaaagtgaaaggaccctacaaaaaattaactcaaagtggatcatagacctcagcgtaagaactaaaactatataacaattagaagcaaacacaggagtaaatctgtatgaccttgggttaggcagtgatttcttagatacaacaccaaaccataggtgacaaaagaaaaaaatggataaactggacttcataaaaattaaaaactcttgtgcttcaaaggacaccatcaagaaagtgaaaatgcagtccaaagaaagggagaagatatttccaaataatttatctggtaagggacttgaatctaga

SEQ ID NO: 215797 - DNA, 1062 bp, Homo sapiens
acgcccggccctgcccccagcagaggcggaagcggtgtcgctctgaggggtcgccagtcgccgcaggcgcttcagcccagcggcgggccttggcccttggctgcctactcctaccgccccagccccgggcggccctgggcctgctgcgggcgcggcgctgcccgaccagagcttcctgtggaacgtcttccagagggtcgataaagacaggagtggagtgatatcagacaccgagcttcagcaagctctctccaacggtgagtgggccagtgggaactgggtctccggaccaagaagccgtgagcctgccctgttcacagtggataactttctgaagttgtttttccaaggacaaaggaatcattaggacaaattgttaatactgcttcatggtggagatgcttctggtttattttgtggctaccgctgttactgcttggagtgcctcaccgagccaggcacgtggactccctttaatccagtgactgtcaggtcgatcatatactacactgaaggctggttacgctcttatgtgcaatagaacctcaaacacatcgtaacacacctttggagaatccttacaagaacaccaagttaacagttatctctgaccacactacctcagcaaaaaaccaggaagaaaaaatattcttcaacccttttcagggacagaaagcatcatttcaaaagtccaagaagggaagcaaaacttctgacctgagacatcgaagcagataaaaagccgctacacaaaatgtatcgctacaactagagggcagtcttgcctttcttccattcaattattcagtttctcatgttcctaagtgccagcccagaaccatggaatgtgaagaaacacaaaactcactcctctgcatcagtgaattgattgtgtggtggggatgtaagtctgcatgtgactgacagttccccaaagtggtgccaagtcaatctaaactagagagaatttctggccaggccaagcagagatttcatggatgaagtctcccaaagactgatttcctaaacattaaacatcactggttttccaaaaaaggtttt

SEQ ID NO: 215798 - DNA, 949 bp, Homo sapiens
acgcccggccctgcccccagcagaggcggaagcggtgtcgctctgaggggtcgccagtcgccgcaggcgcttcagcccagcggcgggccttggcccttggctgcctactcctaccgccccagccccgggcggccctgggcctgctgcgggcgcggcgctgcccgaccagagcttcctgtggaacgtcttccagagggtcgataaagacaggagtggagtgatatcagacaccgagcttcagcaagctctctccaacggacaaaggaatcattaggacaaattgttaatactgcttcatggtggagatgcttctggtttattttgtggctaccgctgttactgcttggagtgcctcaccgagccaggatgaagccccacccgcccttcaggatgccagccttggcaacatcgtgagaccctgtttctacaaaaactaaacaagtgtagtggtgcacgcctgtattcccagctacttgggaggctgagatgggaagatcacttgagcctgggaggttgaggctgcattgagctgagatcaagccacggcactccagcctgggagacagagcgaaaccccatctcaaaaaaacaaagaaagtggatgcgtgctgctcctgccattggatcatcgcagcatttttcttttctctgatatgcgcctttttcctcatcgtgggggctcatgttttcgtaattccctctcgctactagattgtgagctgtgtgaaggaagaacggtgacggtgttgtcaggcccaaacttgtcttggttaccaatttacccttctttctctcgatttttttgaacaaaggggagggggccctgcttccgggggggaacctaggcagggcccccctataatattatgggggagaatgaggacaaggaaggctaaaaaggcacagggggggagaacaacatcaacacatattgagagaagcagggcgt

SEQ ID NO: 215799 - DNA, 799 bp, Homo sapiens
  misc_feature (796)..(796): n is a, c, g, or t
tcccaccccccgcggttcctgccccccaaagctcgaccccggtgtggtgcgcaggcgtagtctgcgcggggactggcgggactgcgcggaggcgactacaggcatggcggtctgggtcctgtcgcgcctgctgagcgctccgcgcctggcgctggccaaggcggtcctgaggcacgtgaatggccaggatcagattgtgcccggcctgtacgcctgtggggaggccgcctgtgcctcggtacatggtgccaatcggctcggggcaaactcgctcttggacttggttgtctttggtcaggcatgtgccctgagcatcgaagagtcatgcaggcctggagataaagtccctccaattaaaccaaacgctggggaagaatctgtcatgaatcttgacaaattgagatttgctgatggaagcataagaacatgagaactgcgactcagcatgcagaagtgccgctgggttagggtctccacaaccgagctggtctcagcaagtggcgcccacacatgggggctcgaatccaggtcgaagggtcaccggagcgacagaaaacttggaactaagctggaggacaccgagtactcttatgcagtccccatgaggttatgcttatgtttctccaggactgaaccatcaagacacctgaaaccttatcatgagcgaatgctgaggaagagattccgggaggatcccgaggacccccccagttgcagcatgtcaagactgatgctgaggaggacccaattgtcacgaggcaaaacccgtcaaaaaaggcatccactgaggtcagantca

SEQ ID NO: 215800 - DNA, 886 bp, Homo sapiens
cggacgcgtgggtcgacccacgcgtccggttcatagttgagttgtatgtacaggcacacaaaatttgtccttggatagacacatatcaatccacttccttctcctctctgaatttctttatttaaaaaaaaaagtagagatggagtctcactgtcttgcccaggctggtgtcaaactcctaggctcaagtgatcctcccacctctactaatatgaattattaggctatgctaatatgaatttgtatactaatatgattgaaattagtttgacttctataataattgttctcccagattgggcttctgttttgatagtagaactaaattattaggctatttcaagaaattaatatattactggtagaaaaactgaagctacaaaatggcctggtttctcacttcagttaaatttgtgcttctgagtgcttgtattctaggtgaaaccgcactgagaaggtatttgtggcctatacgctgattcattgattagacttctttgcacaggagagctgctaaaaattactgcggtgaacaggtacgaagaaaaagactgttctctgcccttctttttgcaataaaatgttacaaactaaaacaaaccaaacaaccccaacaaaccacctacaaccacaaaaaaaagagggggccgcccaaaaaaaccccctcaaggcgccccatatcatgcatataccccggactgagagcaaacaagaccatgcccctcatgacctgaaggtctacataacaccccaagtccaccgccccgaaggttataaaaacggtacgcagaagcgggcaaaacgaccgtaacacaggagaccactgtgggacaaggacacccacacctgaggggcggaaaacaacatggggcacgacgactcagca

SEQ ID NO: 215801 - DNA, 775 bp, Homo sapiens
  misc_feature (772)..(772): n is a, c, g, or t
tcccaccccccgcggttcctgccccccaaagctcgaccccggtgtggtgcgcaggcgtagtctgcgcggggactggcgggactgcgcggaggcgactacaggcatggcggtctgggtcctgtcgcgcctgctgagcgctccgcgcctggcgctggccaaggcggtcctgaggcacgtgaatggccaggatcagattgtgcccggcctgtacgcctgtggggaggccgcctgtgcctcggtacatggtgccaatcggctcggggcaaactcgctcttggacttggttgtctttggtcaggcatgtgccctgagcatcgaagagtcatgcaggcctggagataaagtccctccaattaaaccaaacgctggggaagaatctgtcatgaatcttgacaaattgagatttgctgatggaagcataagaacatgagaactgcgactcagcatgcagaagtgccgctgggttagggtctccacaaccgagctggtctcagcaagtggcgcccacacatgggggctcgaatccaggtcgaagggtcaccggagcgacagaaaacttggaactaagctggaggacaccgagtactcttatgcagtccccatgactgaaccatcaagacacctgaaaccttatcatgagcgaatgctgaggaagagattccgggaggatcccgaggacccccccagttgcagcatgtcaagactgatgctgaggaggacccaattgtcacgaggcaaaacccgtcaaaaaaggcatccactgaggtcagantca

SEQ ID NO: 215802 - DNA, 1190 bp, Homo sapiens
acgcccggccctgcccccagcagaggcggaagcggtgtcgctctgaggggtcgccagtcgccgcaggcgcttcagcccagcggcgggccttggcccttggctgcctactcctaccgccccagccccgggcggccctgggcctgctgcgggcgcggcgctgcccgaccagagcttcctgtggaacgtcttccagagggtcgataaagacaggagtggagtgatatcagacaccgagcttcagcaagctctctccaacggatgaagccccacccgcccttcaggatgccagccttggcaacatcgtgagaccctgtttctacaaaaactaaacaagtgtagtggtgcacgcctgtattcccagctacttgggaggctgagatgggaagatcacttgagcctgggaggttgaggctgcattgagctgagatcaagccacggcactccagcctgggagacagagcgaaaccccatctcaaaaaaacaaagaaagtggatgcgtgctgctcctgccattggatcatcgcagcatttttcttttctctgatatgcgcctttttcctcatcgtgggggctcatgttttcgtaattccctctcgctactagattgtgagctgtgtgaaggaaggttcatagttgagttgtatgtacaggcacacaaaatttgtccttggatagacacatatcaatccacttccttctcctctctgaatttctttatttaaaaaaaaaagtagagatggagtctcactgtcttgcccaggctggtgtcaaactcctaggctcaagtgatcctcccacctctactaatatgaattattaggctatgctaatatgaatttgtatactaatatgattgaaattagtttgacttctataataattgttctcccagattgggcttctgttttgatagtagaactaaattattaggctatttcaagaaattaatatattactggtagaaaaactgaagctacaaaatggcctggtttctcacttcagttaaatttgtgcttctgagtgcttgtattctaggtgaaaccgcactgagaaggtatttgtggcctatacgctgattcattgattagacttctttgcacaggagagctgctaaaaattactgcggtgaacaggtacgaagaaaaagactgttctctgcccttctttttgcaataaaatgttacaaacta

SEQ ID NO: 215803 - DNA, 1663 bp, Homo sapiens
acgcccggccctgcccccagcagaggcggaagcggtgtcgctctgaggggtcgccagtcgccgcaggcgcttcagcccagcggcgggccttggcccttggctgcctactcctaccgccccagccccgggcggccctgggcctgctgcgggcgcggcgctgcccgaccagagcttcctgtggaacgtcttccagagggtcgataaagacaggagtggagtgatatcagacaccgagcttcagcaagctctctccaacggtgagtgggccagtgggaactgggtctccggaccaagaagccgtgagcctgccctgttcacagtggataactttctgaagttgtttttccaaggacaaaggaatcattaggacaaattgttaatactgcttcatggtggagatgcttctggtttattttgtggctaccgctgttactgcttggagtgcctcaccgagccaggatgaagccccacccgcccttcaggatgccagccttggcaacatcgtgagaccctgtttctacaaaaactaaacaagtgtagtggtgcacgcctgtattcccagctacttgggaggctgagatgggaagatcacttgagcctgggaggttgaggctgcattgagctgagatcaagccacggcactccagcctgggagacagagcgaaaccccatctcaaaaaaacaaagaaagtggatgcgtgctgctcctgccattggatcatcgcagcatttttcttttctctgatatgcgcctttttcctcatcgtgggggctcatgttttcgtaattccctctcgctactagattgtgagctgtgtgaaggaaggttcatagttgagttgtatgtacaggcacacaaaatttgtccttggatagacacatatcaatccacttccttctcctctctgaatttctttatttaaaaaaaaaagtagagatggagtctcactgtcttgcccaggctggtgtcaaactcctaggctcaagtgatcctcccacctctactaatatgaattattaggctatgctaatatgaatttgtatactaatatgattgaaattagtttgacttctataataattgttctcccagattgggcttctgttttgatagtagaactaaattattaggctatttcaagaaattaatatattactggtagaaaaactgaagctacaaaatggcctggtttctcacttcagttaaatttgtgcttctgagtgcttgtattctaggtgaaaccgcactgagaaggtatttgtggcctatacgctgattcattgattagacttctttgcacaggagagctgctaaaaattactgcggtgaacaggtacgaagaaaaagactgttctctgcccttctttttgcaataaaatgttacaaactatcttgagtttgatcccttttcgggtgtttgggttttttttaacattcacatatttcttggaattataagaaattaactttgtgcttctgaagtgggtttgccttaatataacactgatgtatttgtaaggggcatttttaaagctgtactttaaaaaataataattcttacattcatttgaaggttttttgtttgtttgtttgtttgtttgtttttgagctgaaggcttgtccagcctgggggacagtgagactccatctcaaaaaaaaaaa

SEQ ID NO: 215804 - DNA, 1620 bp, Homo sapiens
acgcccggccctgcccccagcagaggcggaagcggtgtcgctctgaggggtcgccagtcgccgcaggcgcttcagcccagcggcgggccttggcccttggctgcctactcctaccgccccagccccgggcggccctgggcctgctgcgggcgcggcgctgcccgaccagagcttcctgtggaacgtcttccagagggtcgataaagacaggagtggagtgatatcagacaccgagcttcagcaagctctctccaacggatgaagctccacccgcccttcaggatgcaaagccctcctctataaagtgcatgcggggccagatgcagtggctcacatctgacctcccaacactttgggaggccgaggcagggggatcgcttgagcccaggagtttgagaccagcctggacaacattgatgaagccccacccgcccttcaggatgccagccttggcaacatcgtgagaccctgtttctacaaaaactaaacaagtgtagtggtgcacgcctgtattcccagctacttgggaggctgagatgggaagatcacttgagcctgggaggttgaggctgcattgagctgagatcaagccacggcactccagcctgggagacagagcgaaaccccatctcaaaaaaacaaagaaagtggatgcgtgctgctcctgccattggatcatcgcagcatttttcttttctctgatatgcgcctttttcctcatcgtgggggctcatgttttcgtaattccctctcgctactagattgtgagctgtgtgaaggaaggttcatagttgagttgtatgtacaggcacacaaaatttgtccttggatagacacatatcaatccacttccttctcctctctgaatttctttatttaaaaaaaaaagtagagatggagtctcactgtcttgcccaggctggtgtcaaactcctaggctcaagtgatcctcccacctctactaatatgaattattaggctatgctaatatgaatttgtatactaatatgattgaaattagtttgacttctataataattgttctcccagattgggcttctgttttgatagtagaactaaattattaggctatttcaagaaattaatatattactggtagaaaaactgaagctacaaaatggcctggtttctcacttcagttaaatttgtgcttctgagtgcttgtattctaggtgaaaccgcactgagaaggtatttgtggcctatacgctgattcattgattagacttctttgcacaggagagctgctaaaaattactgcggtgaacaggtacgaagaaaaagactgttctctgcccttctttttgcaataaaatgttacaaactatcttgagtttgatcccttttcgggtgtttgggttttttttaacattcacatatttcttggaattataagaaattaactttgtgcttctgaagtgggtttgccttaatataacactgatgtatttgtaaggggcatttttaaagctgtactttaaaaaataataattcttacattcatttgaaggttttttgtttgtttgtttgtttgtttgtttttgagctgaaggcttgtccagcctgggggacagtgagactccatctcaaaaaaaaaaa

SEQ ID NO: 215805 - DNA, 1135 bp, Homo sapiens
tacttgttctcggtctactagtctctcggctctaccttgtctctcggctctaccttgtctctcggctctaccttgtctcccaggctgcattgagctgagatcaagccacggcactccagcctgggagacagagcgaaaccccatctcaaaaaaacaaagaaagtggatgcgtgctgctcctgccattggatcatcgcagcatttttcttttctctgatatgcgcctttttcctcatcgtgggggctcatgttttcgtaattccctctcgctactagattgtgagctgtgtgaaggaaggttcatagttgagttgtatgtacaggcacacaaaatttgtccttggatagacacatatcaatccacttccttctcctctctgaatttctttatttaaaaaaaaaagtagagatggagtctcactgtcttgcccaggctggtgtcaaactcctaggctcaagtgatcctcccacctctactaatatgaattattaggctatgctaatatgaatttgtatactaatatgattgaaattagtttgacttctataataattgttctcccagattgggcttctgttttgatagtagaactaaattattaggctatttcaagaaattaatatattactggtagaaaaactgaagctacaaaatggcctggtttctcacttcagttaaatttgtgcttctgagtgcttgtattctaggtgaaaccgcactgagaaggtatttgtggcctatacgctgattcattgattagacttctttgcacaggagagctgctaaaaattactgcggtgaacaggtacgaagaaaaagactgttctctgcccttctttttgcaataaaatgttacaaactatcttgagtttgatcccttttcgggtgtttgggttttttttaacattcacatatttcttggaattataagaaattaactttgtgcttctgaagtgggtttgccttaatataacactgatgtatttgtaaggggcatttttaaagctgtactttaaaaaataataattcttacattcatttgaaggttttttgtttgtttgtttgtttgtttgtttttgagctgaaggcttgtccagcctgggggacagtgagactccatctcaaaaaaaaaaa

SEQ ID NO: 215806 - DNA, 1218 bp, Homo sapiens
acgcccggccctgcccccagcagaggcggaagcggtgtcgctctgaggggtcgccagtcgccgcaggcgcttcagcccagcggcgggccttggcccttggctgcctactcctaccgccccagccccgggcggccctgggcctgctgcgggcgcggcgctgcccgaccagagcttcctgtggaacgtcttccagagggtcgataaagacaggagtggagtgatatcagacaccgagcttcagcaagctctctccaacggcacgtggactccctttaatccagtgactgtcaggtcgatcatatactacactgaaggctggttacgctcttatgtgcaatagaacctcaaacacatcgtaacacacctttggagaatccttacaagaacaccaagttaacagttatctctgaccacactacctcagcaaaaaaccaggaagaaaaaatattcttcaacccttttcagggacagaaagcatcatttcaaaagtccaagaagggaaggtaagaatttcagaagtgaaagttatcatgaaaggctataaaagcttgagatgagtctgaaaaacaaatggaaaatgagtcacttcagggcctctcccagcctcaaagccaattaattattacattagtcagagtaattttaagccttccaatccactcaccctagccacaggcaacagtagcctctccaagtgttaagggtttttttcccaagcctgcaggcggatgagctttttacatggcagccccttaggattggatgtggacctgccctgtctttcaccaagaagcaagcactgcgcagatcactgaatcataaaaaccacctgctcttaccagcctcctcttcctctacagcaaaacttctgacctgagacatcgaagcagataaaaagccgctacacaaaatgtatcgctacaactagagggcagtcttgcctttcttccattcaattattcagtttctcatgttcctaagtgccagcccagaaccatggaatgtgaagaaacacaaaactcactcctctgcatcagtgaattgattgtgtggtggggatgtaagtctgcatgtgactgacagttccccaaagtggtgccaagtcaatctaaactagagagaatttctggccaggccaagcagagatttcatggatgaagtctcccaaagactgatttcctaaacattaaacatcactggttttccaaaaaaggtttt

SEQ ID NO: 215807 - DNA, 507 bp, Homo sapiens
cttcttagcagctctcctgtgcaaagaagtctaatcaatgaatcagcgtataggccacaaataccttctcagtgcggtttcacctagaatacaagcactcagaagcacaaatttaactgaagtgagaaaccaggccattttgtacaggagagctgctaaaaattactgcggtgaacaggtacgaagaaaaagactgttctctgcccttctttttgcaataaaatgttacaaactatcttgagtttgatcccttttcgggtgtttgggttttttttaacattcacatatttcttggaattataagaaattaactttgtgcttctgaagtgggtttgccttaatataacactgatgtatttgtaaggggcatttttaaagctgtactttaaaaaataataattcttacattcatttgaaggttttttgtttgtttgtttgtttgtttgtttttgagctgaaggcttgtccagcctgggggacagtgagactccatctcaaaaaaaaaaa

SEQ ID NO: 215808 - DNA, 992 bp, Homo sapiens
  misc_feature (989)..(989): n is a, c, g, or t
gttgtctcattacggaaggatgtcgtggagagggaggcattctcattaacagtcaaggcgaaaggtttactggagcgatacgcccctgtcgcgaaggacctggcgtctagcagatgtggtgtctcggtcgatgactctggagatccgacggaaggacgaggctgtggccctgcagaaagatcacgtctacctgcagctgtgccacctacctccagagcagctggccatgcgcctgccttggcactttcagagcacagccatgatcttcgctggcgtggacgtcacgaaggagccgatccctgtcctccccaccgtgcattataacatgggcggcattcccaccaactacaaggggcgtcctgaggcacgtgaatggccaggatcagattgtgcccggcctgtacgcctgtggggaggccgcctgtgcctcggtacatggtgccaatcggctcggggcaaactcgctcttggacttggttgtctttggtcaggcatgtgccctgagcatcgaagagtcatgcaggcctggagataaagtccctccaattaaaccaaacgctggggaagaatctgtcatgaatcttgacaaattgagatttgctgatggaagcataagaacatgagaactgcgactcagcatgcagaagtgccgctgggttagggtctccacaaccgagctggtctcagcaagtggcgcccacacatgggggctcgaatccaggtcgaagggtcaccggagcgacagaaaacttggaactaagctggaggacaccgagtactcttatgcagtccccatgaggttatgcttatgtttctccaggactgaaccatcaagacacctgaaaccttatcatgagcgaatgctgaggaagagattccgggaggatcccgaggacccccccagttgcagcatgtcaagactgatgctgaggaggacccaattgtcacgaggcaaaacccgtcaaaaaaggcatccactgaggtcagantca

SEQ ID NO: 215809 - DNA, 957 bp, Homo sapiens
  misc_feature (940)..(940): n is a, c, g, or t
  misc_feature (943)..(943): n is a, c, g, or t
acgcccggccctgcccccagcagaggcggaagcggtgtcgctctgaggggtcgccagtcgccgcaggcgcttcagcccagcggcgggccttggcccttggctgcctactcctaccgccccagccccgggcggccctgggcctgctgcgggcgcggcgctgcccgaccagagcttcctgtggaacgtcttccagagggtcgataaagacaggagtggagtgatatcagacaccgagcttcagcaagctctctccaacggtgagtgggccagtgggaactgggtctccggaccaagaagccgtgagcctgccctgttcacagtggataactttctgaagttgtttttccaaggacaaaggaatcattaggacaaattgttaatactgcttcatggtggagatgcttctggtttattttgtggctaccgctgttactgcttggagtgcctcaccgagccaggcacgtggactccctttaatccagtgactgtcaggtcgatcatatgtcctgaggcacgtgaatggccaggatcagattgtgcccggcctgtacgcctgtggggaggccgcctgtgcctcggtacatggtgccaatcggctcggggcaaactcgctcttggacttggttgtctttggtcaggcatgtgccctgagcatcgaagagtcatgcaggcctggagataaagtccctccaattaaaccaaacgctggggaagaatctgtcatgaatcttgacaaattgagatttgctgatggaagcataagaacatgagaactgcgactcagcatgcagaagtgccgctgggttagggtctccacaaccgagctggtctcagcaagtggcgcccacacatgggggctcgaatccaggtcgaagggtcaccggagcggcggaagggtatcctaagagtcgagagcatactgatgtatcagtcgataganagncaataaatatattc

SEQ ID NO: 215810 - DNA, 128 bp, Homo sapiens
ctttaatccagtgactgtcaggtcgatcatatgtaagtatcggcagacggaccaacctgggctgctttgtatccgacccgcttgggtacccgcttgtgtttcctttgtctgtgggtccgtatcacttt

SEQ ID NO: 215811 - DNA, 507 bp, Homo sapiens
ttaaccctgttgctcaggctggagggcaagtggtgccatctccactcactgcagcctcgacctcccaggctccactgatcttcccacctcagcctcctgagtagctgggactacaggtgtgcaccgccacgactcgctaatttttgtattttttgtagagacggggttttgctgtgttgctcaggctggtcactcgatctgcccacctgggcctcgcagagtgctggggttacaggtatgagccaccacgcccagcccactggtttcctttacacccgttttgttccccagcagtccttatgagggcacctgaaataaggaacctcctccccgacttgagagcagcaaagccttcagagggaactaagttattaaaacccaccccacacaaaatgcttctaaacgccttggctgacttaatccttgcagtgtgctgaggttaagtatgattatccatctcctgtgaacaggaagactgaggctcagagcttaagtgatttgcccacg

SEQ ID NO: 215812 - DNA, 351 bp, Homo sapiens
tcgaggtcgcgccactgcactccagcctggtgacagaacgagactccgtctcaaaaaaaaagaaaaagaaaaaggaaaaaaaaacaagaccttaggtgaaagcgactcacaatctggttggggaaagtggagaaaacagacatgtcttaagcatctgaagtgcaggtagaatcaggtaagttctctggtacaaatatatttaaatgtatggctgctgcgatggttaattttgtttgtcaacttgacggcatcatgaggtgctcagatacatggttaagcattatttctgggcgtgtctgtaagggtgtttttggatgagattagcaattgaacctttaaaccaatttctta

SEQ ID NO: 215813 - DNA, 1064 bp, Homo sapiens
  misc_feature (653)..(653): n is a, c, g, or t
  misc_feature (655)..(655): n is a, c, g, or t
  misc_feature (1064)..(1064): n is a, c, g, or t
tcccaccccccgcggttcctgccccccaaagctcgaccccggtgtggtgcgcaggcgtagtctgcgcggggactggcgggactgcgcggaggcgactacaggcatggcggtctgggtcctgtcgcgcctgctgagcgctccgcgcctggcgctggccaaggcggtcctgaggcacgtgaatggccaggatcagattgtgcccggcctgtacgcctgtggggaggccgcctgtgcctcggtacatggtgccaatcggctcggggcaaactcgctcttggacttggttgtctttggtcaggcatgtgccctgagcatcgaagagtcatgcaggcctggagataaagtccctccaattaaaccaaacgctggggaagaatctgtcatgaatcttgacaaattgagatttgctgatggaagcataagaacatgagaactgcgactcagcatgcagaagtgccgctgggttagggtctccacaaccgagctggtctcagcaagtggcgcccacacatgggggctcgaatccaggtcgaagggtcaccggagcgacagaaaacttggaactaagctggaggacaccgagtactcttatgcagtccccatgatacagcagtacctggaaagaagctaaagctattatccagcgatgcccnanttgccaaatggtacattcctcatcttttacaggaggagttaatcctcgaggattggaacctaattctcaagctctagctaaattttctctatacggaatattaaacacattactgttatccatataattctgaaggacagccatagtggaagaatgaatctctcctggagacagcagtgcagaagcaaaggggaacaggattgaccatcagaacctgaaacttatcagagcaatgtggggaagagatccggaggatccgggacacccagtgagctgtagatgatgcggggcccaagtgggaaccgaacacccatgagtaaaagtgacagggaaacgtgtggcgcgaagccgaaagttttaagagagctggtgcagtctcgggactaaagcggtcagcgtacacccaatn

SEQ ID NO: 215814 - DNA, 914 bp, Homo sapiens
  misc_feature (911)..(911): n is a, c, g, or t
acgcccggccctgcccccagcagaggcggaagcggtgtcgctctgaggggtcgccagtcgccgcaggcgcttcagcccagcggcgggccttggcccttggctgcctactcctaccgccccagccccgggcggccctgggcctgctgcgggcgcggcgctgcccgaccagagcttcctgtggaacgtcttccagagggtcgataaagacaggagtggagtgatatcagacaccgagcttcagcaagctctctccaacggcacgtggactccctttaatccagtgactgtcaggtcgatcatatgtcctgaggcacgtgaatggccaggatcagattgtgcccggcctgtacgcctgtggggaggccgcctgtgcctcggtacatggtgccaatcggctcggggcaaactcgctcttggacttggttgtctttggtcaggcatgtgccctgagcatcgaagagtcatgcaggcctggagataaagtccctccaattaaaccaaacgctggggaagaatctgtcatgaatcttgacaaattgagatttgctgatggaagcataagaacatgagaactgcgactcagcatgcagaagtgccgctgggttagggtctccacaaccgagctggtctcagcaagtggcgcccacacatgggggctcgaatccaggtcgaagggtcaccggagcgacagaaaacttggaactaagctggaggacaccgagtactcttatgcagtccccatgactgaaccatcaagacacctgaaaccttatcatgagcgaatgctgaggaagagattccgggaggatcccgaggacccccccagttgcagcatgtcaagactgatgctgaggaggacccaattgtcacgaggcaaaacccgtcaaaaaaggcatccactgaggtcagantca

SEQ ID NO: 215815 - DNA, 1462 bp, Homo sapiens
acgcccggccctgcccccagcagaggcggaagcggtgtcgctctgaggggtcgccagtcgccgcaggcgcttcagcccagcggcgggccttggcccttggctgcctactcctaccgccccagccccgggcggccctgggcctgctgcgggcgcggcgctgcccgaccagagcttcctgtggaacgtcttccagagggtcgataaagacaggagtggagtgatatcagacaccgagcttcagcaagctctctccaacggatgaagccccacccgcccttcaggatgccagccttggcaacatcgtgagaccctgtttctacaaaaactaaacaagtgtagtggtgcacgcctgtattcccagctacttgggaggctgagatgggaagatcacttgagcctgggaggttgaggctgcattgagctgagatcaagccacggcactccagcctgggagacagagcgaaaccccatctcaaaaaaacaaagaaagtggatgcgtgctgctcctgccattggatcatcgcagcatttttcttttctctgatatgcgcctttttcctcatcgtgggggctcatgttttcgtaattccctctcgctactagattgtgagctgtgtgaaggaaggttcatagttgagttgtatgtacaggcacacaaaatttgtccttggatagacacatatcaatccacttccttctcctctctgaatttctttatttaaaaaaaaaagtagagatggagtctcactgtcttgcccaggctggtgtcaaactcctaggctcaagtgatcctcccacctctactaatatgaattattaggctatgctaatatgaatttgtatactaatatgattgaaattagtttgacttctataataattgttctcccagattgggcttctgttttgatagtagaactaaattattaggctatttcaagaaattaatatattactggtagaaaaactgaagctacaaaatggcctggtttctcacttcagttaaatttgtgcttctgagtgcttgtattctaggtgaaaccgcactgagaaggtatttgtggcctatacgctgattcattgattagacttctttgcacaggagagctgctaaaaattactgcggtgaacaggtacgaagaaaaagactgttctctgcccttctttttgcaataaaatgttacaaactatcttgagtttgatcccttttcgggtgtttgggttttttttaacattcacatatttcttggaattataagaaattaactttgtgcttctgaagtgggtttgccttaatataacactgatgtatttgtaaggggcatttttaaagctgtactttaaaaaataataattcttacattcatttgaaggttttttgtttgtttgtttgtttgtttgtttttgagctgaaggcttgtccagcctgggggacagtgagactccatctcaaaaaaaaaaa

SEQ ID NO: 215816 - DNA, 1728 bp, Homo sapiens
acgcccggccctgcccccagcagaggcggaagcggtgtcgctctgaggggtcgccagtcgccgcaggcgcttcagcccagcggcgggccttggcccttggctgcctactcctaccgccccagccccgggcggccctgggcctgctgcgggcgcggcgctgcccgaccagagcttcctgtggaacgtcttccagagggtcgataaagacaggagtggagtgatatcagacaccgagcttcagcaagctctctccaacggacaaaggaatcattaggacaaattgttaatactgcttcatggtggagatgcttctggtttattttgtggctaccgctgttactgcttggagtgcctcaccgagccaggatgaagctccacccgcccttcaggatgcaaagccctcctctataaagtgcatgcggggccagatgcagtggctcacatctgacctcccaacactttgggaggccgaggcagggggatcgcttgagcccaggagtttgagaccagcctggacaacattgatgaagccccacccgcccttcaggatgccagccttggcaacatcgtgagaccctgtttctacaaaaactaaacaagtgtagtggtgcacgcctgtattcccagctacttgggaggctgagatgggaagatcacttgagcctgggaggttgaggctgcattgagctgagatcaagccacggcactccagcctgggagacagagcgaaaccccatctcaaaaaaacaaagaaagtggatgcgtgctgctcctgccattggatcatcgcagcatttttcttttctctgatatgcgcctttttcctcatcgtgggggctcatgttttcgtaattccctctcgctactagattgtgagctgtgtgaaggaaggttcatagttgagttgtatgtacaggcacacaaaatttgtccttggatagacacatatcaatccacttccttctcctctctgaatttctttatttaaaaaaaaaagtagagatggagtctcactgtcttgcccaggctggtgtcaaactcctaggctcaagtgatcctcccacctctactaatatgaattattaggctatgctaatatgaatttgtatactaatatgattgaaattagtttgacttctataataattgttctcccagattgggcttctgttttgatagtagaactaaattattaggctatttcaagaaattaatatattactggtagaaaaactgaagctacaaaatggcctggtttctcacttcagttaaatttgtgcttctgagtgcttgtattctaggtgaaaccgcactgagaaggtatttgtggcctatacgctgattcattgattagacttctttgcacaggagagctgctaaaaattactgcggtgaacaggtacgaagaaaaagactgttctctgcccttctttttgcaataaaatgttacaaactatcttgagtttgatcccttttcgggtgtttgggttttttttaacattcacatatttcttggaattataagaaattaactttgtgcttctgaagtgggtttgccttaatataacactgatgtatttgtaaggggcatttttaaagctgtactttaaaaaataataattcttacattcatttgaaggttttttgtttgtttgtttgtttgtttgtttttgagctgaaggcttgtccagcctgggggacagtgagactccatctcaaaaaaaaaaa

SEQ ID NO: 215817 - DNA, 1570 bp, Homo sapiens
acgcccggccctgcccccagcagaggcggaagcggtgtcgctctgaggggtcgccagtcgccgcaggcgcttcagcccagcggcgggccttggcccttggctgcctactcctaccgccccagccccgggcggccctgggcctgctgcgggcgcggcgctgcccgaccagagcttcctgtggaacgtcttccagagggtcgataaagacaggagtggagtgatatcagacaccgagcttcagcaagctctctccaacggacaaaggaatcattaggacaaattgttaatactgcttcatggtggagatgcttctggtttattttgtggctaccgctgttactgcttggagtgcctcaccgagccaggatgaagccccacccgcccttcaggatgccagccttggcaacatcgtgagaccctgtttctacaaaaactaaacaagtgtagtggtgcacgcctgtattcccagctacttgggaggctgagatgggaagatcacttgagcctgggaggttgaggctgcattgagctgagatcaagccacggcactccagcctgggagacagagcgaaaccccatctcaaaaaaacaaagaaagtggatgcgtgctgctcctgccattggatcatcgcagcatttttcttttctctgatatgcgcctttttcctcatcgtgggggctcatgttttcgtaattccctctcgctactagattgtgagctgtgtgaaggaaggttcatagttgagttgtatgtacaggcacacaaaatttgtccttggatagacacatatcaatccacttccttctcctctctgaatttctttatttaaaaaaaaaagtagagatggagtctcactgtcttgcccaggctggtgtcaaactcctaggctcaagtgatcctcccacctctactaatatgaattattaggctatgctaatatgaatttgtatactaatatgattgaaattagtttgacttctataataattgttctcccagattgggcttctgttttgatagtagaactaaattattaggctatttcaagaaattaatatattactggtagaaaaactgaagctacaaaatggcctggtttctcacttcagttaaatttgtgcttctgagtgcttgtattctaggtgaaaccgcactgagaaggtatttgtggcctatacgctgattcattgattagacttctttgcacaggagagctgctaaaaattactgcggtgaacaggtacgaagaaaaagactgttctctgcccttctttttgcaataaaatgttacaaactatcttgagtttgatcccttttcgggtgtttgggttttttttaacattcacatatttcttggaattataagaaattaactttgtgcttctgaagtgggtttgccttaatataacactgatgtatttgtaaggggcatttttaaagctgtactttaaaaaataataattcttacattcatttgaaggttttttgtttgtttgtttgtttgtttgtttttgagctgaaggcttgtccagcctgggggacagtgagactccatctcaaaaaaaaaaa

SEQ ID NO: 215818 - DNA, 1209 bp, Homo sapiens
  misc_feature (1206)..(1206): n is a, c, g, or t
gctcaggctggagggcaagtggtgccatctccactcactgcagcctcgacctcccaggctccactgatcttcccacctcagcctcctgagtagctgggactacagcactgaggccctacgggattcaaagaagaaaaaaactagaccagagccgggcatggtggcgggcacctgtagtcccagctactcgggaggctgaggcaggagaatcgcttgaacctgggaggtgaaggttgcagtgagtcgaggtcgcgccactgcactccagcctggtgacagaacgagactccgtctcaaaaaaaaagaaaaagaaaaaggaaaaaaaaacaagaccttaggtgaaagcgactcacaatctggttggggaaagtggagaaaacagacatgtcttaagcatctgaagtgcaggtagaatcagagttaaatggattaagggcggtgcaagatgtgctttgttaaacagatgcttgaaggcagcactctccttaagagtcatcaccactccctaatctcaagtacccagggacacaaaaactgcggaaggccacaggcacctctgcctaggaaagccaggtcctgaggcacgtgaatggccaggatcagattgtgcccggcctgtacgcctgtggggaggccgcctgtgcctcggtacatggtgccaatcggctcggggcaaactcgctcttggacttggttgtctttggtcaggcatgtgccctgagcatcgaagagtcatgcaggcctggagataaagtccctccaattaaaccaaacgctggggaagaatctgtcatgaatcttgacaaattgagatttgctgatggaagcataagaacatgagaactgcgactcagcatgcagaagtgccgctgggttagggtctccacaaccgagctggtctcagcaagtggcgcccacacatgggggctcgaatccaggtcgaagggtcaccggagcgacagaaaacttggaactaagctggaggacaccgagtactcttatgcagtccccatgaggttatgcttatgtttctccaggactgaaccatcaagacacctgaaaccttatcatgagcgaatgctgaggaagagattccgggaggatcccgaggacccccccagttgcagcatgtcaagactgatgctgaggaggacccaattgtcacgaggcaaaacccgtcaaaaaaggcatccactgaggtcagantca

SEQ ID NO: 215819 - DNA, 450 bp, Homo sapiens
ccaggagcagctgcctctaggacacgtgttcccctgggccagaagaactatgtgaggaacccatggtgcatgccatgacaaccctcctttagggcctcttgaggccacagtggtgctaaacccaggaagtgggtgccccttcaggggaccattggcagccctgctgcccctcactgggctgtgcctgcagtcacgggaggcaaggacctgcttttgagtctttggcttcactttgttcttacagccagacttggggctctctccctggggctggggataggtagttctcagcctgggcagccccaggagctgctaagtgtcatatccctggggaaggcctgagcagtttgaggctgattttggttgtcccaatactgctgggaaccactggggaatgagagtgtcttggggacctattcctggagcctgagtctaagctgagctgtggct

SEQ ID NO: 215820 - DNA, 654 bp, Homo sapiens
gaggatgcactgcttgtgttgttatttatttaacgacacgaatgagtaagaagagagaagaaattccacagacgtaaggccaaactcagtgcaagctgcaaagtgcattcctggccagctcagctcacagagtcagcctggcagccctgcggccacattccagggccggctgcttctctaaatggaagcaatggatcccacactctagcagtaagtcagcaagcaagactccgagctgtgctattttttttattaaaaaaaaaaaaaagacagaaacaccaggcatgctaaaagctggccttttccatgacaatatggagaaataaaacatcagatttcttaaaaagcctggttttaaggatctcttgggcctctcagatcatctccatctgtccttgcctctttcttaggggagattttaccactcaaagaggaaaagtgccttttatgtaaaaatcccccaacttttaaatcccaaatattttgagtactaccaataactgacatgtataaagcactgaagcacttactatatgctagatactcttctaagtgtgtggttttttggtgtggttggtgttgtcttttgagatgagactcgctttgtcacccaggctggagtgcagtagtgcgatctcagctcactgcaacctt

SEQ ID NO: 215821 - DNA, 712 bp, Homo sapiens
gaggatgcactgcttgtgttgttatttatttaacgacacgaatgagtaagaagagagaagaaattccacagacgtaaggccaaactcagtgcaagctgcaaagtgcattcctggccagctcagctcacagagtcagcctggcagccctgcggccacattccagggccggctgcttctctaaatggaagcaatggatcccacactctagcagtaagtcagcaagcaagactccgagctgtgctattttttttattaaaaaaaaaaaaaagaaaaaaaaaggaccaatgcaaagaaagaaatgtagaaaacagtgaagagaagaaaacaccagaaacaccaggcatgctaaaagctggccttttccatgacaatatggagaaataaaacatcagatttcttaaaaagcctggttttaaggatctcttgggcctctcagatcatctccatctgtccttgcctctttcttaggggagattttaccactcaaagaggaaaagtgccttttatgtaaaaatcccccaacttttaaatcccaaatattttgagtactaccaataactgacatgtataaagcactgaagcacttactatatgctagatactcttctaagtgtgtggttttttggtgtggttggtgttgtcttttgagatgagactcgctttgtcacccaggctggagtgcagtagtgcgatctcagctcactgcaacctt

SEQ ID NO: 215822 - DNA, 453 bp, Homo sapiens
agcagacaaaactgcatgtcagagacatggctctggttgtcatgagaagactggattgcaaagaggtcaatgagagacgagaatctaaactaaggagatggcagtaaaactggagagatggcaccatacgaaagaccagtgatgaatctgcagacggggagagacgagtacaggatggcttctggtttccggctttctcaagcctgtgtgggaaacagaaggaggagaagattctgatgacctgctgctgctcaggccgacttcgaggattctgtggaccgcccagggaagaggccgggtctgtgggtagaaattggaacctggggttcaggctggggctgaggtaggaggcttaggagataatggaagttgaatctgggagggcagacgaaatccctgggaagtgccaggatttaagaggctggtggatgcagaagagcctgccaatgaggg

SEQ ID NO: 215823 - DNA, 326 bp, Homo sapiens
agagctcccaagcagcaacttatccctgatttttccctcatctttaaaacaatgaaaacacacttttcctaagcagttcatctcatgacctcttgccaggtttacagttgtgcccactggcatctctgttcctcgcctccaatccccactcttttcttctttttttttttttttgagacagagtctcactctgtcacccaggctgcagtgcagtggcacaatctcaatctcgcctcactgcaacctccacctcccagattcaagcgattctcctgcctcagcctcctgagtggctgggattacaggcatgcaccaccttgcccggg

SEQ ID NO: 215824 - DNA, 1006 bp, Homo sapiens
ggggccgagttcaccagggcccacgggaggcgagcgagccctcccaccagcactggccctccaggccccagtctgtgcctccatcaggagcccccctgggccctccaggacacagccgtgcacagcttgtaggagcctcccaggcccaacaagccaggccacccctgcccctggctccctgccccctccctgagctccgagggccaggccagtgaccctgggcggggtagcattgggctgggggtccacccttggtcccccagcagtcctactctgggggtcctggtcccaggagagcctcaaagtagcccttccccttgggagcctgagaccccatgagggaggcccccttctccttgggagcttgagaccccgtgagggaggcccccttccccttgggagcttgagaccccgtgagggaggcctcctcagcagcacaggaagggacggtcttcttgggggcagctggaagctcagcgtggccgggggaggggagttgctcagagaaggcatcagtgcagaaggggaaggagggcctggggcagcgaagctgggagtgtggggaggagctcagggtaagagaggcaccccacaaagtcacccgggctgtgggtcccaagagggcagggcatctctccaccaggctctggccttgaatgccctctccactgtggcgaaagggccctgcatagctgcccagggaccactcaggttctgggggaatcacagtccttgggcagtcccttcgcagtctgggttcctttgtgctccacaccacctgccccctggcttttcccccttctttcctcctaacttgtcgtccatcccatctgccgcaggctgggtggtgcatcatccgggcccagctggacggggctccagagggcgagggctgagtctgtccagaagctctgtcctcagcacccaaaacagggaaatggacccacggggacctaatccattcctttgaatgacagagctgggaggtttgggttagactagcgag

SEQ ID NO: 215825 - DNA, 461 bp, Homo sapiens
gttcagtccgtgccagatccagtgggtttctctactccacaataacccatcggagcatgagccacaaccctccacctccatatgaaagaatcacaaaagctggaagagaagtgtgtaaggaccgcctgaggaagatgctaaaagagggtgagttggcagacatgccacatcgtgggtgaaggatgtcagctgccccacaaagtaaactgtacattcattgcaatcctagttaaattctgatgagattaaatgacacaggataagctgcttctggagctgatctaacagaagaaaagccaacattaaaaaaaaggctgggtgaggtggctcacgcctgtaatcccagctactctggagggtgaggtgggagtatggcttgaggccaggagcccgaggttacagtgagccatgattgcaccactgcactctggcctgggtgacagagtgaggccctgtctcca

SEQ ID NO: 215826 - DNA, 553 bp, Homo sapiens
gttcagtccgtgccagatccagtgggtttctctactccacaataacccatcggagcatgagccacaaccctccacctccatatgaaagaatcacaaaagctggaagagaagtgtgtaaggaccgcctgaggaagatgctaaaagagggtgagttggcagacatgccacatcgtgggtgaaggatgtcagctgccccacaaagtaaactgtacattcattgcaatcctagttaaattctgatgagattaaatgacacaggataagctgcttctggagctgatctaacagaagaaaagccaacattaaaaaaaaggctgggtgaggtggctcacgcctgtaatcccaacactttgggaggctgaagcaggcggatcatttgtgttgaggaatgtcatttgtggtcagcctggccagcatggtgaaacccatctctactaaaaatacaaaaattaggtgggtgtggtggtgggtgcctgtaatcccagctacttgggggccagctggagagcttccttagacgggctgtgtggacagcaggcagcttgggggccag

SEQ ID NO: 215827 - DNA, 243 bp, Homo sapiens
gttcagtccgtgccagatccagtgggtttctctactccacaataacccatcggagcatgagccacaaccctccacctccatatgaaagaatcacaaaagctggaagagaagtgtgtaaggaccgcctgaggaagatgctaaaagagggtgagttggcagacatgccacatcgtgggtgaaggatgtcagctgccccacaaagtaaactgtactccagcttgggtgacactgagaccctgtctc

SEQ ID NO: 215828 - DNA, 750 bp, Homo sapiens
gttcagtccgtgccagatccagtgggtttctctactccacaataacccatcggagcatgagccacaaccctccacctccatatgaaagaatcacaaaagctggaagagaagtgtgtaaggaccgcctgaggaagatgctaaaagagggtgagttggcagacatgccacatcgtgggtgaaggatgtcagctgccccacaaagtaaactgtacattcattgcaatcctagttaaattctgatgagattaaatgacacaggataagctgcttctggagctgatctaacagaagaaaagccaacattaaaaaaaaggctgggtgaggtggctcacgcctgtaatcccaacactttgggaggctgaagcaggcggatcatttgtgttgaggaatgtcatttgtggtcagcctggccagcatggtgaaacccatctctactaaaaatacaaaaattaggtgggtgtggtggtgggtgcctgtaatcccagctacttgggaagctgagacaggagaattgcttaggcctgggaggtggaggttggtggtgagctgagattgctccactgcattccagcctgggtgacagaatggtactctctctttcacacacacacagacacacacaaaataaagaaaaagggctggcgtggaggctcctgccataatcccagcactttgggaaaccgaggtgggcagattgcttgagttcagttcgagacgagcctgggcaacatggcaaaaccccatctctac

SEQ ID NO: 215829 - DNA, 423 bp, Homo sapiens
caaaaattgcactccagccagggcaaaaagagcgaaactccgtctcaaaaaaaaaaaaaaaaagaatttagtagtagtgaggtacatgctctggagttaggctactgcggtcgctatcctattatggccattagctagggcaaagtattcattcccttgcatctccaattcttcatctgtatactagggattataatactagaatctccttcaggtgcctgctgtaagtattacataaaacagtaagtataaagctctaggagtagcagctgataccgaaactacacaataaacattagctactgttattactcttctagttttttttttcttctgacttattttccaccattattttccgaccagattcatccgataatcagtggattagcaaatacttgttaagcacctgtgagggttaca

SEQ ID NO: 215830 - DNA, 371 bp, Homo sapiens
acaataacaatagctaaggcttattatggctttatgccaggtactttatgcacttgatctcatttaatactcatatagcctatgagggaagtataatttccattttacctatgagaaaacaggcttagaatggaacctttgttctcatagcttgtgagtggtagaaccgggatttagatccagctctgcctgagtccagcttctgtttgtcaattacttccctcttcagacctaattcttccaataagcaacagaaaaagacccagtggggccatggcctctggcacacagcttctcataaacgagcctatcacacatccccagaactaaagcaatcgtatgttccttctgatgttgaggtaaaaagcagg

SEQ ID NO: 215831 - DNA, 416 bp, Homo sapiens
gtaagtggtcagattccagggctgttttgaaaacatcctcagcaacatcaaggacagatttcaaggccttctggttcagtccactccagcctcagatctaattcaggggaaggagtcgtaatctgctctttcacagtttaccgccattgtgctgagaggtgcacagtctgtcggctggtggggcagataaagacgccctgtgccccgttgcagtgcacttggccaatgagggcatcttcatgtgtgtgtgtgatcttggcgggctctggccagccttcctggcccatgagtgactgaggacccacacagaggggagcagatcccaatcaggttccacctccagccacctccggggtagggcaccacctgaagtggctgacactctcccgggcagtccccagttcccgcctgtccgg

SEQ ID NO: 215832 - DNA, 219 bp, Homo sapiens
gaaaacttaaagtcagattggtggctcgccagtaatgagagtttagagtagaggtaaactttatgacatagtcttagactcttcactttctcctcagccaacatgattcacatttactttattttgctgtactgtgagtgtctttgtgttccctgaattctttctggaataaggcaggttgttagtaagcacaggtttctggtccatctcatagcctca

SEQ ID NO: 215833 - DNA, 585 bp, Homo sapiens
tttgtggctggagagctttagggtataaatgtctcaaatctcattaattggactgtgtggggattctttagaataagattcaaaagcaaataatgcatttataggaggtcaagggctgactgcactaacaaatatacattaagtgtatagtacatagaaatgttacaggtcagggtgagtaaagctttgaggtgaaaatgtattagtcccttttcatgctgctgataaagacatacccgagactgggcaacttacaaaataaagaggtttaattagactcacagttccacgtggctggggaggcctcacaaatcacggcagaaggcaaggaggagcaagtcatgtcttatgtggatggcagcagccaaaaagagagcttgttataaggaaactcctgtttttaaactatcagatctcgtgagactcattaactatcacaaggacagtgcaggaaagactcgcccccataattcagtcacctcccactgggttcctcccatgacatgtggcaactgtgggagttataattcaagatgagatttgggtggggacacagccaaaccatatcagtaaataactgatttg

SEQ ID NO: 215834 - DNA, 439 bp, Homo sapiens
ggagtgcctggcattcgaggtgaccaggggcctagtggcctggctgggaaaccaggggtcccaggtgagaggggacttcctggggcccatggaccccctggaccaactgggcccaagggtgagccgggtttcacgggtcgccctggaggaccaggggtggcaggagccctggggcagaaaggtgacttggggctccctgggcagcctggcctgaggggtccctcaggaatcccaggactccagggtccagctggccctattgggccccaaggcctgccgggcctgaagggggaaccaggcctgccagggccccctggagaggggagagcaggggaacctggcacggctgggcccacggggcccccaggggtccctggctcccctggaatcacgggccctccggggcctcccgggcccccgggaccccctggtgcccctg

SEQ ID NO: 215835 - DNA, 374 bp, Homo sapiens
tgcactacagcctgggtgacagagtgagactcagtttcggaaaaaaaaaaaaatctttaccttctgaaatcagtttatcagtttataaaaagttgaagaggcatttgcattttcaaatttacagacaccaatgccaaactatattgtgcccacttgtcaatgcttctcttttaacataacactgaaaatatgtggcagaagaattagtcaaaaaataaaaaacccattgaaattgaagacaagtaaaatgtttgtttgtagatcataaaatcttacatataaaaatacataaacagtacattaaaacctatctaataaatacactcagtaaattaccaaatataaactcaacttataagttatcattctataaa

SEQ ID NO: 215836 - DNA, 608 bp, Homo sapiens
aattagctgggcgcggtggcgggtgcctgtagtcccagctactcaggaggctgaggcaggagaatggcgtgaacccggaaggcggagcttgcagtgagccaagatcacgccactgcactccagcctgggagacagagcgagactcagtctcaaaaaaaaaaaaaaatagaaagaaatttaacaccatttcaaatattaattggccatatgaatatgctactttgtgaaatgtcaattcacgccatttgtccactttttgactggtttttctgccttttttaaaaaacaggttagtagttctttctttatttttcttatgagtcttttgttagaatacatattcttctcccactctctggcttctcttttcattctcttagtggtattttttgataaggatcagtttctattttaatatagtccaatttatcaacattttcctttatagttaaggctcctttgtttctggtttaagaaatattttctggccaggcacactggctcatgcctgtaatctcagcactttgggaggctgaggagggaggatcacatgagcctaggagttcgagaccagcctgggcaacatagcgagaccctatctctattaa

SEQ ID NO: 215837 - DNA, 386 bp, Homo sapiens
gggattcccatgttggggacatggtagttccattttaacattaaggaagcaaagatagggagacctttgccaaagtgaacaaaaatacataaaggtacaccatgaaagcgtggaggaaagtttctctttctttactattcctagaaaaatattatgttgggatcagaaccttagagttggaaagacccttagaaataaaatcttctggtgaataaataaagaagttgagacccaaagaagtgggttggttggttttgagacggagtcttgctctattgcccaggctggagtgcagtggtgcaatctcggttcactgcaacctctgtttcccaggttcaaatgattctcgttcctcagcttccctagtagctgtagatggaactaca

SEQ ID NO: 215838 - DNA, 511 bp, Homo sapiens
tggctcctccttatcttttaaataagttcaagtcactgccatcaaaaaaacctctggtactctcgcttcagcagcacatacattaaaattggactgagacacagaaggttagcatggcccctgcgcaaggatgacatgcaaactcgttaagttttaaaatctaatttagttttaaaatctaattttaaaaaaaaccaaaccactggatccttttctcctctagctaccatccttgtttctccccttcacagccacatgtatgaaaaagttgtcttgggaggccaaggtgggtggatcacttgaggtcaggagtttgagaccagcctggccaacatggtaaaaccccacctctactaaaactacaaaaattggctgggcatggtggtgcacgcctgtagtcccagctactcaggaagctgaggcaggagaatcgcttgaacccaggaggtggaggttgcagtaatctcgccactgcactcacgcctgggcaacagagcgagactctgtctca

SEQ ID NO: 215839 - DNA, 191 bp, Homo sapiens
tctcaccagaaactagatgaacagacttccacaaggttggaagaaatgcaaatgatctaccttcttaaggcaaaaaagacaaaataggaagtgctgttcacccatcagattgggggaaaaagagtttaaaaccaagaagttactagaggctgtggggaaaataggaatttgtgctcactgttggtaggaag

SEQ ID NO: 215840 - DNA, 618 bp, Homo sapiens
  misc_feature (409)..(409): n is a, c, g, or t
  misc_feature (530)..(530): n is a, c, g, or t
  misc_feature (538)..(538): n is a, c, g, or t
  misc_feature (611)..(611): n is a, c, g, or t
ggacattcatccagtctcctgaaatgatttattcccatgtctgtctccttcagtgcacggtgagctactcaaaagcaggaaccttgtctttttcatccttttctgaaacctagtgtcctctggataaatgtttgctgaactgaactacactgctaacctcaaagtctcaacatggatgctcttagatacgaatatttctaattaatcaaaatgaattaatgtaatcattatagattccaccagagggaacgacttctgcgtcctaatcatgtgtttagaagctgctcattaacatcagttaaaaatgttttctcagccaggcgcagtggcttatgcctgtaatcccagcattttgggaggaaggggcgggtggatcacaaggccaggagttcgagaccagcctggccancatgggtgaaaccccatttctactaaaaataccaaagttagctggggtgaggtggcagatgcgctttcacctggctgataatggaaataaatgggaatgcagagagagagagagagagagnaagaaagngagagaaagaaaagaaagaggaagagaaagagaagaaaaagaaggaaagaagaaagaaagaagaagaagaagnaagaaga

SEQ ID NO: 215841 - DNA, 278 bp, Homo sapiens
tcccagagactattacaaaccaccttctattacaaattacattctactactattacaaattacattctttttttgaggccacaacttcttcgctttgggcataaggcctcctgtctcgtggtgagtaggcacaaatggatctctgtgccctgaccatcccactaaactcggccacatcctcaagctctttcctccactggtgtcttcaagctggggctctcctctccaccttccttccctacctcttctccaggatgctgatgtagccatggtgcgaa

SEQ ID NO: 215842 - DNA, 411 bp, Homo sapiens
caggaagatgtaagccagaatactgatgacaacagctgtctgtctacctacctgtcttctgagatcatcattaaagtatgagatcaccaagaccagggaatacagagtaagataagatggaggcccactggagaattatgaggcctgtcgcattctgactccacttcccagcgggtggaaggtgaatacccaggcactggtttttatctccacctcctaagatgtgagtcattctgagtagtgacagaatcctgcaatggaaaagcccaaagaaaaccaagatctttgggaaaaattataaacaatctcatttattagaggcctctgatggtttctttgaaatgggtaaatttcctcatcttaaagtggagggcaagaattttctacctaaggtttctctcaaactctaaa

SEQ ID NO: 215843 - DNA, 319 bp, Homo sapiens
accctggtctgtggaaaaattatcttccacaaaaccagttcctagtgccaaaaggttgaggaccactgttagagagagtaaattctcagtaaataattgttcagtaaataagcgaacccacagagtagttaatacaaaacaaagatgaagatgaggcaatccaacaactagccatgctgtcaaactgtacttggcggtttgcttttgtttatctctttagtgattatccccaaacatttgccacagggttcctaaggacatccttcatcacattgctgagataattctctccatttcaacatatctcaaccttttttgg

SEQ ID NO: 215844 - DNA, 426 bp, Homo sapiens
aataaggacatagagaagaatcacatgaattttcttgtgagtgctgaagatggcaaggctgagcctttctcctttggtggaaacctttcttgtagtatttgttttcatgggtacttgcgggcatgagaagcctattcctttgtctaggaatatgctgtattgattcttgttttatgtagctgtctctttaagtttttgttttctttactagttaaaagattttgtttgttaagtttgtgtattggcatattttaatcaacatcttacaattccatgtgacaagcatgataggcttgatgataggccagaatgggaattattcattcaacaaacacgtactgagcatcaacatggtacctgttgcaagaaagcatcctctctagtaggtgaaattatgagtgtatggattgtcaagggaaataaaag

SEQ ID NO: 215845 - DNA, 179 bp, Homo sapiens
ggccaggagcatccagatatatccagaagatgggggagtgctgagggagatccacagactgtgtgtgtgatgaaagggacattggagtatagtaggacatacagttgaaagggaagaaatcaaaatgtggctatgctgtacaaaactggcagatatgtattctatatgccactgggaac

SEQ ID NO: 215846 - DNA, 398 bp, Homo sapiens
gtatgtattttagacagggtctcactttgttgcccaggctggagtgcagtggcacaaacatggctcactgcagccttgaccttccagactcaagcgatcctcccgcctcagcccctcaagtagatgggactacaggtacacaccaccacgcctggctaatttttgtatttttcgtagagatggggtttttccatgttgccccagctggttttgaactcctgagctcaagggatccacctgccttagcctcccaaactgttgggattacaggtcaccatgctggccagctacataatgtttcataagatgtatatactgcacctattcaaccattcccctattagtgggcacatagattgttaccaggttttttttgctaataaaatttcttatgtcta

SEQ ID NO: 215847 - DNA, 661 bp, Homo sapiens
cacggtggctcacgcctgtaatcccagcactttgagaggccgaggtgggtggatcacctgaggtcaggagctcaagaccagcctggaagacatggagaaatcccacctctactaaaaacataaaaattagctgggggtggtggcgggtgcctaaaatctcagctactcggtaggccaaagcaggagaatcgcttgaacctgggaggtggaggttgcagtgagccaagatttcgccactgcactccagtctgggcaacaaagcgagactgcatcactcacataatataagcaagagtttcataaaattatacttatgttttagaaatacaggcaatgctgaccgggtggagtggctcacacgtaatcccagcactttgggaggctgaggcagacagatcacctaaggtgaggagttcaagaccagcctcacttacatagtgaaaatacaaaaagtagccgagcctggtggcggacacctgtaatcccagctacttgggaggctgaggcagcacgaatcgcttcggacctcgaaaaggcggccggttgcaatcgaaccttgggaattaacccacttggcattcacagcctcggcaacctagaggggctctggcctccctggttggcaagggaacaccggcaattccctttcttgttcccttcg

SEQ ID NO: 215848 - DNA, 407 bp, Homo sapiens
atgagatcagcctccatgaaagtagcagtgagcaagaaatttaccagggccaaggcacctccgagggagttcgcttaaggaagtgtaggttgggggagaactaaaataatgggcaaaggggagttgattataagggagaggatgggggagattgagagaaggaatgaaaaatgagtcatggtcttccatatccacaacatggtagactagatattgggaaagccctcccattgtaaaacacttaaaatgctggtttaaaatatattttaataatttaaaataaatacgtggctatgctgtcaagaaagtaaggaaaatcgttccaggccaaagacgaatcaaaggtgtctttcagtggtcacttagctctctggattcaagcttttcttcatctcttaaatcccaga

SEQ ID NO: 215849 - DNA, 544 bp, Homo sapiens
agggaatctcccctttttaaaaccatcagatatcatgagacttattcactgtcacgagaacagttcgggaaagacttgcccccatgagtcatttacctcccactgggtcccttccacaacatatgggaattcaagttgagatttggatggggacacacccaaaccatatcagaggagtctttttcattcctttaagccatcagtttcttttcttttcgacaaataataattgtaagtatttatggggtacaatgtggtattttcatatacatgtacattatggaatgattaaatcaaactaatgagcatatcggtcatctcacatgctttttttgtagtgggaacatttaaaatcttattctcttaacaatattgaaatatccactacattattattaactacagtcactctgctatgcaatacatctcaaaaacttactctttttgtctaattagctgaaactttgtagccttggaccaacatcttggcatcctcccactcccatcccccacctctggtaactaccattctattctctatttc

SEQ ID NO: 215850 - DNA, 676 bp, Homo sapiens
cagggtgtgatggctcacgcctgtaatcccagcactttgggaggccgaggcaggtggatcatgtgaggtccacgagtttgagaccagcctgaccaacatggcaaaaccccatccctactaaaaatacaaaagttagccaggtgtgtggcgcacgcctgtatctcaagtactcgggggactgaggcaggagaatcgcttgaagctgggaggcagaggttgcagtgggccaagatgccccgcagcactacagcctgggcaacagagcgactagtctcaataccattgtaaagacattaaagactcattttctgtctgattcttaaatatttaaacaaagccccatatagcgccttaaatataggagtgttcagaaaatgttggtttagtttaaatgaccaagttatttttgaccctattagtctattagcataatgttgtctttttcacttaatgattaagctacttttaggtatgttaggtatcatgagctggtcctcagtgtcctagagagcattataagatgtgaattcagaggagggtgaggaaatgttaaacgttagcaaaatgtggctaaaaccagtctgcagacttgaagaattcaagaaaaggtgattgcctaatagatttaaaaatgaatattcacaaaaaagaaaccccattaaaaaccgggcaaggg

SEQ ID NO: 215851 - DNA, 711 bp, Homo sapiens
tctgagaacaaggagtgttccacgcccaattctgaggacacatagatacagtcaggcagaaaaggtcttgatgtttctgaggctccattcacttctatgtgacacagaagtggagacaagagccagtggacctgtaggggaggcaccctggagacaggggagatgactctggagtggaggctagtgatagacagcccagcccacgggtctgatgggagatatgccagagatgcagaaaggtctccatggtcattaagaggggatggggggctcggtcagcaagaagagccactgatccctggtcaagccaaattttaaatttgccaaataagagcgttaaagcacaaaacacgcctatcaataactatcatttcacaaaataaggagtttcaaaaaagtgagactggtattacctcagaatcaagaaacatgcttttaataaatcaaatcagttccaactaatttagctttttgaacaacctgccatggtgcacttcttttgtgtcatttagccatgcaccagttgaaacttggcagcatggaccagcgcaggtccctgggcccacgctcggaagccactgttgtgtgctgtgttgtgaatcctaaaattgacggagctttaaaacatcttaagtagagaagtgacattgtcgaatgtgtaagttagacagctctttctggcctccatattcaggagggcttgcatttagg

SEQ ID NO: 215852 - DNA, 407 bp, Homo sapiens
cagcaaaaccatggtgggtgtgagctgcaggccagcccctccactgggccattatccaggggtaaacaccactcgtgggttagttccacgagttactggctgatttgacctgtgatactccaaggtggaagtaaccaaataatatgtatcatgagccccaagaacgaagccagtggagagtggtacatgctagagggtaacgcctggccctttgcaggacagcacgtcagccatgcgccatgggacgatggtggtggctgggacacaggaggccacggcaggaaatgggcaggtgggtgggtctatgtaagctggctttagacttcaatccacaagcatttgcagctcaactactcagcgtcttatcttatttaatcctttcagcaataaacactcttttcacatgt

SEQ ID NO: 215853 - DNA, 639 bp, Homo sapiens
ggaggaatggaagactatggacttaagagtgtagcatcattggtcgaaagacttttatttatatttagggagactagagcatgtctttaggtagagcaaaaggaagcaggagagaggggaacactgaaatacaggaaaaagaggggatagttgagtaaacagaaagaaccctaagtgaaagcaggaggagattggagcagtataccaggaccgggatgagccctggaaaagagaaggagcacctatttctcagagctaggatgagactgaggtggacagggaactaacgccttccagaacagaaatatgtggtccgatgagtattgaatgcaacttaaaatctagttggaatgtgatggataagaagagacccaaagtcatcaacaagccttctcatgaactttcagtcattaaccttcctatatagtaaggacagaaatgatgatttaagccatcttaggcaaggcagtgctaacaatatgcttttgtaaagtcaccatccggtgtaaggaataggcaccagcttagtgatgtttgcaaataagccagtggtgggtgtggataaattagagagagtaccaaatgcagtttgaaaagtgttaagttttgtctctagtaaattgcatgtagttttaccaa

SEQ ID NO: 215854 - DNA, 337 bp, Homo sapiens
gaaaagaataatgcagccctcaataaaagtaggatgcaggttttccaaaatattaaaaatgaactgtggctcatgcctgtaatttcaacattttaggaggctaaagtgggagaattacttaggctcagaagtttgagttcagcctgagcaacatactgagaccccatctcttcaaaaaatacaaaaattagtcaggtatgctggcatgtgactgtagtcccagctacttgggtgactgaggtggacggatcatttgagcctgggatgtcaaggctgcagtgagccattactgcaccactacactctagcctgggtgacaatgtgaaacccaatctca

SEQ ID NO: 215855 - DNA, 767 bp, Homo sapiens
ccgaggccgcggagctcgcggaggcaaggccgaggataaggagtggatgcccgtcaccaagttgggccgcttggtcaaggacatgaagatcaagtccctggaggagatctatctcttctccctgcccattaaggaatcagagatcattgatttcttcctgggggcctctctcaaggatgaggttttgaagattatgccagtgcagaagcagacccgtgccggccagcgcaccaggttcaaggcatttgttgctatcggggactacaatggccacgtcggtctgggtgttaagtgctccaaggaggtggccaccgccatccgtggggccatcatcctggccaagctctccatcgtccccgtgcgcagaggctactgggggaacaagatcggcaagccccacactgtcccttgcaaggtgacaggccgctgcggctctgtgctggtacgcctcatccctgcacccaggggcactggcatcgtctccgcacctgtgcctaagaagctgctcatgatggctggtatcgatgactgctacacctcagcccggggctgcactgccaccctgggcaacttcgccaaggccacctttgatgccatttctaagacctacagctacctgacccccgacctctggaaggagactgtatcaccaagtctcctatcaggagttcactgaccactagtaagaccacaccagagtctccgtgcagcggactcaggctccagctgtggctacacatagggttttatacaagaaaaataaagtg

SEQ ID NO: 215856 - DNA, 345 bp, Homo sapiens
acgaagggcattgatcttaaacctccaaccagtatcttcaaccaagacacattgctgagtgtgggaaggcagaggagagggcaggagtcaccccaagggaggccaacttgtggggtgagaaaagtccatttggaaaaaaaaattaataacacagatctccttctggagcccttcaaataataataatgtaataattgggattgtaagttgaataccagtatttctactttatggacattaaagtttgagaagcaccaaacttcgtatattacacatccttagaatctttcatcttttaaatccccaaacaagactcacctgaacattgttctttacgttactttc

SEQ ID NO: 215857 - DNA, 379 bp, Homo sapiens
ccccaaaaagggaacctggacaccctccaccggtgacacagccatgtggaactgtctaaccataaaatcatcaatactgagaaattaaaaggggaacatgtcaggcctcactctttctgtattggctttcaagagtattgtccttggtgaggaagacaaagtgagtgggctcagtaactcgcccgagtcacagagtcaaagcaggagctggacccagatagtccagagctcatgctcgtacacacttcacttcgctatcctgaataaaaaaaccaagactccaggagggctgcagcttcgtccaaggtgtcgtgacttgcccacagccaccctcttggcaaatgacccagtaaactccacctccagctcctctacctcc

SEQ ID NO: 215858 - DNA, 558 bp, Homo sapiens
ttgcatgtaattagaccagaacaaggcaggtaataaaaatgagccattgcaaccctggcttatataactcaaacagagtatgatggggacaatggcaatctggtgtgtgcaagccctggctttcagagatgaccctactgggcccagccactctggccaagcagaaaaaagctaggtcttgttcagcatgcttagttttcaagagaatccaggtacatagatttgtgtatgatttgtaaacattggcaatacattcaaaaatatttttaaaaccactctgtgggccaaactaaatacatctgtgggcagagggtgacctctgagttacatcatttggctatttcagttgcacaaacactactctacgtttaaatgaagctgggtcaggcctgaggtcagtgtggtttggtggaaggattatgatatttacaagctgacagacttgagttttagatcctggctctgccacttgctagctacgtgaccatgtgcacatcacttaaggagtgtcataaaaccaacctcacatgcttgttgcaaaataaataaggaaatgtc

SEQ ID NO: 215859 - DNA, 697 bp, Homo sapiens
  misc_feature (459)..(459): n is a, c, g, or t
agcctcaaatatattttagatacttatcttttgtcagttttgtatgtagtcagtatattctgccagtttgtggcttgtcatttccctctctttatgtgtctttggttctaaggttctttttttggtgcccaggccgaaggcgcagccccacacctgcactcccagctacccacgcacctgcgcccgcatcattacctgccccctgccagtccccagccccgccccgcgccgccatgcccctgccctccagccctgccgaccgcgtctcccgagaccccatctcaccccctcacaaccgtccgcgctcccacccgctcacacctcgccttcacagctcctcccccaaccgccacacccatcccccgccaccctacacctacctcgctcccactactcccccctcctccaggctcacccccttcccccactcccccactgccccctctctccccctccgcnctcccccccacgcacctcctcagcgcccccctccactccgcccctcccaccatgtcctctccccttcccctccccctcgcctcgccccaccccctcggcccccccacactcccctccccccccccgctccccctctccctactctccccgccacccccccctcccacccgccctcccctcccccccgcccctccgccccgcccctctcgcccctctctcccgctccgcctcctccccg

SEQ ID NO: 215860 - DNA, 671 bp, Homo sapiens
agcctcaaatatattttagatacttatcttttgtcagttttgtatgtagtcagtatattctgccagtttgtggcttgtcatttccctctctttatgtgtctttggttctaaggttctttttttggtgccaggccgaagatccaggcacacacctgtactcccaggcattcactacgctgaggcaccacaattactcgaacccgtcagccaccgactgcagccagccgcaatcatgccactgcactccagcctggccgacaccgcttctctgacactccatctcaaccacaccaacccttcgcgcgaccagccgcttacaccgctaccacagtacatctcgcacgctcgcacgctctccctcgtccagatactaccgcacctgccctccacattatcccgctccctcacgctactgatcttcaccccacgccccctcgcctaccttctcaccacatcgcccttaccgaccccgccgttcttcgcgctccctcttaccacgccccttcacccctcctcttcgttcccatccccacccatcttcctacttcaccccgcgtctccctccctgccccaccgccctccctcctccctcctctcaccccccgcccccctcgcctctcgtccctcgcctcctctgcgccccctctccgccctccctccctcctcccccc

SEQ ID NO: 215861 - DNA, 421 bp, Homo sapiens
gatctcttcctcttcacaagttatatttgatctatcatcaataccatgcccttgtcaaaatgcaagtatgtgctcacttcagcatcacatatactaaaattgaaatgatgcagagaagattagcatggcccctatgcaaggatgacacacaaattcgtgaagcattccatacttttattaaaaaaaaaaaaaagcaagtattccattgttaggagaccctgattcctttcttttgttcatgttctctgtctctctgcctctgtctctctctctctcttcttccctccccccaaccctctctttcccttcttcactatctcccctccctttccccttctcttgccctgcttcaagtgaaaaattagcatctgtgccagggaagaattgctagtgaatatcaagattgttgtaattaatcgat

SEQ ID NO: 215862 - DNA, 425 bp, Homo sapiens
cggtggctcacacctgtaatcccagcactttgggaggccgaggcgggcagatcatgaggtcaggagatcgagaccatcctggctaacacggtgaaatgccatctctactaaaaaatagaaaaagttagccgggcatggtggtgggcgcctgtagtcccagctactcgggaggctgaggcaggagaatggtgtgaacccgggaggcggagcttgcagtaagccgacattgcgccactgcactccagcctgggtgacagagcgacgtctcaaaaaaaaaaaaaaaaaaaacaaaaaactattcccagaaattcaagaatgaatctttagtataattcacaacactaacaaagagaaaaataaaacgtgatcatctcattcctgataaaaacttgattttaaaataccccaactaggaatgaatgtct

SEQ ID NO: 215863 - DNA, 348 bp, Homo sapiens
cgggggtgttgcatcatctcacagatgggcaaacgatggggaatggcctaaggtcacatagcaaggtggctcaccaggtgcggtggctcatgcctgtaatcccaggactttgggaggccaaggcaggcagatcacctgaggccaggagttcaagaccagcctcgccaacatggtgaaacctcatctctactaaaaataaaaaattagccaggcatggtggtgcgtgcctgtaatcccagctactcgggaggctgatgcaggagaatcgcttgaacctgggaggctgaggttgcagtgagccgagatcatgccactgtactccagcctgggtgacagagactctgtctc

SEQ ID NO: 215864 - DNA, 475 bp, Homo sapiens
tttcgtgaaacactctcattttgcacataaaggagctgtggcccacagaggaatatgatttactgagagtgacccagttagtggccataaaccaaaagccccaagatgctaaatgtttgttatgaagagtaaaaatcctcccagtttataaggagtaacttcatccttccattttctatttccactatgactcccctggcttaaattttaatctctattttggatgactccaaaatctcattcttctaaattaattatctaataccacaatgttgcacttatcttcctacaaatctactttcatctgccttgacaaagccaaccctaattttctctagtcctcattagaaattattgcaacaaaaattcacatccagtctgaagtttgggagccagaaaagaattttcccattaagatgagacagtaccaattattaagcagaggaagacacaagagggaaagcagctttcacat

SEQ ID NO: 215865 - DNA, 671 bp, Homo sapiens
tttcttgctacagagaggtgggaaggtgatacaaacaggtggtccgctggtaatccccatcgagtgactggatgatctgcaaaagaggaaaacaacccggccagagagtcaggggacggccaccagatggccctgtggaccgccgcccgacccccgagcaagccgtgtgccccgagggcccgacccaagatcacacagctctctgccactcactctggaggagaccagaaacctcgaggtgctgtcttcactcggctcctctctcacacagccctgatggagaaggtgggtccctggcacgtgggccccaggagggagaagactccgctgtacaggaggttctggaaggaagccgtgcgcctggctcttacgtcccagctcttccctacatcttctttcacgctgcagcggaaaccagaatgcctactaattccttaagaaccaaaggttcaagtggtgctacctatgtatttgcttcttacgtcccctgaacgtcgctacgattccacacgacagccctcgagaattctttcaagttttccaaatgtcctctaccgtagaaacatctcaattaaaacaagagtttccaaactgtcaccttactgcaatattttttcaaaaaactgtgtaatgaaacttttttttttttttgagacagtctcgctctgttg

SEQ ID NO: 215866 - DNA, 375 bp, Homo sapiens
ttagtcattgatgcctcttaatataaatacaaagagaagttccacaatggtcatcctcttatccccccaaaagcagaaattattgattcagaaacttgactaacaaaatgccccaaagagaaactgttgtacaagtcaaatgagtaaataatctcagcacttttcagttctttcctttactggaggcctgggggtctcaactagaccagcatttccccaacacaattgttgttaagtataacttggggaataaaggggaaccattagtttgcacagattgaaagggaggctcaatgaaacccaatgcactgttctgtacccaggaagaggccacactgggggctcatgttttattatttcttccaatttattaga

SEQ ID NO: 215867 - DNA, 610 bp, Homo sapiens
tccttccaggtcggaggagcggccggtgaagaagcgcaaggtgcagagctgccacctgcagaagaagcagctgcggctgctggaggccatggtggaggagcagcgccggctgagccgcgccgtggaggagacctgccgcgaggtgcgccgcgtgctggaccagcagcacatcctgcaggtgcagagcctgcagctgcaggagcgcatgatgagtctgctggagaggatcatcaccaagtccagcgtctaggccagcaggcggcggcggcggcggggccgggcggctggtggtactgctcaggccacccagggcaggccactcaggccaggcgggcaagggggccgccccgcgagcggagaccgccttccacctggcctctggcaggatgtcccttctgaggggtattttgaggaacccccaggccctggggaccgtgaggctccagtctccagcatgaatgcccttcctcggacacaggccagggcctctggggttcactccgagtaagaacgtcctagagccactctccagtgtcgttactatcaatgatacttgacgtggctttgatattaaacgtatactttttcattcttgcctggaaaaaacagt

SEQ ID NO: 215868 - DNA, 490 bp, Homo sapiens
tgtccattacagaagtaacgtatttattgtagaaatgtaatagataaaaatgaaataattattcatattctcactattccacaaatgtctgtgattaacagattcattgtcaactttagttctcattctgcacatatgtaagttatgtttgtatctaatgtgaaattgtaatacagtcatccctcaatatgtttagggaattggttccaggacccccatgggtaccaaaatctgtgaatgctcagctctctgatatgtagaatggtgtagtatttgcatgtaacctatgcacatcctcctgtatactttaaataatctctagatttcttataatacttaatacaatgtaaatagttgttttattgggccaggcacggtggctcacacctgtaatcccagcactttgggaaatcaaggcaggaggattgcttaaacccaggagttagagaccagactggacaatatagcgagacctcatttctaaccccca

SEQ ID NO: 215869 - DNA, 429 bp, Homo sapiens
  misc_feature (6)..(6): n is a, c, g, or t
ccccanccaatgaatgagcacgttccatgtttgttatgtttatgtccttgagaagattagataaacatggttttattctgtataatagactattcttgtttgattcttttaggtcattgaaataagttagatttcttataggttttaatagtttgccaaaatgatggccgggtgtggtgactcatgcctgtggtcccaaagcgctgggattacaggcataagctgctcccggccactaagttaatgttttttaaataaatgagtgtaagcacttttatgtaatcataaattttcatcatcattgtaatgaatgcataatgtatcataagtgttttctgttttttactgctgtaacactatggatctttttatttccattcagtaaataagtgattgtcattgttctaggcactgaggatatgataatga

SEQ ID NO: 215870 - DNA, 185 bp, Homo sapiens
ccatataaatttgagccgaccttaagacgggcattgggcggcagagaaccaggcaggttgaagaggacgttctagactcactcggaaccaagctctggctccagagcccccggaccctctgggcagtctgtgtcccagcctggggtctcagccaagaggaccttcctgtgccatccccccgaccc

SEQ ID NO: 215871 - DNA, 430 bp, Homo sapiens
cagtgtttggaggaaagctccttctttagctcctcttgggctataccgaacgttaaggaagtagactcctaacagagaggtagagaccgtagctctgctttcatctgtagattaagcacctctttcctttaaaaaaaacaaaaagttggctggacatggtggctcccacctgtaatcctggcatttcaggaggccgaggcgggtggatcacctgagctcaggagtttgagaccagcctggccaacatggcgaaaacccatctctactaaatctataaaaattagctgggggtggtggcgtgtgcctgtaatcccagccacttggggggctgaggcaagaggatcacttaaacctgggaggcagaggttgcggtgagccgagatggcaccactgtgctccagcctgggcaaccaagcaagactctgtctca

SEQ ID NO: 215872 - DNA, 658 bp, Homo sapiens
ccctaaatatctttcaaatctatatacatatctctgttctccccgctacagccctattttaagtcactagcatctatgttctggattatttagcacccttctaaatggtcttttgcttccagtcttgcctgccctagttttgttcagagcaaaggatgttgtaaaagctgacttgaaccactaacaggtgtgtccctggtatggagatgaatatgtagccgccatggatgaatgtgtggtatggagatgaatatgtatcacatgacagggactggtttagcattttatgcattatctcatttaaccctcaccataagccagtgaagtattattcaccctttaaaaaccggagtttagagaaggtgagtgacttgcccactgccactctgctgggacgtgaataattctatgtgtgtccaggcctctctggttccaaagctgatgctctgcccctgcttcatgctgcctgtgctgttcagtgttctaatcctatttctaagtccctgccttctgggcttactgtacactcctggtaacagctttgcgcgtcgcttagctacggggagatgatggtggatgcaaacatctgattttcctgacagtcacattccctttagtatattaataaactgacattggccgggcagtgtcacgcctg

SEQ ID NO: 215873 - DNA, 719 bp, Homo sapiens
gatcagcgctgagcccgggagtgcgggtcacgcccgcagctggcgcgcaggaggagtttgggagagaatgaattggactgtgaaactttcatgaacttctcaaaagaacaggaacatgaggagacgaaatggtgatgaaaacccacaattcaatctaccacagtatggtaagcattcccagctttaaaccatgaagaaaaataaattgacaattagtgaatccatatgactcctgcttccaggaaaggccagagccactgatcattggttcactaatggccaatagtgtttcaaggtgaaaggaaggatgggtccaggagcctattggaggaaaatagggtggagacttggagatggtgttaagagaacatttgggtgagtgaacataaatcaaagaaaaaataaattaagaaaaatgcttatagaaagtgaaaggtagacattaaatactaaatcagataaaaacctgcagattttatatttaaccatcttctcaattataataatgatttggaaaatttaatgttttcttttatataatttggcagggtgataactatcctcagtgggataacagactagttttaactcttacatctccatgtttcagagtttatttgaggcaaagtatgatttttaagaacagctactgcttattttgctcaggttgcttattgcccagcccagtctgaggggaccattcatagcttatccatgtg

SEQ ID NO: 215874 - DNA, 602 bp, Homo sapiens
ctttggtgctatttaaatgaagagctcttcctatataagacaccaccatccatttgtaattactaagacatggactgttttcccaaaagcagtagaggtactctaaatgcacagactcctggtctctattataatcaaggacattcattctgagaatgtcagatgggtataggggctctgaagtgacagtgaaatggactttttctctgggacaagctaactgacctgctgggcagtctcagtactagcaccaagagaaagctaacattcttctctgtgaataacagtcctttactggtctattgttccactgcaaccagccaactcagtggctttgtgtctcttgccacaaagagtaacgtgttgtttgtgtttattactctgcttacttcagacctttcagagaagctctacgtttgataagtgttaggaaagtgcagatcctcttccacacccttccttggtgcacgtaaaacatctgtggtgcttggttcgtgcatataatgcagagagaaatgctgcaggaagatgtaaaagaacttgtgctaccaggtaggcatgtgagagttttttttgtttttttgacagggtctcgctctgtc

SEQ ID NO: 215875 - DNA, 375 bp, Homo sapiens
gtcacgtcggctgccatgtggtgatgaggctattaggtggctagtgtcaaagaagggagaagcagcgttatatcggaatgggctcctaccaactcagcagaagccatgtgtgcatctcttcctgaaccatgccctcatgtcacttgaaattagccacggcgaaggtaagtccatgtggaaatctgcaaatactatagaggatttcttctccctcccttgtcccttccccttctcgtctttcctgcatttcttcctttcttcttcttcttcttcctcctcctccagttccttcttttctctttttttttacaacattatatatacttatttattgtttataagcaaagttgttgataaacacttaccagcacatct

SEQ ID NO: 215876 - DNA, 641 bp, Homo sapiens
tcaaattcaggattcaaaggcaaaggtaaaaggagagccttgaatttaaaaatcaaatcaaaacaaaacaaaacctcactcaccaacttgtatggttcctccagtcttttctcgtcttggattttcatcattctgatacatttactgctctgtttggttaaatcccaaattaccacttcaatttatcagctggtcacggtctcatagaacagatcctaatcccaatgtcagcaccactctacaagggctgctcctgcgttaagtttgtatggagttgccctggatacagctccctacctaactctgtggccctcacagggggcgcttccagcccgcaggcaatgcaaattagcacaggaaatgttacattaatttctaggcacttcaaataatagttagaacgaatccctaactaaattggtagggagcagttaggttactgtctttccactcctgggtaaggtacctccctgctgattgacaggtcgtccgcttctgagcaggggaacaggctgagagtttaaacttcgctccccccaacacagcttttacttcagcaagtaaaagcgtcaccatagcggcttgagtatatttgctcttaacctgctctattttatatagacacgtataaatgcatatat

SEQ ID NO: 215877 - DNA, 740 bp, Homo sapiens
ccggcccaactctgtatcctctcaaccactatagtattggcagtggtttctctgctagaaatgcactgctggcctaaagaccagccagaagtacactactgggctaaatctattgtgtgcaagggtaacctccacctggactgcttggacgcagctctcttcccactggcggccaccgcaacacaggtaacctaaataaagctgttgattctgataaccccaagcacaaaacattggaagcctttagaacatgagaggtctgagcacatagactggtttctgtttccgccatgcaaatatttaattgcatggatgtagggggaaatggactttacctgttaccaagaacagttccaaagacttcctaaaaattttcattctaaaaccagattacctactccagctctcttttggttagaaaacaaaagcaaataaaaaataaaaacagattacctagaagactgcaaccatgaataaccagcaataaatacttaacaagatcctatctaggttcagatcataattttagactgtaacttcttcatcaagctgcattcgttattcactaggttagtttagcctttaatgggtagacttgctccaagaaaaagggcatataaataaattaaacaaccgatttttgtaagatgcataaagaaccaaatttcacttctcaaagtcagtctcacctctcacctaggatagaggagcttgaaactcccaacttctatggagataaa

SEQ ID NO: 215878 - DNA, 148 bp, Homo sapiens
gtgtccccgtaaggagcccggccttacaaaacaagtcttatgcgacaggtctcagagaaaatgcagaaagtagaatgaacacattacagggcatagactggattcaagaacatagcctggtggtcagtgtttcattcctaacttgcca

SEQ ID NO: 215879 - DNA, 438 bp, Homo sapiens
ccatgtagtggagaacttccaatctcccagcacaccacctgggggacggtgcatcctcctggaaagtgaaccacacacacagctccactggaaacaggagacttccgccaaacatgagacaaggggcctggaatatttcagttgtgtcctattaggtgctccgctaacattctgctttctcttctgagccgtcaatacgctgccccagcacgggtggaagatgccccctacacatttcaagccgactaatcacaggggaagaaacacggcttgttttaaccgctttctacgggcttcttatgccttcagtctgcgcgttcctgcagagtcacctctgaagggggaaccagattatccaaagcttctggctctcataccaggtgggcttatgtaaactgtctcagggtcctcattcgtaaataaaggacttaaactacg

SEQ ID NO: 215880 - DNA, 495 bp, Homo sapiens
tctcacttttttgagaataggtttgataaaaaggcagtaatggtaaaacagactatatctgaaatctggagagtattaagagccatatattatgttaagtacccaacattaatattatctaatttaaccatcaccacaagcctacaaaattctgatactcttcctcactatttagatgggaaaaaatgtagatgtaaattttttaaaagcaggttaaaaacagtactcagtccctaatcctacagttattaacatacagatgtaacacagaattgagaaatagtagacaatggtctctacatagtgaaaaagcaggtgatttttatttctttgtgcacctgtgtagtttttaaattttttcctccaaaattttaaaatttcattaacattaaaatagtttagccagatcaaatgattgtaaacacactcagggaactcctatttaaatggtattctattataaagcaaagagaataatcaatgctcttctattat

SEQ ID NO: 215881 - DNA, 416 bp, Homo sapiens
tcaactattgctaaactctgagaagccttgaaacaatatgaaatatttttattagcatcccagcttcagacacaaaaggaagcatctgcttgtaaattacatccctatagaaatcattaaaaaggggtgggcgtggtggcttacgcctgtaatcctagcactttgggaggccgacgcaggcggatcacctgaggtcaggagttcaagaccagtctggccaacatagtaaaaccctgtctctactaaaataccaaaatcagccaggcatgatggcggtgcccgtaatcccagctactcggaaggctgagacgggagaatagcttgaacccgggagatggtgattacagtgagccgagattgtgccactgcactccagcttgggcagctgagctagactccatctcaaaaaaaataaa

SEQ ID NO: 215882 - DNA, 235 bp, Homo sapiens
ggggagggacagggaggagctgcagatgatcaaagggtttcagattggtcagtaagtagaccgggaatgtgcccttcaggagctggttaatacacagctggaaactagcctagagctcctgcaagatgcttgggctttaaataataaatctggaaaccagagacatgcgaaatgaagatcacatggatgacactgttcacagcaagcgttaggaactgtgggcactgcatcgtta

SEQ ID NO: 215883 - DNA, 360 bp, Homo sapiens
gctctaaaagccccggcctgctggtattctggggggtcagtggcccatggaccctcttagccaccagctctgagctggcccagggccaagaacacagccaccacctttggccaccccaggagtgccaagagtaaaactgtcactgtggttccagggagtctttgggccacagagggtgttattactggaacagaaatgtagacagaggggtatggattgccataaaagtgtctaccatataaacaacagtaaagtcacacacacacacacacacacacacacacacacacacacacacacacacaatgtggggggtgggggagagagaaaaatcaaaacatctaaaaataaacaatgttc

SEQ ID NO: 215884 - DNA, 381 bp, Homo sapiens
cataagactgccatcagccacccaggagaggggccgcaagcagtgggaaccctggtgccatcgggagctggcagccagcttattaacgaaccgtttgtggctgaactctcagcagggagtggccattcagcaatcctccagcaggccacagatcatcacaaggccctggcgcatctgggagctctgatccagcacagatatctcaacactcaatatgtaaactcaagattcaggacttcatggacatgacctatcagatcctaacaagaagcccaagatctggaaaaggaagacattggacattcactgggctcttatgatatgccagacacaaggtccattcatgtggattctctcattaaatcctcccagcaagtctgt

SEQ ID NO: 215885 - DNA, 419 bp, Homo sapiens
cagatgagatcaaaggattgttctctggggaaactgaaaggccccagaaaaaaaggcctccaaaagccgacatttggaagtcttctaacaaaagaacagcctttcagcccagtaatttgatagtgaagcccaccacctggcaagccccacctgcacacagagtttccaagcagcttggtagtgtcatgggaactaatctaggaacaccagccaagaacccttaagattaggtatattttattttaatgtaaactaaacctcagtacactgggccaggcatggtggcctatgcctgtaatcccagcattttgagggggctgaggtgggaggatcacttaagcccaggagtctgagaccagcctgggcaacatagcaagaccttgtctctaaactaaaaaaaaaaagagagagagagaaag

SEQ ID NO: 215886 - DNA, 539 bp, Homo sapiens
ctatttcctagttataatatcttgccattttaatccattatcctctaacgctatagtctgtgactttccttacttgagtctaggtgggtgccacttgaaattcttttccctttacagttgcttttcaacttatgatggggttacatccttataaacctattgtaagtcaaaaacacaagttgaaaatccatttaataccccaacaaacccacttgtaaagttgaaaaattgaaccattgtaagtcctggaccatctgtattaaacatacgcacaaaaaggaaaagagcaacagtgggagaatcagccccgaagggggagtatcaatgactggagtgaggaaaatcaaattttaaagtatgctttccactgttcatttatatggaaatatagtggaaacaacataaatatggtggtttctgttcccttattgattattaaggaatgtctaagatatatatggtttattcctgaacagagatccattatttttaaacatgtcttttttaaaatttaaaaataaatgttcgatttgaatcta

SEQ ID NO: 215887 - DNA, 493 bp, Homo sapiens
ttcatcagtgtctggacattgaagagttaggtatttattatagtctccaccgtctgggcttgtttgtgcctgtcgttcttgagaagtctttctaggtattcaaagggacttgggccccaagcccaataatgctgtgttttttgtggactcatgcctaaggtatctccttggtggtcatggataagagccagaattctcttgattaccacgcagagacttttgttcttttttcttactttcttccagacaaacggagtctctctctctctgtgtgctgagtcacctggaactgggggtatggtgatgcaagcacccttctagccaccactactgttactgcagtgggtcagacctgaagccagcacagcaatgggccttgcccaaggacctttccttcagggtggcgagttcctccaggtccccggcatatccagagatgctgtctgggagccaaggattggagtcaaaaactttagaaatttacagccaggtg

SEQ ID NO: 215888 - DNA, 499 bp, Homo sapiens
attgttagtgaaaactaagtttggtctagaaagagattttgatatttcagtatcagactagcctaatactacgtatttgtcattacttcataaaatgcttttttcggtgccttctgttgataaaaggggaaaagttggggaaaaaatatttaacattaaagttaagattgtagtgtttattttgcttatggttatttaaattggataaactcatctgaaatgttgctttgtagttcacattgagtgtgaatagaaagttctctcctgaaaaatgcaggtaaagacaacaccaaaaagtatatagactaagtagatttctgtactgaaaatattactacctgccaccccactttaaaaattcagaactttcatagctgacgtggtgttgggcacctgtaatcccagctactcaggaggctgaggcaggagaattgcttgaacctgggagatggaggttgcagtgagctgagatcgtaccactgcattccagcctgggcaa

SEQ ID NO: 215889 - DNA, 1025 bp, Homo sapiens
cttttgattttgaaataactctagactcacatagaagatacaaacattgtagaatgttcctgtgtatccttcacccagcttctccccatatcttacgtaataactatacaattatcaaagcacaaacttgacactgggtacaatactattactattaataaactacagcccacgttcagatttcactagtttttacatgttctttgttgtttgtttgggtttttttacatacaattctataaaactttatctcatatatagatttatataacaatttccacaatcgggatataaatctgttccatcaaagcacattatgtattgaaaagacccttttgggattataaacatcatctgctggaagcactttggtaaatgatgaggactttcttttgaccttttcccttaccacattaaaaagccaattgtctatgctccagctggtatgtacaaaccacaattgccagagaagttcacttttcagaatgggtgtttgtcctgttcactctttgtttattatatgccagacccagtagaggcagagtggataaaatagcaaacaagagaacagtacttcctgcctttaaaagaatttagagtgtgagaaatattcattcactcattcatacacacacacaccacacacacacacacacacacacagtgacagacactatccatgaatgaaaagtaaaaagtgagatgaaaggttaaaacacaatctggttaagacagtgaggaaggtccttgtaagcaagccccatcctcagactcagtattcaaggccttctgtgggaccaggtcatccaagtgccagagccattgagtatgaaacacagaaaccaacaagttcttaaagcagaatacaaagatgctcagggcttaagaaattcactgaagacttcttaacttctccttaagtcagagtccagcccaaaagatatacagagttggcaattatccatgtgatgttaccttaggacacccataggcctatttctgccttaaaaggttctttgcaacca

SEQ ID NO: 215890 - DNA, 295 bp, Homo sapiens
tcgcgaaccccgtgaaagcacaccctcacacacccctcacacttctgacacacaccctcacactccttgcacagacccctcacgcacacccctcacacacccccacctcacacacactccttgaacacacccttcacacacacactctcacacacaccatcacacccctcacatacatcctcacacacatgcatcgctctcccacactcctcatgcaccctcacacaccttcacatactcctcacacacatacccctcatacaattctcacattcgaatacacacaccctcacac

SEQ ID NO: 215891 - DNA, 919 bp, Homo sapiens
  misc_feature (54)..(54): n is a, c, g, or t
cttatggttgttttattatttttatttatttttgagactgagttttgctctgtnatcaggctggagtgcagtggctcactgcaacctcctgacaccatgaagttttaaaaatgcagttacactcaacatacccctattgagcctctgctctgggcagggctgcatgctaggttctgggcagctagggttggggaccatgatgaagatgagagacatagtgctgtcctccaaagtcctgaaagggagaagtatgccacctctacacctttctggtcataaggcagagagtggggagtattgtttaagtaagaccttctgctctcattgccataattctggatcaggcaagcagggaaaaggagagcctgtatacagaaatctaccttctcagttgagggagggggtctcctgaacaaaggaggccaccagcctccgggagagagcgaaggattcgtaaaaaacactctgagaatccagctcctcaaggtgcccaccctgggcctcctctgcacctgggcactctcctacatgatctgcagcacacactctcacatgtacaccatgccacacacctaactgcattcgcacacatatcctttgccctccaggtgccaggctcacatctgctgtgaaggaaatttgtctggagtcccagtgggaccctgagggtggacattaacttacccagagggctgattcattcttgttggtgggtcagggacgaagtgggtccagtagggaccctgcctcgcccaccccacctttcagccagccccttccccattcagcagctggaccctccccactgacacatacttgtttctgccctttgttttcctccctggccaaatccccaaggcttctttggtcattaacctcctgccttaattagcttagtgaggaggaaagcagaggcagc

SEQ ID NO: 215892 - DNA, 611 bp, Homo sapiens
agcgtcttctgctgacctcgtgcagcaccgcaggaagctgggatgctttcgagcttactttttctttatttgagcttctggtcatgtttcaaagccatcaaaatctaagcaagggagttacagggagggttagagaattaccaaaggacacaaaatgtcttgggttgtggaatagcacacatcagagaaatctcaaacatctcttaggaaaatctctaaatgtgtatatccccaagtatcttagccttccacctaccacataaagtgagggtatgtgtccctcaaatgagaaaaatgaaaacacactttcttaccacttcaaatctgggaggtggttggctcatttgttttgaagatactcgacactttgccctagcaaaatattgacttctttgatttttccttcagaaaaataagccctgttattcctatagacctaaataagggaggcagccagtttcaagaggctggctctaacaaaatataccaaggctgtcatctgtctcacttaatgaatgggaaactcctgattgagaagaatttgtcttcattaaaactagctaaaatgtacattgcaaatctgaagaaaacaatcatgactctgctaattt

SEQ ID NO: 215893 - DNA, 385 bp, Homo sapiens
ctggtaccagctgttcacctctaaaaaagaggctcaaaatcattacaccatgttttttggaactcttctctccaagttgactcaaatagcctaaattaattaatgccacaagacaattctcaccacattactagggttcttttgaagtttgtgtccaacatcctcatatacatggcaactaaaaaaaaggggcctctcaactgctggtaggcaaaacctgagtcctcttgttgcttgcagctgagaaaagcaaaataaagcacacttgagaacatctgcaaattttttatttttttatttttttttgagatggagtctcgctctgtcgcccaggctggagtgcagtgtcgcaatctcggctcactgcaagctccgcctcccgagt

SEQ ID NO: 215894 - DNA, 459 bp, Homo sapiens
cccgggcagcggccaggagtccagcggcaggactgattcgctagggggtacagacttcttaggaccgcagaagggaccttctttctttctctgtctctctctctccttcctctctccctgtctcccctctctgtcttccaccccgccttggcgcatctcttcccagcccctagcccatgtctcccccactgtagttttttttggtgggaacgtggtggctggaagatgggcccggaagtgcacactctcatccccttccctacgatcttccaactcaggccaggccggggacgcatgccccagcccaccccagacttgtcctaccatccggttatcccggctgtgctcggggaagaaaaggcgaggccctttgccgctctgccttctgcccctcgggcctgcgctgaccggtgggactcaggaggatgcacacagggaaggaggaaaataaaggcgccc

SEQ ID NO: 215895 - DNA, 475 bp, Homo sapiens
aggctcagtcagggggacaatgggactgatctgtaaatgatctaacttgtcattgcagaaaatatacttactccgtggccacaaaatttcagcccttcagccaagcttcatccatcacatcataaagaataacttgccaaagaggggtttgaaaatccaaaccagatccctctccactcctagagaggccagttccatgacactgcaccggagccaagtgtttccagcaagccctgatcagttgcatgttagtccttgtttgtatgataaacgggacctagtagattaacatcatctcctcagcccaagggctgaccccagtggtgctgctcaagaggaaggaggaggctgggagcggtggctcccgcttgtcatcccagcactttgaggggctgaggagggcaaatctcttgagcccagcattcaagagcagcctggaaaatgtagagattctgtctctaccaaaaaaaaaaaa

SEQ ID NO: 215896 - DNA, 599 bp, Homo sapiens
aaagtgggaaatgatagaagggtcacttaggagcctgcagtggcatggtgaccagtctgttattactcatagatgaccttttctggctcttgaaaccaagctaacgactcctttttcttctgggcctcaaagtttctttgtaggaagtaaagcatttgtcactttccctgcagtgatttattgaaagactgaagataggtcttccttagttaaggacgcacactggctgctcgctccagaagcaccaagaatggctgatggataaatcccttacccatactcctgtttctgcctcctaaggttgctgtgaaaacctaactaaccaaacctcaccagcttggcctatattattaatcaaattcccttctgttctctctgtgtatatttaatactgtagataatatgttttatttaaaatttctaatacaccaaattaatttgaaatagaaaaggctggggacttcattctcatttttgtcatttgtttaatcagtttgggaaaacattttccgttgttccattgtatgcagtgtcttgtcagcatgtacctatctaggagaaaacgctttgttttcagcgttctgtctttaccctcaaag

SEQ ID NO: 215897 - DNA, 623 bp, Homo sapiens
gcaggggaaactgccactttttaactatcagatcttgcgagaactcactcactatcacgagaacagcatggggtaaaccacccttatgatccaatcacctccctccctcgacacatgggattacaatttgagatgagatttgggtggggacacaaagccaaaccatattaaaatagtactgaattttgaataactgtaattgtgaattgatgttaaaatctgattgaaagagtacatcttagcacaacaatacggtatattgcctagtaatagaataatgcttcaagaaggagctctggagaggggacggggtgcttatttaaaaaaaaaaaaaatttggcaaggcaaggcacggtggctcacgcctgtaatcccagccctttgggaggccgaggcgggtggatcacaaggtcaggagttcaagaccagctggccaaggtggtgaaactccgactctactaaaaatacaaaaattagctgggcgcggtggcgggcgcctctaatcccagctacttgggatgctgaggcaggagaattgcttgaacccaggaggcaaaggttgtggtgagctgagatcgcgccattgaactctagcctgggtgacagagcaaggctccatctca

SEQ ID NO: 215898 - DNA, 700 bp, Homo sapiens
ctccacaacgttgtgtaagtttcctgcgtacattgtgttagaatcctctctcttgaaccaatatcctgtatcatgacttccttttagaagggagaaagtgtgttctccctaaagtgaaaattttgactatcaaattagctgaggaaaatagaaggagtttatatctgattcgttttacacagcttgacagaaatcactgtacccatttaaataaattcaaagcagagaatatgctaagtgtgcagtaacgactacaagctcatttgagagcttatgagagtagaacataccaaaatgggctccttaagcaattctaactactacaagggtggaaacgggccttgggaagataatgaggtaaatgtttcagccctacaactgcttcccttttactcctttctgccaccgttcttgttatgaaatgctgtttcttatgtagcaccgtccattgaattatcccttaaaagatgatgtaaaagtatttcttttttttacatggagaaaaatgtatagcagagccagagatcacttccaaccccccctcatctcccatctttcactccacgtaggttcttcagctggatctggaaaccaaattgacaccaggcaggttaaacaagagaaaagtatacaaattttattaattctatgtgtacaggatcttcataacagagtgaagtccaaagaagtggccaaagca

SEQ ID NO: 215899 - DNA, 194 bp, Homo sapiens
gggggctgcgctctgacttgactgctaagaatgaagagaacaaacagagcagggtatcttcacatcctttcattctctatacctcactgaccaatgtcattatttactgtcagagtaccaaaggtcactgaacatctcattttgtaattctttgaaaaatgactaaaaatgactaggataatccttttgaccct

SEQ ID NO: 215900 - DNA, 567 bp, Homo sapiens
actctgtagagctgggtacacaatttccctggactcactcccatctaagcagcctctatcagagggaccagagcagctgtaagatacctgttcaggacagatgtgcataggcctgaagcaggatactgcatcccaagcaaccacagactgccaagaaagtttcctgtcatggcacaacttaagctgaaaaaatagcatcacagcctgagctggaaggggtccgagagctgctatcatccaatcatccaatcccttcattttctagttgaggaatcaaatctacacatctctagcgacctgcccaagataatgcagctaattagggtcagagttaagatttgagacagaatacagaaattttttttaaagccttctgtactgacatttgttttcattaaatttgataccacttctatcctttgtcaacttttatctctgagaaataattaatgttgcaataagctggaatcaaagaaattggtgagagaaattgtgctgacatgtttggggttgtctttgtattctctgaaaccacagaaaacatttgattaaacagtttgcagccaa

SEQ ID NO: 215901 - DNA, 181 bp, Homo sapiens
tagcaaagaaaatttgttcaaatgtgaactagaaggcaagtttcataaacaaaccctggaaaggaactgaaccaagtcacaactttccaattttcattacagttttgaaaagcacagaattaaatttaaaacaaatgttttctcttgcacacacctccatccaacgtgggacagtatcgaa

SEQ ID NO: 215902 - DNA, 471 bp, Homo sapiens
gactgcagggaatggaaaacacatggatgcatttttttaatgtgagatgaatctttcctgaacagttcaaagtgcctatgcctgctcactgttaataagaaaagagttgaagggtgaaaaattaaacaaaaaaaggccttcttttccagaagagagggaagaagaaataagagagagccacacctaggtcgggcgtggtgactcacgcctgtaatcccagcagtttgggaggccaaggcgggtggatcacttgaggtcaggaattcaagactagcctggctgacatggtgaaacctcatctgtactaaaaatagaaaaattagctgggcatggtggcatacgcctgtcatcccagctactctggaggccaaggcaggagaatcacttgaacctgggaggcagaggctgcagtgagccgagattgtgccactgtattccagcctgggcgacagagtgagactcagtctcatt

SEQ ID NO: 215903 - DNA, 509 bp, Homo sapiens
agtcctctcttgacagtggttctcaatgtaagagaagtagatgtcactctaataggcgggcatttgaaaaatacagagtggtttttgttgtcacataacttggggggcattactatggaggggggtaaccaaggagctaaatccctcacaatgcaggggatagacctgcagaacaatgaatgctcccaccagaaatgccaacagtgtccctgttgaaaaatactgcataacgatatactatatcataaccatttgtttatgtgactgtctccctactgcaccgtgagctcctgtaggacaaagaccattttcccccagttatatccctagtatttagcacaaagaccagcaaatagcagatacctgatcaatatttgccaatgaatgaaggaggcaggttctaggcactactagaatgtcaactccaagagaatggaactttatctgttttgctcactgctgtatgcctggcacaggacaggcactcaataaatgattgctaaatgaat

SEQ ID NO: 215904 - DNA, 247 bp, Homo sapiens
cgtgggcaggcaggagctctgtgccactctgcatcttcagtggtatccattttgtttacactatcaaccaaactttctatgctaagaaaagcaagatgcagaatgggtctgaaagaagagattgaatgctgggctggaactcagaccaggattctagccccaagtgtgacatttgtgtgacttgaggcaaatcccttcatgccctgggtctggtttcttggctataaagtggggaagttggaagaca

SEQ ID NO: 215905 - DNA, 352 bp, Homo sapiens
cgaaagcagctttcaggatctcaagctgccacccatcaaagagctgaatgaggagtggaaggaaaactccctgtttgctaatgtactggagcctgtgttggatcgagacaggtggagctgggacaggcaccacgtggactttgatctgtacaagaaaccaccacctttcctcgagctgctcccttcgcccgcaccaaagcctgtaacagtcaggaagaagaaagggaacagccccatctcctgagcagcacagaccctcccacggccaccgcatggtgaacctgcacagcctcccccacacccgaccacaccctcctcaacaatcaacttcattaaagtgcagcaggacaga

SEQ ID NO: 215906 - DNA, 762 bp, Homo sapiens
cagggtctcaggtggggtgtccatagggacctttctcctcctgatttacttactcccccaatttaggagtggaaggaaaactccctgtttgctaatgtactggagcctgtgttggatcgagacaggtggagctgggacaggcaccacgtggactttgatctgtacaagaaaccaccacctttcctcgagctgctcccttcgcccgcaccaaagcctgtaacaggtaacaggcaagggtttgccaagctgggcctcctgatgccgtgggcaggcaggagctctgtgccactctgcatcttcagtggtatccattttgtttacactatcaaccaaactttctatgctaagaaaagcaagatgcagaatgggtctgaaagaagagattgaatgctgggctggaactcagaccaggattctagccccaagtgtgacatttgtgtgacttgaggcaaatcccttcatgccctgggtctggtttcttggctataaagtggggaagttggaagacaggtctaaaggcttcctgagcttcaacactattacccatgactgatctctaggtgtccagccaagagctgggggcagaggctctgggcttcactgggaccttccagcggcaaagatactgacagttctttctttggggtaaggcagagacaggaaacgtaggtcttgctgtaccagtccctccaagtcctcttcctctttatccctgtttatgaaaattgatctcaggatcatctggaggttaacatagaaccc

SEQ ID NO: 215907 - DNA, 2298 bp, Homo sapiens
gtgttttgctgggatggaaaatgttaattcggttccccatgcagcccgctgggcagcatcttgcaaattaagaatctcgtctatgtttccataaaacagtaaagggtgattttctcttgtaaagtggcttgaaccccacagctatagcacaagcaagcagggtcatcaaaagccactccattcttctggaaactgcagagaaagggaacccggaaatctggtatgccggcacagagggggaaaaaaaggaggagagagagaagagacagattcagttggcctcatgctatcttcattggatcttctttggaaaggtattccactaacagcccaaactatcgcatttttagtaccagaagtactattaagttagagtatgaaggaacattatttactgagtggagtgtgccagaaacttgttttgtgctaaataaaagctcacccacgacagaattgcgttgttcctcacctggtgttcacgctataaaaccaattgttactggcccagatgaagaagaacgctatttatttgtggaaagttctcatacttgctttctgtggtactatagagttaggctaaaggaagaagaagcacctttgcagtctggacagaaaatgaaatttacctcggatccattcttcttaagtttgccagattagtaactaccacagaactgaaaaacatcctaagtctatcggtgactgctactctgaccatagacagggttgagtatacaggacaccctctggagattgctgtgtttttaaattattgcactgtatgtaacgtcaccaaaaagattttcttagtgatatataatgaagatacaaaacagtgggtttcccaagactttacattagatgcccctattgacagtgttaccatgccacattttacattttcagcactgccaggattactgctatggaacaagcatagtatctactattgttaccataatttcacctttactgggattttacagacacctgcaggacatggaaatctatcaatgctatcaaatgacagcattattcatgaagttttcatagattattatggagatattttggtaaaaatggaaaataatgtaatattttattccaagattaatactagagatgcagtaaagctgcatttatggacaaattacacaacaagagcattcattttcttaagtacatctggtcaaacatatttcctgtatgctttggatgatggcacaatacaaatacaggactatcccttacatctggaagcacaaagtatagctttcacaacaaaagacaaatgcccatacatggcatttcataacaatgttgctcatgttttttactttttggacaagggagaggctctgacagtttggactcagatcgtctatccagaaaacactggtctgtatgttattgtggaatcttatggcccaaaaatattacaagagagtcatgagatttcctttgaagctgcctttggatactgcaccaaaactctgacactaacattttatcagaatgtagattatgagagaatatctgattactttgagacacaagacaagcacacgggtcttgtgctggttcagtttcgacctagtgaatattcaaaagcatgtccaatagcccaaaaggtgttccaaatagctgttggctgtgatgataaaaaattcattgcaattaaaggatttagtaaaaaaggatgtcatcaccatgatttttcatacgtgattgaaaagtcatatctgaggcatcagccatcgaaaaacttgagagtaaggtatatttggggagaatatggctgccctctgaggcttgacttcacagaaaagtttcaacctgtggttcaactatttgatgataatggctatgttaaagacgttgaagcaaatttcatagtgtgggaaatacacggcagggatgactatagctttaataatactatggcacagagtggttgtttacatgaagcacagacatggaagtcaatgattgaacttaacaagcacctcccactagaagaagtctggggacctgaggtaagagaaacattaccttccagattgtttatttggaataactaatctggcattttgctattaacaaaaacttgatggaaacattttggatttaaatttgctttggtaaatcaaatcctatttttatattaaattgtatcatggtatttttaaaacgcttcatcttaatttctgcgtgatcttttgttggttctgtgttactattttaattttcactgctgtaaatatgtgttcgcagattattaaatatgtgttaaacatg

SEQ ID NO: 215908 - DNA, 940 bp, Homo sapiens
agcgggcgaggcctggacgggagtggccgaggcggttgggcggaggcggagcaggcgccatgtcagcccgggaagtggccgtgctgctgctgtggctgagctgctatggctccgccctttggaggtattccactaacagcccaaactatcgcatttttagtaccagaagtactattaagttagagtatgaaggaacattatttactgagtggagtgtgccagaaacttgttttgtgctaaataaaagctcacccacgacagaattgcgttgttcctcacctggtgttcacgctataaaaccaattgttactggcccagatgaagaagaacgctatttatttgtggaaagttctcatacttgctttctgtggtactatagagttagacatttctttaacaactttacccagcttatcactgtgtgggcatatgatccagaaagtgcagatcctgatgagttgctggggaatgcagaagaaccttcaataaattccatagtactcagcacacagatggccacattgggacagaagcctgtcatacatacagttctgaagagaaaagtttattcttcaaatgagaaaatgagaagggggacctggcgtattgtagtaccaatgacaaaagatgatgcactaaaggagattagaggaaaccaagttacttttcaggattgctttattgcagattttcttattctgttgacttttcctttgttgaccatacctgaaattcctggttatttaccaatctcctcaccacgtggtagtcaattaatggcttcctgggatgcttgtgtagttgcatctgctgttttggtgacagatatggagacctttcacacaactgattcattcaaatcttggaccagaatcagagtgcctccagacattctgagtgatgatgaaagacggagtgtggctcatgtgatcttatcgcg

SEQ ID NO: 215909 - DNA, 1012 bp, Homo sapiens
agcgggcgaggcctggacgggagtggccgaggcggttgggcggaggcggagcaggcgccatgtcagcccgggaagtggccgtgctgctgctgtggctgagctgctatggctccgccctttggaggtagagagacgccagtcgcaggtattccactaacagcccaaactatcgcatttttagtaccagaagtactattaagttagagtatgaaggaacattatttactgagtggagtgtgccagaaacttgttttgtgctaaataaaagctcacccacgacagaattgcgttgttcctcacctggtgttcacgctataaaaccaattgttactggcccagatgaagaagaacgctatttatttgtggaaagttctcatacttgctttctgtggtactatagagttagacatttctttaacaactttacccagcttatcactgtgtgggcatatgatccagaaagtgcagatcctgatgagttgctggggaatgcagaagaaccttcaataaattccctgatcacagctgtctcatgaaagatacatactctcctctggatgaattccatagtactcagcacacagatggccacattgggacagaagcctgtcatacatacagttctgaagagaaaagtttattcttcaaatgagaaaatgagaagggggacctggcgtattgtagtaccaatgacaaaagatgatgcactaaaggagattagaggaaaccaagttacttttcaggattgctttattgcagattttcttattctgttgacttttcctttgttgaccatacctgaaattcctggttatttaccaatctcctcaccacgtggtagtcaattaatggcttcctgggatgcttgtgtagttgcatctgctgttttggtgacagatatggagacctttcacacaactgattcattcaaatcttggaccagaatcagagtgcctccagacattctgagtgatgatgaaagacggagtgtggctcatgtgatcttatcgcg

SEQ ID NO: 215910 - DNA, 730 bp, Homo sapiens
agcgggcgaggcctggacgggagtggccgaggcggttgggcggaggcggagcaggcgccatgtcagcccgggaagtggccgtgctgctgctgtggctgagctgctatggctccgccctttggaggtattccactaacagcccaaactatcgcatttttagtaccagaagtactattaagttagagtatgaaggaacattatttactgagtggagtgtgccagaaacttgttttgtgctaaataaaagctcacccacgacagaattgcgttgttcctcacctggtgttcacgctataaaaccaattgttactggcccagatgaagaagaacgctatttatttgtggaaagttctcatacttgctttctgtggtactatagagttaggacctggcgtattgtagtaccaatgacaaaagatgatgcactaaaggagattagaggaaaccaagttacttttcaggattgctttattgcagattttcttattctgttgacttttcctttgttgaccatacctgaaattcctggttatttaccaatctcctcaccacgtggtagtcaattaatggcttcctgggatgcttgtgtagttgcatctgctgttttggtgacagatatggagacctttcacacaactgattcattcaaatcttggaccagaatcagagtgcctccagacattctgagtgatgatgaaagacggagtgtggctcatgtgatcttatcgcg

SEQ ID NO: 215911 - DNA, 808 bp, Homo sapiens
agcgggcgaggcctggacgggagtggccgaggcggttgggcggaggcggagcaggcgccatgtcagcccgggaagtggccgtgctgctgctgtggctgagctgctatggctccgccctttggaggtattccactaacagcccaaactatcgcatttttagtaccagaagtactattaagttagagtatgaaggaacattatttactgagtggagtgtgccagaaacttgttttgtgctaaataaaagctcacccacgacagaattgcgttgttcctcacctggtgttcacgctataaaaccaattgttactggcccagatgaagaagaacgctatttatttgtggaaagttctcatacttgctttctgtggtactatagagttagcttatcactgtgtgggcatatgatccagaaagtgcagatcctgatgagttgctggggaatgcagaagaaccttcaatagacctggcgtattgtagtaccaatgacaaaagatgatgcactaaaggagattagaggaaaccaagttacttttcaggattgctttattgcagattttcttattctgttgacttttcctttgttgaccatacctgaaattcctggttatttaccaatctcctcaccacgtggtagtcaattaatggcttcctgggatgcttgtgtagttgcatctgctgttttggtgacagatatggagacctttcacacaactgattcattcaaatcttggaccagaatcagagtgcctccagacattctgagtgatgatgaaagacggagtgtggctcatgtgatcttatcgcg

SEQ ID NO: 215912 - DNA, 345 bp, Homo sapiens
agaaagacagtgtcatgcctgtctctcacatgatacaataacctgtacgaattgtttctcctagagacaagcacacgggtcttgtgctggttcagtttcgacctagtgaatattcaaaagcatgtccaatagcccaaaaggtaagcgacatgggctgaagacccaaatatttcacttcaagaatgtataggcggtcaaccaaataatgcatacaatacctccgtacaatacctccatgcaatacctccatacaatacctccatagagtaccatcctcctattacttagcaagttccatatttattctgcacttatttcttcaaaacaatcgtttattcataattt

SEQ ID NO: 215913 - DNA, 444 bp, Homo sapiens
agaggtagtcattcttcaattatttacttggatgtatgaaatttggaaaatctggttatagagacaaaacaattcaggtttttttggtcagattccaggttttaggacttagggtccaccgtgaagaagaaagacataaatttatcacggagtaaaagaattttgttggctgggtgcggtggctcacacctgtaatcccagcacttcgggaggctgggtggatcatttgaggtgggtggatcatttgaggccagcagttggagaacagcctggcctacatgtgaaaccctgtctctactaaatatatgaaaattagccaggcgtggtggcatgcacctgtaatcccagctactcgggaggctaaggcaggtaatcgcctgaacctgggaatcagagattgcagtgagccaagataactcccagaacgagttatctcactgtctc

SEQ ID NO: 215914 - DNA, 259 bp, Homo sapiens
ggattacaggcgtgagccaccatgcctggcctgctgtttatatattttaaacatcagggtttaaaaaatgaatttattataatttatatgtggcacttgcctttagtattaattgaaatgaacagttatccattcctgaactagatgattccatgctaatttgttttttaagtccttatattttgtttttctagttattttaattgccacttctgcattgaactctgctattttaagatgccgtcattgtactgcttct

SEQ ID NO: 215915 - DNA, 434 bp, Homo sapiens
aaacacaagggaagtttctggagtgatggaaatgttctatgtcttgattgactatggttacattggtgtggacatttgtcaaaattctgaatttcatatttggaatttgtatattttgtatataaattatacttcaataaatatgtacatgtatatatatgtgtatatataatacattttgatatgtcatgatgtctatcacttcacagcatattatatttctatcataccatatttacataatggaaaaagatgaaaaggatgctgtattttggggaaatcacaagagattatcacctttatttattttttatacaaatacatataaatctttcacagtacaatacaaatgtcaaaatgtggtattttcattgctctataaattcttatatgttctatgtatgtaataaatgttaaaaacagtgtttatatgt

SEQ ID NO: 215916 - DNA, 156 bp, Homo sapiens
atcatacctaccctgtcttcaacatacctactaatcactcctagtgaaaaaaaacaatgaccaagaagaaacagagataactttcagattagctcaaaaacaaaagagacccattattccttttcgctttctttccttttatcttttcttttcttt

SEQ ID NO: 215917 - DNA, 519 bp, Homo sapiens
cataatagttaatattttcattttctgatatgttgattttaacaataattattatcatgaggatgtctagaggcagagcttctgtgtgtatctgaatgccttttcacaagtgtcctgagaaagattcctctccaagtatctgggttaattaagtaactgcattaaatttattaataactttgttgcaattgtactgaatcatcatctaaaaataattatatgtttggtcatatgcccctttaacatttcaaaatatttgtttttagggtctcagcactgtaatatttatatatttaaagcaattaacatgttctaaggacaagctaactacatgtatggcagtctccgggttttgagtgattagtaattttcatccttgaataagaaaacaggctgtatggtagaggtgaatatagcccttctctgtgagatggaaaataccatacactccttatatggctaaatgaagcagtgatggcaatgcactataattacaatgtatgaaaatttgagactttg

SEQ ID NO: 215918 - DNA, 415 bp, Homo sapiens
tgggcatggtgctgtgcacctgtgtagtcccatctacttgggagtctgaggcagaaggatcgcttgagtccaggaggtcaaggctgcagtgagctatgcatgcagcctgcactgccactgccactgcaccgcagcctgggtaacagagtgagctactgtctcaaaggaaaaaaaaattaattatgcttttattgagcttttttattgtctgttttctcattggtctctaagttgtattgagtataagaactgaggtatatccccacacctagcaatagtgcctggcacacagtagacaacaaatgtgaagttgagtgaatagatgaatttataacaatattttgtaagctaggggttgtgacccaccaggatcatgaaatcaatctagtggattataatcagctttaatttaaag

SEQ ID NO: 215919 - DNA, 395 bp, Homo sapiens
ggcagcagttaaggccaaagaagaaacactggatctgcattccttaggacggtgccctgtgggcccctcacagagcttctctcctgcaactgctaggtgaaagaaggcaggcttagaatcggactgagatcagtagtttctgcagctgggaagatgagtgaggtgagattgcatgtgtgataggctggcactcagggaagacctcagggttctctcctccccactctgaggcccctctcctgcttcctgaagcccagagtctccacccctgtgagccaaacaccttcctgttatctgcctggtcctagggtagccttcgggttggggttagaaggaatgccaatggttaaccttgtggtattaagcttccagctcaggcagatacttctctctgg

SEQ ID NO: 215920 - DNA, 402 bp, Homo sapiens
tgcggtggctcatgcctgtaatcccagcactttgggaggccaaggcaggtggataacaagggtcaagagatcgagaccatcttggccaacatggtgaaaatgattggcatagcatttcaaacgatgaagcacaaatggtctacacagaaatcaggaaaaaatggttgaaaaaattaactctagatggattaaagacttaaatctaagacctaaaaccataaaaaccctagaaatataaaaattagctgggtgtggtggtgtgtgcctgtaatctcagctactcagggggactgaggcaggagaatcgcttgaacaagggaggcggaggttgcagtgagccaagatcgcgcccctgcactccagcctggcgacagagcaaaactccatctcaaaaaaaaaaaa

SEQ ID NO: 215921 - DNA, 406 bp, Homo sapiens
agagcgccagccagtgaagtcaggacttctgtgttctggcgctggtttctacctctcactctagccaggtgacccgaggctggtaagtcacttcacttctctggattcctccacttgtaaaacatgagaagtgaactggatggtcctcccagcaactgcagtttcattctttatctttaaagaaatgtattttttaaaaaaaacaatgtgagaatgatgaaaagcttctcgctactcaatgtccttgccaatgatagtttgatagggaacctaaagttaatagctcccacagctctgactctttaaggaaattaagaggccagaaggcagcgttctaatcagatttgtgggtaagatggttatcgatagtagttaatgatggatgaagtgcactgaggctcttaaa

SEQ ID NO: 215922 - DNA, 206 bp, Homo sapiens
ggaccagattcatgcaggtccttgaaggccttggttaagagtttgaattgtatcctgcaaatcttttgaagggttcctctctaaagatggaaggagagaggaaactgtagcagtattccaggtgagagggagatatgacttggattagaggaaactggaagaaatgaatggattaaagatacattttgaaggtaaaatgtgtctaa

SEQ ID NO: 215923 - DNA, 173 bp, Homo sapiens
ccaaatctcccaacacgagtacattgtaggtgcccattgagtgcttgctgaatggaggaatggttagctactgcctcctacttctcgttgcaggacatcaatatctttctaaaatcatagtaatgtgaaggctatccagaaagtcaaaaggttccacagagttggccacaaaa

SEQ ID NO: 215924 - DNA, 274 bp, Homo sapiens
agctgtgtattgtctatggtggcttttgtgctacaaggcagaattaagtagctgcagcagagacctgtggcctgcaaaactgaaaaacatttactctctggcccttagctgaaaaagtttgcttatatctggcttaaacaatcatcaccaccattttcagacttgaactgcttgaaattttcaaggaagttttttttagctttcagaagtggaccttctcactttgctgaaggtgataagggaaagctctgatttaccagtgttgagtttcagg

SEQ ID NO: 215925 - DNA, 483 bp, Homo sapiens
acacacacacacacacactctctctctctctctctctctctctctctctctctctctctaggttttcatccagttcctggctcctaattcccacagcccgttagccttgtgttatgatgtgggtgtgtcacaccgcaggagcgggcctcaggaaacagcatctctccagccttctcctgcccttcccttcacctgccccaaggcaggactctaatcttcctctgcctttcccatagtgggtcataagatcctcattccagagggagaatttgggaagggaatgctgacatcatgaagcttccattaaaaacccaagaggactggcctcagaaagcttccgcatagttgaacatggctggacatggtggctcatgcctgtaatcccagccctttgggaggccagggtgggtgatttcctgagcccaggaatttgagaccagcctgggaaacatggcgaaatcctgtctctaccaaaaataccac

SEQ ID NO: 215926 - DNA, 405 bp, Homo sapiens
taggctgtctttcttcactctctgctaaaatagtcacacataatatctagaagcattaagattaataagtaactaatttgaaaattagaacaagtcccaagtgaagtcaaagttactgtgtggttgacaggaaacatggctggatactaagagtgtgttcacatctgttttatgtagaggtaatactttcattgagactcctgatttaacactatttcttgatgaataacatgtaaatcataaaggtggaggttattacctaataattcatattactggtacaaactttcacctaggatatattcctatacctgatgtaaaatcagcccagaatggagaagttacttcacttattagagcttgtcaattaactaaaaaccaggattaaatacagatgttctacat

SEQ ID NO: 215927 - DNA, 273 bp, Homo sapiens
tgagggtgttgaaaaggcagagaagaaggaaagtgctgaagaacaaagcaaagaattggggccaggatggcccaggtgcagaggagaggagaccagccagcttggaggatgagaagggggagctggtctgactgagggatgggcagcctgagccattaccttggggcaattctactgggatctttttttttttttttttttttttgaaaaggaatccccgttttgtccccagggcggattggggactggagggggcccaccccgggcccctgg

SEQ ID NO: 215928 - DNA, 415 bp, Homo sapiens
gggcatcccttggcttgatgtaaagggaacgaaagtagtaggccacattggggttagctgatgtaactattaaacatacttgaaagcaagtatttacttttggagtttgatatcttagaaagaaacttcattagaaattaagtagtgattagtaatgagtagggattgtcactcattacatgtcattatgtatattagaatcacacatttcatatatagtgatagcatattgaatacaaaggtttttaaaatcttaactacaaagtttcttagagtaacacagctttaaaaatactaattttgctatactttgtttactaagtaactttttctcttctgtattgttattgccaaagtaatgatacaaaaatagtacaacatgttgatttaaaagttggaaagtgaaaaaaatttt

SEQ ID NO: 215929 - DNA, 635 bp, Homo sapiens
tataagtaataggcccccaccctttactttttttggtatcactatggacctgggtgttcatttattattcagtgtgttataatccattataatcatgccctttcatgttcaaacttccaaacttggccagagggaacctttttagcccatctccagtgttactgaggagtctccatcaatctttgaatacttctttggtttttgatgcaaaagaagctccagaatcaccccgtaccttccctaccccatttctccaggaaatcagcttggaatctgccatttctttaatgtaccctagctccttttggtggggagtggtatttagaaaccaagatcggggcattagatgtgctcattgccactgggatgtcactgttctatgtcctttcagtggacacagctaggagagaaatatgtacatgtatttaatgtaaatatatataattaaatatgagtgtgtatatatctatatatttttaaatcataagttaatactgttatttcttactgcaagccaacaccaccaggttcttcctccttccttgattccatatttgcagctcccttccacaacagtgagaaccctggtttctaacatcatcaatctattcatttgccttatcctacaataaaca

SEQ ID NO: 215930 - DNA, 243 bp, Homo sapiens
caggaatgggtgaaggtcctttaaacaaaaaaagagttcatgttagttattttgctgtttcactgtcatacaaatgtgttatgacccttgccaatatataattatgatggagaattatttttccaccaatgagaataattggcaaactgaccaactttatagattatgccccttaaactcctgctatgtctcttattaagtgagccagttcttctgaagacaggacttgcttgcaagcactgc

SEQ ID NO: 215931 - DNA, 401 bp, Homo sapiens
atttatttatttatttatttttatttgagacggggtctcgctgtggtatgatcatggctcattgcagcttcaaccttccagccaagtttaatttttacaccaatgattcatttctgcttttacaggtgattactttatctcactagaaaaaaaaaatgtaaaaatctaaacaaaaagtgtccaaaacttacaataagccttaatctcgaataattaccatgacatgtgttacttgtgtgcttattgctgtacagccttctttggctttctgacaagagcaactgctgagcagaagcacttcagcctcgtctggcatttgatgaatttgattaatgtgtgctatggtaagtctattcccctgtataattttatgggagaggccatgtgcaagtctgaattta

SEQ ID NO: 215932 - DNA, 400 bp, Homo sapiens
aatgcagtggcacggtcttggttcactgcagcctccgcctcctgggttcaagaggttcttgtacttcagcctcccaagtagctgggactataggcgtatgctaccatgcccggctgatttttttttttttgtatttttttgtagagacaggatttcgcagtgttggctaggctggtctcaaactcctgacctcaagcaatccacccaccttgcctcccaaagtgctgggattataggcgtgagccaccgtgcctggcctgttaacagttatgttgttaccttccatatctttatctatgtgtatacaaactgtcctctgtaacccattttgtacatattttttattatataatttatttttaaaaaaattcttttataggatactttttcacactaaaga

SEQ ID NO: 215933 - DNA, 743 bp, Homo sapiens
tggtcttgaactcctgacctcaggtgatctgcccacctccgcctcccaaaatgctgggattacaagcatgagctactgcacctggtcagaaacagctattttaatagtgtcatctttaagaaagaaaaagttaagcggcaaaaatatgcttctgtatttagaaccatggacctttaattataactctaagactctatggattatttacaaaggaactaagaaaggcctaaacctgctgaagattatgaaggtagtcaatgacagaagacttgctagagctaagcattcttgtctctggtatagtgctatacgtcctcaactatgcctctgcagcaatagccttcctcttcatcttaggattaatggtactgagaaaatttaacatacagaatacaaaagtcactatcctattttcctaagaagaaaactttagaaatccatccaaccaaaacttaattttgccttttccttcagtgttcaagaagaaaaaaatgtatctagtagctctaagtggacagaaggacaagtgaaaactctagaatgcttaaacaagctataacaacaggtttgggcaccatctggtatcaccttactgaaactttccttagtaactcccctacaccccacaacaaaggacgagaaggaaggagctgaattcctactgttttggaggctgaaatgatgacccgtttgcctcccactccccctgctctgagggtatagagtagtgctttgccataaaa

SEQ ID NO: 215934 - DNA, 504 bp, Homo sapiens
gcatgagccaccgcgccgggagctggccctcttctttcctccacgtgaggatacaatgagaagtcagctgtctgcctcctgaaagagggctctcaccaaaacctgaccatgctggcaccctgatcacagacttccagcgtccagcactgtgagaaataaacttctgttgtttacaataataataatgctataacagatatcttcatgcatataaccttttcagataatgtattgcctctctggggagacttttttgaggtggaaatcactgggtcaaagagcaagaacacttttaaaggtgtgatacacaatgcccaacagttataactatttattgaccccaccaggaatgtgcacagacagacccacagtgcctctaggactccctgttatgttttatgtatttgaattagcgaacagttacattttattatttttgtttgacttgtacttctttcattactagtgacgttgggcattttcctatttataaattaagaatta

SEQ ID NO: 215935 - DNA, 592 bp, Homo sapiens
gctcagtagctggagcagctacgtgcagcgtaggggcttttctcttaggggtttccttgccatagcgtatgggagatggtgttaggcgggttaggaattaataaatgccatagagaggcatcctgcgctgtaggaatgaggacagagaagggggaaagtttctgggggagaaaatagttttaaattgggcctagaaagacaaggcatgaatttgtttctctttactcacacgttttcatagaggaatatattagctttagaaactggaaagcaaatggaagaaaattaaaataacctgccagagaaagccattgtcaatatcttggtgtctaccttccacgcttgtttctttgcatacacacttggaaagtgaggtactatacgacctgtttagtaacgttaaaataatttaggctcatgcctgtaatcccagcactttgggaggccgaggtgggcggatcacgaggtcaggagatcgagaccatcctggctaacacggtgaaacctcgtctctactaaaaacaccctcccactcaataacatgtcggccgccttggcccagtcggattttgactcgtgcgctttgcttgcg

SEQ ID NO: 215936 - DNA, 650 bp, Homo sapiens
gctcagtagctggagcagctacgtgcagcgtaggggcttttctcttaggggtttccttgccatagcgtatgggagatggtgttaggcgggttaggaattaataaatgccatagagaggcatcctgcgctgtaggaatgaggacagagaagggggaaagtttctgggggagaaaatagttttaaattgggcctagaaagacaaggcatgaatttgtttctctttactcacacgttttcatagaggaatatattagctttagaaactggaaagcaaatggaagaaaattaaaataacctgccagagaaagccattgtcaatatcttggtgtctaccttccacgcttgtttctttgcatacacacttggaaagtgaggtactatacgacctgtttagtaacgttaaaataatttaaaaaaaaatcttaacagggcagttaatgttaattataacactttgggccgggcgcagcggctcatgcctgtaatcccagcactttgggaggccgaggtgggcggatcacgaggtcaggagatcgagaccatcctggctaacacggtgaaacctcgtctctactaaaaacaccctcccactcaataacatgtcggccgccttggcccagtcggattttgactcgtgcgctttgcttgcg

SEQ ID NO: 215937 - DNA, 180 bp, Homo sapiens
gtgagggtcttttatggtttttcttttttacctgctcaagctgatctgttgaccagaatagctaatagatagtgctgagaaagaaatcttaaccatagctgaaataaattgtttatattaataagggttaaaatgtgactatcttacttcaattagaaaatgatgtcatgatttagaata

SEQ ID NO: 215938 - DNA, 435 bp, Homo sapiens
ctagtttttgtatttttaggagaaacggggtttcaccatgttggctaggctggtcccgaactcctgacctcaggtgatccacccacctcagcctcccaagttgttgggattacaggcatgagccactgcgccctgcctatgatgacctttatattttcatatggattaaagataccgtccagagtgctttcatttcatcttgaatgctcgttttagcatttcttcttggacaggtctagaatactaattaacttcctcagctcttctttaggaaagtctaaaattcgcctttatttttgcaggtgagttttgctaagtgtagtattcttcattgctgttttgcctatttttctttaagcactttcaatatatcacctcactgctttctagcctgaagatgtctgctggaaaatatatataatcttacagagttta

SEQ ID NO: 215939 - DNA, 289 bp, Homo sapiens
tccccacctctttcccaggccccaccaaggtcaaccatgtgctgttggaaagggaacaccaacgtgtgttcagtagtcagaaggctctgggagacatatgaggctccatttcctcagtctggccaccatctcctccttttcatttagtaaacacttaatgaactcccactgtatgcaggtaccgtgcgttgcactggggagtcaaggacaagtgagccacagagcctgtccacagaggctcatgggaggaagcacgtgtgcgaaatgataaatgcaggcgtgcacaggc

SEQ ID NO: 215940 - DNA, 743 bp, Homo sapiens
tgatttgtcagagccattctggaggtaaaaagagcttttgggaatctacaaattcttttgtgaaaattaaggatcggagcctggctgaattaggcattgtcctataaaccagatttggggagaatgcataatgatgccagagcagttttctcatccaaaaagagtcaagagtttgatcaagcaggaaagaaaattgaaaggaatatagctacagctgagttacagaggtctgagacattcttggcaccctttaacccctatttttgaggtgtatgagaaaacctttgataggttgtacactggctatacaacagaatcacactagattaactcagaatatctggggtgaggtcaagaccttaatatatttaaagagatgcctctatacgtccttcctacctcctgagttgacctaatgttaagccaagtattgagaaccactggcttacagggatcccaaagaagacgaatgtaatgtctatcttcccatggtgtatgccaaacttatagacaacctccctgccaacccttgcctgctgactccattcaagatggcatttgagcacagaatctctaggcaaactagggaacatcttactgaagacagtttagacttgactactggtgcctcttatgcgggattttgaagactcagctttatgaattgagggtttggtggacaagtttgacagtttaagcactgacgtgggcaggaagccaactattagctggaaggtctgaaa

SEQ ID NO: 215941 - DNA, 392 bp, Homo sapiens
gaacagcttaatatcttttattagtttatcttttttctttccattaaagagaataatgatacacattacaatatgagattaacgtgtcaaagcagagacttagatttggcaaatgacaacttgtcattcttggcatcagaaaaattaaattctatgtgtattcacttatttaggtagagtgtctacctttcaacctgaagactgcgaggcaatgcttagtttgacacatgatttggaagcttgatagaaattctgagacattgataaatttacgtagtttgaagtacaagggtataaagagtttgctgtttgtaaataaacataaatatcttggacatcttttatgtaagctcagattctccctcttaagaaataaaaacaacaacatttcc

SEQ ID NO: 215942 - DNA, 184 bp, Homo sapiens
aagaggaaggaggaagagaaggacctggcagaaggaatgagggtgaagctggagtgacttttataaaatataaataaatcgcatcacccccttgcttaaaacccttccgtggtatctggtgctctttttttaaggaaaaattgtattattttaattatttttatgtacagaaaactcaacagtg

SEQ ID NO: 215943 - DNA, 452 bp, Homo sapiens
accctcctacccctcctcctttccccttctccccctcagtccctgtgacccagcctctggcccccttactgatctgcaaatgcctcaaacatgaccctacctcagcattttgcatttgctgattcctctgcctcccctcctatctcctggctcttcctcatttctttagggacaggtgcagtggctcatacctgtaatcacagcactttgggaggctgaggtgggagtatagcttaaggtcaggagttcaagaccagcctgggcaacagggcaaaaccctatctctacaaaaaataccaatattagccagatgtggtggcaggtacctgtagttccagctactcaggaggctgaggtgggaggatcacttgaacctgggaggtcgaggctgcagtgagctatgtttgtgccactgcactccaacctgggttacaaagcaagaccctatctca

SEQ ID NO: 215944 - DNA, 397 bp, Homo sapiens
acatacagagcctaattcaactgcattttaatgtctccaccccgaagtgaatatgggacatatttaacatgttttattggtacacatgtgtgcaactctcatgaatattcataaatcctcttaaaacttattaaatatatatgtttagccaactgatttagtgtaaaacccctgtcccttcaattcctagcttgtaggttgcaacccatcaaaagaaataaagctctcttttccaaatgtaaagatcttatgattttaagccaatataattgaagacaagagtaggatccatggagcagcccaggttcccccagcctaagtgaatgcacaggtgccaggtggagccattgacagctcatttgtctccctgacagctttgggaggaaggtgggtaagc

SEQ ID NO: 215945 - DNA, 407 bp, Homo sapiens
taagacctgacttaattaatactcaagtaatcatagctgctgctgatattatcaggacctaaatcaagtaagcaatcatgaaattggaaataatatcaattataagactgtcaaaggttgatgagcctactactcaatatctgatagaaaaaaacacagctgaatttatcacttactatatagtgggggagaagtgttgttcaggcatagtcctccttgagcagagcagactgttaatctcgtaggttttttgggaatatgaaattcatattgacacctataggactgtagttactggagtgagactgttgttcattgattcacattcagaagcatgttaattggagtgggtccatttctgtttgtttgactttaggaataaaggactcttgctagttaaaaaaaaa

SEQ ID NO: 215946 - DNA, 648 bp, Homo sapiens
cgcggtggctcacgcctataatcccagcactttgggaggccgagacgggcagatcacttgaggtcaggagttcgggaccagctggccaacatggtgaaaccccatctctattaaaaatacaaaaaattagccgggtgtggtggcgggtgcctgtaatcccagctatgtgggagattgaggcaggagaatcacttgaacccagggggcggaggctgcagtcagctgagatcacaccactgcactccagcctaggcaacatagagactccaactcaaaaatgaacatatttgaaaaatatagaaaaatattaagtagaacataagtcatctaggtaagtcccacttctcattaaaagtgtatattcttttagaatttctctctttttagaaaacacagatatattttacaaagtatttttctgataattaaaaattttttattttggagctcttacaatgatgtagatatataattatagacattatattgttaaaaagtgaaaaagaaggttaaaaacagtatcgtagaatgattctctttatatacgatatgtatttatagaaaaatacaggggccaggctcagtggctcatgcttgtaatcccagcactttgggaggctgaggtgggtggatcacttgagcccagga

SEQ ID NO: 215947 - DNA, 534 bp, Homo sapiens
catatataattttaaattttctagtgataacattacaaagtaaaaataaaccagtgagattaatgtactaatatattttatttaatcccatgtttccagaatattgtcattttaatatagaatcaatacaaaattactaagaaggatttttactttttaaaaatactaagtctttgaaatgtggtatacattttatgtttacagcacatctcaattcagactacctacatttgaagttacagcagcatgtggctaggggctgccatattggttggtactacgtagactttaatgaagtccatgtaatatgcatcataagtaactttatatcagatgaaatgtttgtctgcatttagtagaagtctagaattgactccttataaaatggggaaaagctggtcagatatctgtattattttgtatgtaaatttactcatagaaaaccaataaggcaatgtgctctttcaatctagagagaatatgtcagtcaaatattaaagtggcagccagagcaataaaacaagaccctgtctc

SEQ ID NO: 215948 - DNA, 504 bp, Homo sapiens
tttaaacatgtacatttaggtaacactgtacctataaagctcttagtgtctggcacatagtaagtatcaataaataacagcaacatgtgaagacagtacaagaatctgtgaaacctgtaatagcagacccaatataatagctagcatttattgagcacctacagtatgctaagaattcttcatacacacgcacacacacacacacacacacacaaagctatacacacagttgtatttaatcgttacagcattccaagggtacatcatattaccccagtttacagatgaggtaactgaagcttggtgaggttgagttgtccaaggtcacatgtatgtctcagtgactgtgccaggatttgaattcaggtttgacctgaccaaaacttgagcccttggccattaggatgtaccttggaatcccatttttacagcctccattgccacacactacccccgagaacagtccactagcagcacttgtttccctaccctccagtgcctggg

SEQ ID NO: 215949 - DNA, 684 bp, Homo sapiens
tcttcaatgatattttagataatgatcttaaaagcttttcaatgcatttttctttaattattaaggaaatggaaaagcagttgttgtcaatgtccatatgggggcttatattttacttgtcacaagagtgtaaactaatgaaaacaaggtcacaaggttgacacacttgccagagaaagaacctacaatgcataatcaaagatgagacttaccatttaaaactcattcaatgacggctcgtattagtgatattcatgtgagaagtacatggaggagttaactatttcttcatatatccaatgtttgccatggatcatagctgtagcaaaaagtaaattcaataaatgacttttttatacactttcaaagcatttgaagttctgtttagtgagagaactttagtaaatatttttagaagtagtaatcagccattaggacaaatgatggaagaaaagtgccactctactggtggggtagggcatttcaaaaaacaaacacaatgttagccttaacatttcatgtttaagtttcttttattttgtaccattaaatatgtatagtatgtagatttgttgttgacaatagcagccgccagccatatgtaactgttaaggactcaaaatctggcttagctgactccaatgcgcgcgcacactttcccgccaggtcctttggcctcttccg

SEQ ID NO: 215950 - DNA, 295 bp, Homo sapiens
gaacttgtgggttcaagtaaacctcctacctcagcctctgaagtagctgtgaccacaggcacatgccactgtgcttagctaaatgctactatgcgtattgactgagatttttctgtcatttaggtaatatgccctgaatttcaagttgaaatagagctttttgaaaatactatctttgggtatgagaatctttttttatcatttattaaagtggcaacatttaggttattgtttgagatgtttttatttatttttactttttgttacttttccattttaccttctgaatatgatt

SEQ ID NO: 215951 - DNA, 169 bp, Homo sapiens
ttccactaatgatggcatctacttggtaggctgagtagatatgctaagcgacaaataagtgatgccaaaaatacacaagatgggaatgggaagcgggtatttctggtatccctctttcactcacaatactcagaagggaaaaaaaggctttagtaaaaatggatcacca

SEQ ID NO: 215952 - DNA, 651 bp, Homo sapiens
agactccatctcaaaaaaaaaaaaaaaaaaattcacacaaagaaattgcaaaagtgatacgatgaattcctttattctcttcacctctattcaccatttgttgacattttgccacaattgctttctctctctccctttatacatctgcttttttctgaatcatttggtaggaagtttcaagtaattatgattctttaccactaaacacttcagcatatattttctaagaacaaggacattctcttacaaaaccgtaatataatcattaaatttgggaagtttaacactgatacaatattatctaatatacagttcatttgcagattctgctagttaaccaagggcgttctctatagcctttttcctcttctttttttttgaggcaagatcttgctctgtttcccaggctggagtgcagtgatgcagtctcagcttacctgcagcctccgcctcctggattcaagcactcttcccacctctgcctcccaagtagctgagactacaggtgtgcgccaccacctggctaatttttgtgtttttgtagagacggggttttaccatgttggccaggctggtctcaaacttctgagctcaagtaatctgcctgcctcagtgtcccaaagtgctgggattacaggcatgagccaccgc

SEQ ID NO: 215953 - DNA, 456 bp, Homo sapiens
ctatattctttcagcagctatttctacagtcaattctaaccttgtggagttagtcacaaaacattttaaaaactgctaattacttgccacataaacagttccatcataaaaactcttccccttcttgttccaaaacaacctggttaaatatacatgtggaatacaaaataactttaataggcttggcacagtggctcatgcctctaatcccagcactttgggaggccaaggcgggtggaatgcttgagctcaagagttcgagaccagcctggccaacatggtgaaaccctgtctccaataaaaatacgaaaattagccaggcatggtggcacatgcctgtagtcccagctacccagggggctgaggcaggagaattgcttgaatccgggaggcagagattgcagtgagccaagatcacaccattgcctggacaacagaggaagactctgcctcaga

SEQ ID NO: 215954 - DNA, 396 bp, Homo sapiens
ctccatgttattttgtcctgtagaattttccacagtctggaactcttgttacagcatgattttctgtttactctagttcctgtaaatttgttaaagtgaaaataattgatgtcttatactatctggtcactagaggtagaaaaactatgtgataaacagtgtgtattggcaaaatttattaggtccatgtatatagagatatttcaagaagcatatacatttagcagtgaagcaaatgtcaggttttccagattcctattattgagaacagtttaagtttagttcagttaaagttcttacagaaaatagataacatttaaaaatattaagtgatgtttggatttgctgagatctttgacctgagtgtgtttgttgaatcaggttttagcttcttta

SEQ ID NO: 215955 - DNA, 318 bp, Homo sapiens
acgatgatatcatgctaaactgttatgctaaagtaatgtgaattggccaataaggatatggaaataggtccagtctcactagaactgttcaggaaatgtgaatactaatcccctagatacctacttctgggtatatatctaaaggaactgaaaatggggctgagcttggtggctcgcacctgtagtctcacccactcaggaggtggaggagtgaggatcttttgagcccaggagttcattgctgtagtgagctatgatcacaccacttcattccagcctgggcgatagagctaacccatcgcttaaaaaaacaagaag

SEQ ID NO: 215956 - DNA, 273 bp, Homo sapiens
tcttaaagtctttgatctttcttataagtgcagagaagaaaatgctgacgtatgctgccttctttctctgcttcacctacctgaaagggaagggcccccatcctgtaatcacgtgacatgcttcaccttgtcaatcacttagaagattcaccttccttacgctgcccccttgtcatgtatgcaatagatatcaaagagcctagccgttcggggccgctaccagtctccgcgtcttgatggtagtggtccccggggcccagctgttttctcttt

SEQ ID NO: 215957 - DNA, 409 bp, Homo sapiens
attttctcctttccatgctccttcctgctacaagctactctctctctctacttggaatgcatttccttccccctcttaatccagttaatttgacatccttcaggttttgactcatttttctcattcccctgataaagtcaaactcttggtctggttgtcaaggtacctgtgcctgtccttcatagattttatcactgttgcagttttagagttattttgagtaatgttttgattgccatttctaatagattgtaatatctgtcagcacagagatcatgactgcttttgttcaccactgtataccaggtgactagtatagtgcttcatgcttaataaatgcttaataattttttatttaatggatgaagagtagtagaaatcacatacctctgcttgtcaagacatctga

SEQ ID NO: 215958 - DNA, 486 bp, Homo sapiens
ggaaaacaaagtctcattggctttggggatacacagctattgctattaagtaatcttttcaataaagacttggctttagttaatttatctgagcattgcttctgttagggacatgtcacaagtaggaaatcatccttcagagacagatggaagtagaagtggttaatttagacactattcttttttttttttttttaaatagatgaaagagagtttacttatgtatttatataatggccttggtccaaaaaagactaaagggagctcaaaaaagaattatagtaactttaaaaaatacattaaacatatccaagatcttaaatgtatcattctccccaaaagctagttgcttccaaacttgacttaatattttgcatgttttccctccattgcttggtaagtgtatttgcctcttctttctgcagttgatgtctgacggctgagttttgctgttttgtcaactgacatttccccttctgtttcacc

SEQ ID NO: 215959 - DNA, 548 bp, Homo sapiens
gagctgttattgatttttttttttaagttaggaaccatgatagatatcttaatgtggaaaaattcggagttcatgtgacatacatctttcatttttatcagaactaaaaactgaggttttgtatttattcttgagcccacctgaaatgttgacgggatagctatactaacttagaatatgtatactgtagtacttaagcatatatgctgtataataatatgttttagaaaattgctcaacttggatttgatgtttttcttttgctcagaagtgtgatgtgttcttgttctgtaataatttagtagacttctaaattagtgtactaaagtaaagaggtaattaactggtacaaatatcaccatgtttatttgtaaggcatcactagtttatatcagagacctggatatggcctcagatttctcctgttttaagagccactaagccacctattttccatttctacactacgtgtttcatggttaggtggccaagtcctatgcatgtatctcaggtatctttagtgaccaacatgaagtctgcacatattg

SEQ ID NO: 215960 - DNA, 310 bp, Homo sapiens
gcataatgagcttccccattgtcttccactcatcaaaaatccatctctaccgccttctagtgcctgttccctgaagtcttcccttctgctccccagaactctgtcgtggctcaatccaggctgcccagtacatggatttattgggctgtttatgctgtccaccgtgtgcttagaaattccttgaatgcagagactgttaagctttgtatatacttttagtgcctagaacagtcccttatacttcataggtgcttgttggcttaatttcatcttcaaaaggaactttgattttgatggatatttgaatgtt

SEQ ID NO: 215961 - DNA, 471 bp, Homo sapiens
gtgggggaccacactagctgtgcgctttgcctggagaggtggggatgggatgtcctggtgaagggctagaggggtagccagggcccagctgtggcagtgggggcagtggcactggactccagtgtggtgaccatgccggccctggaggggtctgagccggggcatggcttggcaaaggtcatggtggaactggacagctgtgtgggagcggaggggaggccagggtaggcagggccctcacaggcaattgcagccaggccctgacgactgcaagggttcccatgcgggatccgggacccacactggacgagccccctgccactctccacacacttcacccagtctcagtcactctcccaccagctccgaaacagaggggaaactgaggcctcaggaggtagctctgggccccagctcacacagggactgcaggggcttggacccagcttccccagctccagagccagcgcc

SEQ ID NO: 215962 - DNA, 536 bp, Homo sapiens
gagtagctgggattacaggtgcgtaccaccatgcccggctaagtttgtatttttttttagtagagacggggtttcaccatgttggctaggctggtctcaaactcctgacctcaagtgatctgcccacctcagcctccaaaagtgctgagattacagaggtgagccaccacgctggcccacttgcaacttcctttcaaaagtaaacccaaatagtgttgtggatgaggggaagaagagagggagagagaatcatacagccaatgtgataaagcggtaacatctggaaaacatgggtgaagggtatagttttgcaattttcccattagtctcaaattatcccagaattggttaaaaacaaacacataaacaggtcatccatattcatacttctgctgctggtagtctaaaagcagctatgttctgcaccaaaagtattaaaagagataaggtcttttcatttcgtcattcagtccccactatcattcatgactgtttaatcactatctgcctaagagtgtatataggacatgtagatc

SEQ ID NO: 215963 - DNA, 441 bp, Homo sapiens
atgttgcccaggctgatcttgaactcctggcctcaagccatcctcctgccttgtcctcacaaaggaatggaattacagaaacatccctacgttctgcaaagaatcccattttttgttgactttcttaagccaaggcacaactccctctgactcctcccgagtgtgagcccgttccatctgcagccaacacttccggaaaaagagaagagaggggagaaacaccatctcattgttggcatgtggtgtgacgagccaagtgatggcccttcccactcggtcttcagcgctgagaggagcgtttcttctccccaagaaaacacatccagtgattgacctcagccactttatcctgggctgaccatgggattaggaccacaaagaaaatatgatcaaggggttatgactcttaggcaaaaataaagattctattttattgttttt

SEQ ID NO: 215964 - DNA, 542 bp, Homo sapiens
atgttgcccaggctgatcttgaactcctggcctcaagccatcctcctgccttgtcctcacaaaggaatggaattacagaaacatccctacgttctgcaaagaatcccattttttgttgactttcttaagccaaggcacaactccctctgactcctcccgagtgtgagcccgttccatctgcagccaacacttccggaaaaagagaagagaggggagaaacaccatctcattgttggcatgtggtgtgacgagccaagtgatggcccttcccactcggtcttcagcgctgagaggagcgtttcttctccccaagaaaacacatccagtgattgacctcagccactttatcctgggctgaccatgggattaggaccacaaagaaaatatgatcaaggggttatgactcttaggcaaaaataaagattctattttattgtttttaaatacagacattttattaagaagttaaacattctataaatttcaatctcactaacggatattaggaatttttagttattaaagtactcatgagatgtttt

SEQ ID NO: 215965 - DNA, 532 bp, Homo sapiens
aagaaccacagaggttgaccaccctggcaggtcttgtacgtgggcttactacaagagtcaccactagccttttgacctgccctgaggctcaggtaattatctctgccaaagggcactgcagtcactgcagcccaagcagctgctcccctctttggagagaaagtcacagatccttgagtttggttttctttggctctgctgctgtgaagcaagcctcagtcctagattctttgaccaaaggaagaaagagtttgggctgagtttgtttccttatgattctgctgaaagtaaaaaccacatgtcagtttgtcctgtgccacaaaagtagcaaaatcacttaaggtcaggagttcgaaaccagcctggccaccatggtgaaaccccatctctactaaaaatacagaaattagccaggcgtggtggcgcgtgcctgtaatcccagctgcttgggaggctgaggcaggagaatcgcttgaacctgggaagtggaggttgcagtgagccaagattgcgccattgcactccagcctgg

SEQ ID NO: 215966 - DNA, 363 bp, Homo sapiens
aggagaaactaacaatgaaaacggcctcgttgacggaggaaaagttggaatgcagcctctggtgctgtttgagcgatccctctccccggggcctggccgcgcgctgctgtgttctggaagggctcattgtacagtcaaggcggcagggccttcttctgtcacccatgctggagtgcagtagcatgatcacagctcacggtagcctccaccttctgggctcaatcctcctacctcagccttccaagtagctgggactacagactagccctgcttgcaacttccacgtgcagtcctccgcaatgctgccagagcggcagctacaactctatgattgaaggcatcgccctcctggttctccatatt

SEQ ID NO: 215967 - DNA, 601 bp, Homo sapiens
tccaggtgtcagaaggtatttttcaaagtgcagatagttaaaggctgtctactgaaaggaaagtgaagaaaaatagagatgccagcatgctaaattagatgacacttaacactcaaacatttgttgaattaatgcctgaataattaagagttgattgggcagagacacaggaagattgtgtttaagttacagacttggcttgcatccgtgtttccttctaaagagaccaccttctccatttctgcattgtctttctttagagtgaaaatagctagtcatccccaacatatttggggttttgtggtaatttaaatatctaataggcactgcataatgccattcaatggttgtacctaaatataaccctactaatcaaaatgaggatattgtgtttaagagtctggctatatagtctctggtctgattatagtgttgagtcttttttcaaaaactgtctctatggagtaaagcagggtcctgtgtttcattgctttccagacattccccaacaagtgctgaatggattttgttgcaaaagtttctttggaagtctatttagaattcagattgcattttcccaaggacacaatattcttcttgt

SEQ ID NO: 215968 - DNA, 251 bp, Homo sapiens
gcaaaagagaccagaagggaagaactagccttggagtcaggtctccaaccaagtagatctgtcagagattgatttggttgggaagctaatggaggaggaggagtactgtaagtagctgaaaccatctaattgatgtgggctaaagatgatttagagaactaagaaaggaaagagaaggaaggaaggaagagagggagggaggtgagcaaggggaggaaggagagagagacagaaaagaaaagagaagaaaa

SEQ ID NO: 215969 - DNA, 263 bp, Homo sapiens
cccacagtatttgtcatatgaaataataaatgaggttccactcatgcggtctaagcaaagtaaaagagatgcaaagctagagttataatcagatcacaagcacctctcagtgtcctgccaataaaaattgtgctcctggccagatgtggtggttcacacctgtcatcctagcactttgggaggctgaggcaggcaggattgcatgaggccaggagttagagaccagcctgggcaacatagtgagatcctatctctacaaatac

SEQ ID NO: 215970 - DNA, 420 bp, Homo sapiens
tgaagagaagtgaggaaagctagttccatgtcactctacacaaaccatggtctgtgctgtagatgaggaacccagaaattttgaaactgacttatgtatacatacactctgcccattaatctcctttgagaaggagagaaagctttatactctccaaaataagtagtttctttttggggactgtctctatggaaaaaaggggcatctgagtcttaaaactcctggaatgtctccacagtcttaagctccatctgccttctgaaatgtaaaaacactccttcgaagaggtgaaatagtcataactacttattcaggaatcttttaagattgctgagattgtgccactgcactctagcctgggaaacagagcaagactccatctcaaaaaacaattgcaaatacaaaattacacaggaaagt

SEQ ID NO: 215971 - DNA, 428 bp, Homo sapiens
ataaaactcactgtttatggtaacactaattcaaggttatttggagattttgtttttcttatacaattaagccagttctagttaaaatgtaaacaataaaatgaaaacgaaaaggaaaaaagaggtttttaaaaatcaaactgccatggaaacttctttcccccaaattttgatccacagctttccttggattacctatcagggaaaatagagcttagccataacaggtcccaattttgtcaaaagtaatttgggtccaactgtcttttgtaaaaactacaaatttattatattgtctcatggctagagttctgaagtaaaattatcagatctttgtgtatgtatgtatatacatgtttaaatatattatatatgtgcatgtattatatgttctaacatgctaccaaataaaattatagataaatggg

SEQ ID NO: 215972 - DNA, 462 bp, Homo sapiens
aaccatgctagaattattgattaccaaaatgatgagatacaataaattgcttattgtgctaagttttggagtagtttactaagtaacaatagataactggaactaaatttggtatctgaaagtggactttcactataacgaaaactgaaaacaaatggcaatgactttgtacctggttgccacagaagttagaaaggcctcgagaaaaatgttagtgaatattggaaggacatcgaggagactgctggagagactgaaggacagtaaagaaaatactatggggggtggctgaagaaatgacctgtgttatgtagtggcagaaagttttcgtctttgataatgtgggaaaatagaaaaggtgcccaatgaatgggaggatctggctaaggagattttcagcagaatttcaaaactacaaagaggtttcttttagccacattattataagatattgattaaaaa

SEQ ID NO: 215973 - DNA, 619 bp, Homo sapiens
tagaatgtatggatcattttgagaatctgaaagtctcttctcagaacaatacagataaatacaaacttttagatgtactttaagggggttcaccactaccttgaggaacttccattcacttcagggtatacaacccatggtatatatgataataatagtctaacaaaaacagtgtcaggcattgtgtcaagtgctgtacagtcttaattcattagaatgtggtatttatgcagctaaatttgtgggtttgagaacctgttaggtttccagaggaagcaacaccatctggcattgtgacacatgtagaacattattcacaaagaaccaaaaaaaaattattatgtatatgtgtaataagactgtaatgcaggggtgcacaaagagtagttaaataatagagattaagggtgggaaagtagagaaccagtaaggaagagtgatccctgggaagatagacaaggatgagaggagacaattatgggggtaatacagagttgcatctggaagaaacaaaaaccgtagaggaagataaaatgatgactctctgccaaagaaattcttacccttttccttgcctacagcaaaactggagaggtttctgcaatgagtgaggctaagt

SEQ ID NO: 215974 - DNA, 689 bp, Homo sapiens
tttcagccagggtacatcaagaagagatgaatatgggtataatatagctctcaaaatttccagtactttataacaaagaaatatccctcccactgccctgttttttaaaaaataaataatacatgttttccttccagtcgtgggaaacttaatagaatggttcaggagggacaagtatatgcagcatacctgtcattttccattcaagttttactttatttttaaaatttattattttttaaaatatttcaatagttttggggtacaggtgggtttttggttacatagatgttttttagtgatgatttctgagattttagtgcacctgtcacctgaccagtgtatactgtacccaatatatagtcttttatccctctcaagcttcccccccatcctcaaagtccattctattagtcttacgcctttgcgtcctcatagctgaactctcacttgtaagtgagaacatacgacatttggttttccattcctgaattactcacttagaataatggcctccaattccatccaagtttctgcaaaagacattatttcattcctttttatggctaagtattcaatggtatatatacaccacattttctttatccacttgttggtcattgggcacttgggttggttccatatctttgcagttgtgaattgtgctgctataaacatgcatgtacatg

SEQ ID NO: 215975 - DNA, 351 bp, Homo sapiens
atggatgtcctctggtcagcatgaggcgaggggcaggggtgaggtgtggcacaccgggcatagcctgacacttagcaaacactcggggagtagaagccaggacaccctcattgtgagtagtgggtgtgggtgtccgtggggtcagatgctggaccaggcattgggcttcaacaccttccactcctgcctctctcacacacccattctctggactgggcagtcagggaagacctgatcatcctgaacctcagggagcaggcgaggctgcaggagtttgaccttgcctgagaaaactcagaagaggcaagaaggctgttatcttgagctaactaagtaaaactgctttaaaag

SEQ ID NO: 215976 - DNA, 616 bp, Homo sapiens
agatggggtttcagcatgttggccaggctggtctcaaactcctcatctcaaatgatctacccacctcggcctcccaaagtgctaggattacgggcatgagccaccacgcctagccaaaattttttttttttttttttgagatggagtttcactcttgttgcccaggctggagtgcaatggcgcgatctcagctcactgcaacctctgcctcccaggttcaagtgattatcctgcctcagcttcctgagtagctgggattacaggcacctgccaccacgcccagctaattttttgtatttttagtagagacagggtttcactatattggccaggctggtctcgaactcctgaccttggcctcccaaagtgctggaattacaggcatgagccactgcacccagccccagccaagttttttaaaaagagtttctgtaaccattctcttaagtgatctcagaactgatctctgaggtgggttgagtatatgtaactttaaattggaaactgagacacagagatttagagacttggcaagggccacacaatgagttgatggtagagtgctttattatagttaaatgagtaattatcaagttaaatataaaagaatttattt

SEQ ID NO: 215977 - DNA, 450 bp, Homo sapiens
tggcctcaagcaatcccccacctccgcctcctgagtaactgggattacaggtgcgagccaccgcatccagcctgccaaattttctaaagtagttttgccagtttatactcctgccagctgtatataagaattctctttgtgccatattcctgataacacttgatttgaatcagccttcttgttttttgccaatgtagaaggtgtaaaatggtatctgctagaggccttaatttacatttcattaatgtctgaggttggacatattcttatgtatgtgttcattatttgtcatcacttgtgagaatagataatacaggtattactccattatattggtggttaaataaagggactaaaaggaagagtgatttggctttcagtatgcaacttgataagtggcagtagtttatttgcctagactggctaacattggttatttgaaaacacatt

SEQ ID NO: 215978 - DNA, 546 bp, Homo sapiens
aggaaattaggaaagatagaagttctcagcagagaactagaaactgcagaataatcagatagaaattttagacctgaaaagatgatatgggcccagtagcggaataaatataacagagaaaagagtcagtgaacctgaaggtagatcaatagaaagtatacacaatgaaatatacattatgaaacaaaaaaaattggagaaaaatgaaaagcctttcatggtactgtgggacaatgtcaaaaggctgaaacttcttggtattggcattccatctcagaaggtaaaaagaaaaatactggtgcagaaaaaaatatttggagaaagagtggctgaaatagtttcaaatttaaagaaaaacgtatcttcacaaattgaagaatctcagtaatttcaaacaggatacatttaataacaactcctcagccacctcataagaaaacttctaaaaaccaaggattaaaaaacattaagagcattaaaatatgacacattatacgtaagaaaagggaaggaagaaaagagaagaaaggaaggactcaagaaaga

SEQ ID NO: 215979 - DNA, 2801 bp, Homo sapiens
catccgcttgaacaccaaagaagacaaaaatggtgtccccgacttagtggccctgctggctgtgagagacaccccggacgaggagccggtggacagcgacacttcggagagcgactcgcaggaaagtggggaccaagaaacagaggagttggataatcctgagttcgtggccattgtggcctataccgacccgtcggacccctgggcccgggaggagatgttgaaaatcgcttctgttatcgagtcgctgggctggagcgacgagaaagacaagcgagaccccctccgacaggtcttgtccgtcatgtccaaggacactaacgggacccgcgtgaaggtggaagaggcgggccgcgaggtggacgccgtggtcctgcgcaaggccggggatgacggggacctccgggagtgcatttccaccttggcgcagccggatctccctccccaggcgaagaaggctgggcgtggcctcttcgggggctggagcgagcaccgtgaggacgaagggggtcttctggagctggtggcgctcctggctgcccaggacatggcggaggtgatgaaggaggaaaaagaaaacgcctgggaaggcgggaagtacaaataccccaaaggcaaactgggggaggtattggcgctcctggccgcccgggagaacatggggtccaacgaggggtcggaggaggcttcggacgaacagtccgaggaggagtcggaggacaccgagagcgaggcgtcggagccggaggacagggcatccaggaagccccgggccaagagggcgcgcacggcccccaggggcctgactccggccggcgcgcctcccaccgcttccggggcccgcaaaacccgcgcgggcggccgaggccgaggccggggcgtcactcccgagaagaaagccgggagccggggctcggcccaggacgacgccgcaggaagcaggaagaagaaggggagcgcgggcgccggggcccatgccagggcaggcgaggccaagggccaggcgcccactggatccaaggccgcgcgcgggaagaaggcccgtcggggccggaggctgccccctaaatgccgctagtggccccccaagaagccgcccaggctgcgagcaggccccgcagggcacccgcccgcctgtggcccccgccctcccctcccctcttcctgtcctccgcagacgcaatctcctcgcttcacagcgcgcccgggccgcgttttgccagcgtcacgttcccctctcgggccctcgcaggccgggggcgccagcgatcccgacggaggaagcccggatgggaggaggaaagagaagtgggcgcccgaggcagcagcgcagggccgagatggggacgcgccaagtggaccaggattgggggcccgggttgcccccggagggggtgtgtgtgtggacgccgggcacctgcagaggcgagcagggctcttcgtggcgctctcggggcctgcgcctggcaggtgctgtaggccgctgtcgcccctaccccagtctgactgggccctgggtctgtggtggaggctcagtcaccagccgcgcagcgcgtgtcagggcgcaactctcagccaggggaggccccagctcccagccaggggaagagatgattccagaaaggaaagtctgagagatagaaggcggttgggaaggggaggaggaggaaaggggagaggaacggtgggagaagggaaagaggaggaggagggggaggggggagcagagggaagacacatgccagccctgcctactggggcgcccctgataacaaaggaaccagccccaggccaaggccacctgcccctgaccacaagttgaatttgtcactcagactgcagtgtttcccaacattctaattatttgcagaggtgttcaatttggggtaattcacttaaaatccagttttggttcttctgggctgagtgggccctggcccctcccataggctgtggctcccctgggtgccccctctccagtggagctgacccaccgctcagcgctggccttgcagcccttactaaaagacttgaaagtccctgggttcaccccctgagtgaattaaaggccagaggggccccgaagggcactgtgagggacagaggctcacctgggcagtgcagaagccggccgcgtgtccctccttacaggggatgaaatgacctggggaggaaaccccagccctgccctggaggttccagagtaggcgggccggtgctgtgaggcttcacaacctgctgtcccaagcacgcttgagttgtatgtgagtctgtgccgtgccgtgccgtatgcttcagctcctgcaaccccggctgagctcgatttttacctaaatatcagtctccacgggaccccaccttcattcatgccttcttgtccctggggcaatgtgtgtgcttcctcgtcccaatttccattccctggcagtgaggagcccatcgtgccagggggccctgccccacttgtccctgggaaggaataggagggtttgggtgtgacctcacagtccagaccagactgtcccagtcctatgtcagggacacccagatgtagaagctgactgagacctgctgcagggcgtgggtgctcccctctgcttggaggctgtccctggacagtgacccacccactgaggaccaggctgggtgtaccttgagctgggcacagcagcctgtggtgttgcctgtgggtggggagggccccaggtgtgcttctcccgtagcagtcctaggcttctctccctgtgccctgtgtcacctggatcctccagtaaagtgaaattcagcactgtaaaatctct

SEQ ID NO: 215980 - DNA, 2659 bp, Homo sapiens
catccgcttgaacaccaaagaagacaaaaatggtgtccccgacttagtggccctgctggctgtgagagacaccccggacgaggagccggtggacagcgacacttcggagagcgactcgcaggaaagtggggaccaagaaacagaggagttggataatcctgagttcgtggccattgtggcctataccgacccgtcggacccctgggcccgggaggagatgttgaaaatcgcttctgttatcgagtcgctgggctggagcgacgagaaagacaagcgagaccccctccgacaggtcttgtccgtcatgtccaaggacactaacgggacccgcgtgaaggtggaagaggcgggccgcgaggtggacgccgtggtcctgcgcaaggccggggatgacggggacctccgggagtgcatttccaccttggcgcagccggatctccctccccaggcgaagaaggctgggcgtggcctcttcgggggctggagcgagcaccgtgaggacgaagggggtcttctggagctggtggcgctcctggctgcccaggacatggcggaggtgatgaaggaggaaaaagaaaacgcctgggaaggcgggaagtacaaataccccaaaggcaaactgggggaggtattggcgctcctggccgcccgggagaacatggggtccaacgaggggtcggaggaggcttcggacgaacagtccgaggaggagtcggaggacaccgagagcgaggcgtcggagccggaggacagggcatccaggaagccccgggccaagagggcgcgcacggcccccaggggcctgactccggccggcgcgcctcccaccgcttccggggcccgcaaaacccgcgcgggcggccgaggccgaggccggggcgtcactcccgagaagaaagccgggagccggggctcggcccaggacgacgccgcaggaagcaggaagaagaaggggagcgcgggcgccggggcccatgccagggcaggcgaggccaagggccaggcgcccactggatccaaggccgcgcgcgggaagaaggcccgtcggggccggaggctgccccctaaatgccgctagtggccccccaagaagccgcccaggctgcgagcaggccccgcagggcacccgcccgcctgtggcccccgccctcccctcccctcttcctgtcctccgcagacgcaatctcctcgcttcacagcgcgcccgggccgcgttttgccagcgtcacgttcccctctcgggccctcgcaggccgggggcgccagcgatcccgacggaggaagcccggatgggaggaggaaagagaagtgggcgcccgaggcagcagcgcagggccgagatggggacgcgccaagtggaccaggattgggggcccgggttgcccccggagggggtgtgtgtgtggacgccgggcacctgcagaggcgagcagggctcttcgtggcgctctcggggcctgcgcctggcaggtgctgtaggccgctgtcgcccctaccccagtctgactgggccctgggtctgtggtggaggctcagtcaccagccgcgcagcgcgtgtcagggcgcaactctcagccaggggaggccccagctcccagccaggggaagagatgattccagaaaggaaagtctgagagatagaaggcggttgggaaggggaggaggaggaaaggggagaggaacggtgggagaagggaaagaggaggaggagggggaggggggagcagagggaagacacatgccagccctgcctactggggcgcccctgataacaaaggaaccagccccaggccaaggccacctgcccctgaccacaagttgaatttgtcactcagactgcagtgtttcccaacattctaattatttgcagaggtgttcaatttggggtaattcacttaaaatccagttttggttcttctgggctgagtgggccctggcccctcccataggctgtggctcccctgggtgccccctctccagtggagctgacccaccgctcagcgctggccttgcagcccttactaaaagacttgaaagtccctgggttcaccccctgagtgaattaaaggccagaggggccccgaagggcactgtgagggacagaggctcacctgggcagtgcagaagccggccgcgtgtccctccttacaggggatgaaatgacctggggaggaaaccccagccctgccctggaggttccagagtaggcgggccggtgctgtgaggcttcacaacctgctgtcccaagcacgcttgagttgtatgtgagtctgtgccgtgccgtgccgtatgcttcagctcctgcaaccccggctgagctcgatttttacctaaatatcagtctccacgggaccccaccttcattcatgccttcttgtccctggggcaatgtgtgtgcttcctcgtcccaatttccattccctggcagtgaggagcccatcgtgccagggggccctgccccacttgtccctggacagtgacccacccactgaggaccaggctgggtgtaccttgagctgggcacagcagcctgtggtgttgcctgtgggtggggagggccccaggtgtgcttctcccgtagcagtcctaggcttctctccctgtgccctgtgtcacctggatcctccagtaaagtgaaattcagcactgtaaaatctct

SEQ ID NO: 215981 - DNA, 1299 bp, Homo sapiens
tgctgggattacaggtgtgaaccaccatgcctggccatggttattattctgaataatgaattacctcaaaattaattaacatttattaccacatatgctttctaagagtcaggaatcagagagcaacttagctgggtggttctggtacaggtctctcctgaggtagcagtcaagctgtatgctggggctatcatctgaagcatgaatagagatggaagatctgcttccaaaggctgttgacaggtgacaccatcatgtgagcctctctgtagggcagtttaattgtcctcctgacatggtggctggcttccctatagcaagtgatcaaagagagaaagcaaaaattaagctgcatggtcttttatgacctagttccaaagttgcacaccatacttccttcccctctattttgttccttagaagctggtcactgagtcaaacctgcactcaggaagaaggtagttttcaccttttctgaaaagaggaatagcaaagaatttgtagagatttgaaaacactaaaatacctaaacattgaaactcccccagagtatttacatgaattgcatgttttctaaagtagtgcaatgtatcacaatgttcaatttgtcaataagaagtgcttttagacaaagtgcttttcctggaaattagctaactgtcttaaagtataaataatgtcattttgaaaaaaaacaaaaatccttgtaaccatgaaaacaagaatcaccagtacttgaagaatccaaataatgacctaattttgtttttattttctttttattcctctgaagtagattcaacaaattcaagtaaagaacattatgtgcatctactttgtgccaattactatgtcatgtgctctgggaaggggatacacttatgcagaggtgacaaagatataatctgtcccagagaagctgagagtataacagagatgatggacacatacacaaaacttaatatgatatgaagctcactgtattgagttttgtgagagagctacagaggaggtgttatgggggcacaaggagaagaaagttaattaacattgaaagatgagaagacatcttggaagaacttgaactgggccttggaagaagaacagccattcaaatagatagaattgtggtagcaaaggcatagaggtaggaaagtatagatctccagggacagtagtcatggggttggggcactgttggaatttaaggttggaaggatatattggagccccttgaatacggtaacaaggcacaccttgggcagtggagagttatcagagtgtttgaaaaggagggtt

SEQ ID NO: 215982 - DNA, 1385 bp, Homo sapiens
ggcacgagggagaacacaagaggacagagctaaggtgtaggaatgcggaagaacttgcagaaactagagctagtcttcggattgaaatgaattaccaataaagggttgggaaatggatcaaggagagggaagcgttttgatggtccctgctccgaggttcagcccatttgcagttgctgataaccttgtcaggtcaccagataaaggcaagtcttgtcaccctcaggcacctggctgcgaagtaataaaacggttgccttatcatctaaaggtggagtgagtcaaacctcagcccagggtaattatagtaaactgaaattgcctgtcctttacaaaaaaaaaggcggagggagagagaaaggaaaagggcttaaggcaggaaattgtgtttgtctttctccttggatttaaaaaagaaacgagcaaaacagcaaaaagttttccagggagtgagaaaagcagcccggctagactcccctcaccctgggttaacaggattgccgacagatcaggcccacgtgatggtcaagaaaagaggctcaagctgatgaaaatccaagaaatcttcttaggagccttcctttctaaatgtaaatgactgagtcattgctttgctaaggagggaaggaagttacaatcacaccaagtgactcattcattgctgttagctccggcagttggatgaaaagttttagcaaaagcagcaacaaatgtactttaaatactagcacagtaagggaattcctgtctttcaggatgaatgccatccacacaaaagagctcctgttgacatctcatttacaatctcccccaggacacagacaagaccctttcaataaatccagctcagaaacacctattgttcaaaatcttcaactcgccacaggctaccaccactccctatggctttgcaaaattaaagatttagaagaaggatggggcggtggaagctatgaaaagaggcaggaaaaaagttcctttgacccgatgctgtcagagagcgtgcatgaagaagaaagttaatggtatttccatttatataagaagcgcctaagaaatgcctgtgacgttcgtgaactagtgattgtgaattccaaatttgatgccaactttatgtgtaaagaagctaactcctgccaacatcgtggctgaatgaacagctgggactatgcttaacccattcccagcttataaaagccccatggcagctgcagtgaagcatcaggtgagtctgatatgggctgtctgttccctcggggatttgaatcttgcctgtcctttccaagtggagtcttgtgcctaagtgctagagcccactccttcctccccactgattcccttctttccatttctgccatttcccttcttcttttaataaaacttgg

SEQ ID NO: 215983 - DNA, 1399 bp, Homo sapiens
ggcacgagggagaacacaagaggacagagctaaggtgtaggaatgcggaagaacttgcagaaactagagctagtcttcggattgaaatgaattaccaataaagggttgggaaatggatcaaggagagggaagcgttttgatggtccctgctccgaggttcagcccatttgcagttgctgataaccttgtcaggtcaccagataaaggcaagtcttgtcaccctcaggcacctggctgcgaagtaataaaacggttgccttatcatctaaaggtggagtgagtcaaacctcagcccagggtaattatagtaaactgaaattgcctgtcctttacaaaaaaaaaggcggagggagagagaaaggaaaagggcttaaggcaggaaattgtgtttgtctttctccttggatttaaaaaagaaacgagcaaaacagcaaaaagttttccagggagtgagaaaagcagcccggctagactcccctcaccctgggttaacaggattgccgacagatcaggcccacgtgatggtcaagaaaagaggctcaagctgatgaaaatccaagaaatcttcttaggagccttcctttctaaatgtaaatgactgagtcattgctttgctaaggagggaaggaagttacaatcacaccaagtgactcattcattgctgttagctccggcagttggatgaaaagttttagcaaaagcagcaacaaatgtactttaaatactagcacagtaagggaattcctgtctttcaggatgaatgccatccacacaaaagagctcctgttgacatctcatttacaatctcccccaggacacagacaagaccctttcaataaatccagctcagaaacacctattgttcaaaatcttcaactcgccacaggctaccaccactccctatggctttgcaaaattaaagatttagaagaaggatggggcggtggaagctatgaaaagaggcaggaaaaaagttcctttgacccgatgctgtcagagagcgtgcatgaagaagaaagttaatggtatttccatttatataagaagcgcctaagaaatgcctgtgacgttcgtgaactagtgattgtgaattccaaatttgatgccaactttatgtgtaaagaagctaactcctgccaacatcgtggctgaatgaacagctgggactatgcttaacccattcccagcttataaaagccccatggcagctgcagtgaagcatcagaaaagtatagtaagaagaaactgaatttgaagtggattcttacaaaggaaaaagaaaatcactattgtaactataccaaattactatattatgtgatgcaacaaaattcaaatatgaaaaccatctcggaggccgggcgcggtggctcacgcctttaatcccagcactttggga

SEQ ID NO: 215984 - DNA, 368 bp, Homo sapiens
caaaacactaaaatcaacaacaaccataatggattcctgcctaggcaggtcgggacattaagaaaaaaaaaggtctcgctgtggtttgctattagatggagagatattcagatttcatttttaaaatgaaagtgaaagattaaagaattttggcatcctgaccctttgtagaggccattcctcagaggcacagtgtgcagacaaaactatcctagaggtgccaaccagaacaagctctaatgtctgtctcattcctgagccttggtgccttgacgagtcaccacgctcaggaagaaagctgcaactcgccaggatgaaattgggccccacttcttagaacccttccccgcttccttcccctgccagaa

SEQ ID NO: 215985 - DNA, 721 bp, Homo sapiens
ctagaggtgccaaccagaacaagctctaatgtctgtctcattcctgagccttggtgccttgacgagtcaccacgctcaggaagaaagctgcaactcgccaggatgaaattgggccccacttcttagaacccttccccgcttccttcccctgccagaaccacactaaagaattcgctgctctcaaagacagacgttttcattacttccttacattatagagtttgggcttagataaccagttgtatgagtagtaagtcaaacagaaatacaacagcaataatacttatttctttccctaatgtaatatgttgtacttcataagccatcatatgcatttgttgcttttcccccttctacactgaccagtagttttgctttgtttgacagaaaagtatagtaagaagaaactgaatttgaagtggattcttacaaaggaaaaagaaaatcactattgtaactataccaaattactatgtatgtgagctcccagctttgacatcaagtcgttacagccacgtaatgggattacgggtgatttttactttattctttgggcttctctgaattttcctatattttgaaaaagcacctgcattattttgtaattataaaaaagtataaataagaattatacacactattatttcttcactgctatgacatgactagattacaatttttttctttttgagatgactttcggtcttgtttcccaggctgg

SEQ ID NO: 215986 - DNA, 402 bp, Homo sapiens
gggaaacctaggtgcacgaagcttgccaggccaggagggggccggccttcttagttccagtccaccacttttctctcttggctactctgcctaaaaataccagggctggctgggtgcagtggctcacgcctataatcccagcactttgggaagctgagttgggtggatcacttgaggccaggagttcgagaccagcctggccaacatggtgaaaccccatctctactaaaaatacaaaaattagccgggcgtgatggcgggcacctgtattcccagctacctgggaggctgaggtgggagaattgcttgaacccgggaggcagaggttgcagtgagccgagattgtgccactgcactccagcactccagcctgggtgacagagcaagaccctgcctggagaa

SEQ ID NO: 215987 - DNA, 920 bp, Homo sapiens
gtcagacataccttgctataccccctcccttttggagtttagacacaactgaccagcactaatgttaaaatagagaccagaaggctgacaaaacagactctctatagcaataagatacccagttataaacaggacctaaagccatgcatggcaaggccacacctgcaggccatcaatcttgctatgtagcatccttaacttaaaacattcctttgtgctgactccaagtgttagagcctttaaccaactgtaaattacagagtccctgaatccacctataacctgtaagcctcctcttccagacatcccacctttttggacctaaccaatgtgtgttttccatgtattgatttaggtctttgctgtagttcttgtctcccttaaacacataagactgatctgactgcctcaggcacactttctcaggactccctgagattgtgtttccctgagccatggtcatgaaaccgacccaacagccccatagacagtttttaggataaacacagaaattgacccttctggtcttaaagcttgaaactttgttttatgtgcttctttcctcaggaaaggaagcccaggtctctcaaaaagtgtcaaagaactgaaactcaccagatcactgcatccaatgagactccaggcccctcattcaccatgattgcttccttacccctcctgagttcctgttttcttacccattgttacatttcttccctgctatctaaacccttagatctagtcagtcatggaaatggatttgagactgagccccagtctcctccgctgcagcacctgattaaagccttcttcttttgcaatactcctggtctcagtgactggctttctgaagggtgagcagcaggacctagactgaacccgtgatgtttcaataacagattttggttccctgacaagga

SEQ ID NO: 215988 - DNA, 561 bp, Homo sapiens
catgctctgaagctcaggctttccaagatccagaaaggtatgtgatgcaccaccccaacctgggaccagggtggctcctcacaatcaaatacatggtaatttctgcagcaaaacatgcctatttgcactaagtgagacaaataaatgcctcaattcacatagatttcaatttgattttagaccaaaataatttgacgcaaagttacgaaaacaacatcaaaggagggggaaaaattttcagagctgctgagatttgggaattgcagatgaggggctgtgggcctagagctattgatacaacaagggaagcaaagggcatgtcccagaccaaccattctctgaggagggcaggcagcatccagaaagatggtcccaagtctggaaggatctaatctgacatcaaaggagaggaactatccaggtgagtgacatcattttgcagccagggacctccaggaatgaggatgtgttaatgggtgatgtgcagaagtatcctctggggcattcaggatcgacagctgcctgctggggtctctaatgagatggaagtggttggggagg

SEQ ID NO: 215989 - DNA, 96 bp, Homo sapiens
ggagacacagtctagctctcttgtccaggctggagtggggtctatgctttttcttaaacctcttctcaacttttcatacccttctgtcgtcttctc

SEQ ID NO: 215990 - DNA, 441 bp, Homo sapiens
cttgaatgcttgctgctttgttttccattttctctttctagtttaatgttctttatattcctttaaggtaaaaatgtcttgcttccaacttgttttccctgatttatcattaactgcttttaattgaaaaagtaataaaagcacatgacgaaaatggaaagagatgaaaagcatacacaatgaaaagcaagcaagacctctgctctcctaatctctgtctccagaggtgacactgctactggcttcttgtgtttccttttagaagtcctctatatggccaggcatggtggctcatgtctgtaatcctagcactttgggaggctgaggccggaggatcccttgagccccggagttcaagactagcatgggcaatattgagagacccagtctgtacagaaaattaaaaaattaaccaggtgtggtggcacacacatgtagtct

SEQ ID NO: 215991 - DNA, 201 bp, Homo sapiens
aaaaagcccaggaacacgggtatgtaagggataagttggaggcaagaagaggtgaagagagagctctgaagtgatcagctctgtctggtgcttggagtagaagtccagcaagataagaattggaaagtgcctgacgggtgctacatgcagggagcttgtcctgcgtgtaggctggcgtggtgagggcaaaagctagactga

SEQ ID NO: 215992 - DNA, 738 bp, Homo sapiens
ttatttaaccatattttttaatttggcatttacctagagaaatgctatcacatttaattccttcgttttacagtttcacctcctcatgtgattccttcattttgtaagtgaccgattccaccctatacaatcacatggccaatgaatgacagtcagaattagaacctagtcccctgattcccaaccatgtcttataccagactgtttcccctaatcgataggaaactactcctaaagggcagaaactgcctctctttgtttttgtcccccaacctcccctccacacatacacctctgtaatctgatgctttaagctcagattaaagcatcagcaagctttaatctgacacatggccgtaggcttgagttagcagttggtcccttctttcttccagactctcataagagtaccctatcaggtctggacagacttccgtttatgcctcagattcaaaatacccaggaaaaagaagaagaaatacaaaacaacaaaaagaaaatcaagaaaaaaataagatatccaggaaatattttgttagttttctattctggtgacaaatgcaaacttaaggaaacaagttgcacagtgttaactaatgtttaacattcctttccatagtgtttatgtgggccttttatcaattcatgacaaataggtcacctccaaaactgttccaacataggttaactcagaaatttaaaatttaagtactatcctttttggagactatgagaaga

SEQ ID NO: 215993 - DNA, 712 bp, Homo sapiens
  misc_feature (5)..(5): n is a, c, g, or t
  misc_feature (11)..(11): n is a, c, g, or t
  misc_feature (102)..(102): n is a, c, g, or t
ccccngctgtnaatgtatccctgggccctagagctggtggggacccctgctgaaggctgcacctagcagggtgcaggaacaggagtgactcaaatgaagccnaagcccatttggatagtgggtcatgggtttcctgggcagaaatagtgacagtcagaaactttcagatgggtgagggtttaaaagtgagctactgcccccacaagctgactgcccaggttagaatgaaagtaagtcctaggctgaacacacacacacacatacacctctgtaatctgatgctttaagctcagattaaagcatcagcaagctttaatctgacacatggccgtaggcttgagttagcagttggtcccttctttcttccagactctcataagagtaccctatcaggtctggacagacttccgtttatgcctcagattcaaaatacccaggaaaaagaagaagaaatacaaaacaacaaaaagaaaatcaagaaaaaaataagatatccaggaaatattttgttagttttctattctggtgacaaatgcaaacttaaggaaacaagttgcacagtgttaactaatgtttaacattcctttccatagtgtttatgtgggccttttatcaattcatgacaaataggtcacctccaaaactgttccaacataggttaactcagaaatttaaaatttaagtactatcctttttggagactatgagaaga

SEQ ID NO: 215994 - DNA, 379 bp, Homo sapiens
taggttgagttttcctcctctgctaacaggaaacaataccgacgttctttctcttatagcatttgtattataaaaagcacaaagctccagcccactgaacctctgccaattaagatggttgctgggattacaggcatgaaccaccgcccccagctgggattttttaatttttctatcattttaaaataagacacacacttttatagatgctttcatacttggagctctactgattttccatccaagccaacttgtagggttttttccttcctatcaccagaggagacagggtttaggggaatccaagaaggttgaagtcagcactccattttcatcccctttccacccctctgcatcacccaaatcacactttcctttc

SEQ ID NO: 215995 - DNA, 647 bp, Homo sapiens
ttggggagtacggaattacagcagggctgaaaccctgctttcaggggcccccatgtggctggtagggtcagcttttggaagctagactggatcctattactccccagatgaaaagttcaaattccttaatacaactcagagctcatcacaatgtcacaaccctcctttctcggctcgcttcctccttaagagctctggggcgattctttcagaccagcctgagggatcttccacaggttgttaatatgggctagaaacaaaaagtggtggtgtttctatgatctaatttgttggaacaaacgtagtgttaaactcaaacatttctgtaggatttcttggagctttaactatactaacatttactgtaactcttcaggacagggtatgattacgtatttcccacatttctttggtcagagaacccgtttttgtgaggagcatttcatgggacagctgttgtgagaaacagtttgggaagggctgtgttggtcccatggaggggctggctgttcccagagcaggtcactcccccacttgcattgccttgcctggactcttttcttggagggaggtccctttcctctacccatctgaatttttttttcttccaccagtgtccagcttgcctttcaccatgggcctaatga

SEQ ID NO: 215996 - DNA, 522 bp, Homo sapiens
gggtacccatgtggtaacgttgcacctgtcaatggagtacagcagttcaaggggatgttgacaccaatgtgctccattgaccttattcagatttcacagctttccatgtgtctacctgtgtgtgtgtggtttagttctgcgcatctgtcactgtagggtttgtgtgagcccatggccaagatgcagcacagccaccatagggacctcttgagctgccctcttgcagccacagccacctccctttcccagcctgaacccctgagagccactggtatgttctccatctgtatggtttcaccattacgagaatgctccataaatggagtgctgcagggtgtgggcgttgaggtcggcgtgatgtcctgaggtccatccagttgtgtgcactactagtgtgttcctttgactggaggaaacgtctatggtatggatggacggaccatcatgtttcacctgttacaagacatttggttttttcccccagttttttgctattatgaataaagttgccatgaacattta

SEQ ID NO: 215997 - DNA, 336 bp, Homo sapiens
aggctgaagcaggaggatcgcttgagccagggaggtggaggatgcagtaaatcaagatcgtaccactgcactccagcctgacaacagggtgagaccctgtctcaaatctcaaaaacatcataatgaatgaaaccaaagaaaccctacctaagagaagacactgtatgattttatttatgtaaagtttaaaaacaggctaaagtgattgatggtgatagacatcaggatgaagtaacttttttttttttttaattttgggatagggtctcactctgttacccaggcaggagtgcagtggtacaatctcggctgactgcaacctccacctctccggct

SEQ ID NO: 215998 - DNA, 664 bp, Homo sapiens
tctctgacatgaaaatcctgaagcatcccagtggtacttcaacagaagaggtgacacaaactcccaagaagttagtcctttgtcagaaaaagataacctggtacagcttccctaaaacaaattcagacagagatctggtcatcaacactcctgtttaaacttgcaaagccatcatctctgtattgtgagttatctgtgtttcattataaccgaagttcatctgcacaaattggcattctaaattgttacttgttattctgcacattttatgatgagatagttatagaaataaattaatataaattaagagaataccacaaattagtagaataaggaatggccaatatttttcaagaagctagctaaggtttccaatgtcatttattatataaattaatattctcaccacatatcataccccaatctcagatgtatttaagtagctaaacagaaaaatagaaaaaagaaaatattgtgtgttatagaaactaagaaaaatagaaaaaagataatactgtataatagaagctaagaaaatggagataaataattattatctcaacaaaaatatcatcattagaataaaagcaataaaagccaaaaaataattagaaggaaaatatagttttactgtataataaacatacacttaaatataaagcag

SEQ ID NO: 215999 - DNA, 645 bp, Homo sapiens
tgtcagagggcagattttgactgagagtaagggtaactttctagtaattagaactatccagaaaacagaactaagtgctatggaaggtaagtaatttttttgtccatgaagcttgtcaagcaaagattcatagaaatgctacagagaagtttaacacatcagacaagggatagattggaagagttttccaaaacagtttggaaactgttagtttaatttctgtcgtatctgtcaacttggaattcatacttcttggttcctttctaattctatgaatgtatgtctttgaaatctcagtaaaggaaccaaatatttgttattgcagataaacaatacaaactttagttgtatagttaagtgcttttacttgatggtttttttttttaacaaactatttttttaagagcaattttaggttcacagaaaaattaagcagcaagtacggagagttcccatgtatccctgtccccatactcatacaacttctctactgttggctcccacaataatggtacatttcttataattgatgaacctacattgacatataattatcaccaaagttcatactttatattaggttttacttttatttgatggtgttttgaaagaaaatgtgaatattcttgcttgtctttgagaaag

SEQ ID NO: 216000 - DNA, 653 bp, Homo sapiens
tttgaaaataattcatgagtgtttaaaagactagcatattcagcatggtaagatgcactcgtgaggagatgggaccctttgtacttcctagagtacaaagaaacactgacctagagaaccatattctaagaagtctacttttgtttaagcatttttctgggtcagctccagtaaatgaatcttgctattcataatatttcttcttctgaacctataggtttttaacttagggatgagagtccaggatagtagctatttgtacatgtttgcttattttcaatttatgtgtttgttagggattgtccattaacttacagctgttttcactctgatcattgttcctagcaagtatgcttaggtatggtctcacttcctatcacctcactctaatgagtcctcttaatccttatcagaaggaaattccatttcttcttaggggaaagtgaccataatagtgtgtaagattgagttaccttaagttgtatatttcagaagtataaatcaatatttactcaaatgcctggaacttctggttcatctgttgtgaatataaaaccacttatgggcaaatgttaagtgtctagtatttataccagatatttatagtctttggagcctttcctaggatcatgaatttaggctgctactcaatt

SEQ ID NO: 216001 - DNA, 396 bp, Homo sapiens
gccttgtgttgctcccctcgtcccgctgattttaagtctttccaaggtgtcagtgggtttcagtggtggggaaagaagagtactgggtacaagctggagggatagaagtatattttggtttattctgttcatgttgggcttttccctgtctgcaaaaagagggtgcttttgttgtgatggaatggaatactgaggattatttcttgaaactttagttttataacacgcatgtgaaactaaatgttaaaaatgctcatgtaaaaaaaaatttttttttactgtgggttcctgtggagaaagttccgaagtacctgctttaggtgaacatccacatttgctagaacattctaactaagatattttcatgtgtgcaagctagtaaaacggctgttctca

SEQ ID NO: 216002 - DNA, 163 bp, Homo sapiens
gctctgtggcatccaccaactcagtaaccccctgaatatctgacttagccgccaaggaagaatatcttagaagctattaggaattcctcttggggctaggtctgggccttggagtcagtctgatccctggtttaattcttccccttggctcaacagcagtgta

SEQ ID NO: 216003 - DNA, 322 bp, Homo sapiens
aatagagctatccataatataaataattctacattttatcaaagcagaaatacgtatctatggttagagcaagcccacctattagagtgatgggttctttcaaactgaaatggaatgctatcagggaccatcaaaagatgacagcagcacagccaaatgacagagccctcacatggtactcatgggtttcagatgatacatgccagaatgatgtgaacctactgggtgcattgctttgaatataaccctactggtttcttgggataagcatacttattcccttcaaagaatctaaaaagatattgcatgccaaagcaagatt

SEQ ID NO: 216004 - DNA, 423 bp, Homo sapiens
ccagaaagggcaccaagccaactcagaaaaggagcgtttggtgacatgataaaggcgaatcgcgtcggcctaaagatgcagaggcaggagagcagccagtgagatgagcttgtgtggcttcgttaccctcgtgaaattagtgcaaacgcacggtggctcacgcctgtaatccccgcactttgggaggctgaggcaggtggatcacgaggtcaggagttcgaggccagcctgaccaacatggtgaaatcctgtctctactaaaaatacaaaaatttgccaggtgtgatggtgtgtgcctgtaatcccagctacccaggagggtgaggcaggagaatcacttgaacctgggaggcagaggttgcagtgacccaagatcgagccactgcactccagcctgggcgacagagcgagactctccatctg

SEQ ID NO: 216005 - DNA, 665 bp, Homo sapiens
tccgccacctcgcggcccggcctgacctgttaatcacgtccccacggctctcctagcggggacaccgccgtctgcaggctccgtccccacagtgcccagaccccgggaagtctgtcagtcagcaccctgatgccagccgattctcaaaaagccaggagcatccaagcagatgatttgccagacggtactgcagcaatggagatgaacagataattcacacagaaagaaggacgcaggatgctcgagactcttgcagtaatttgggcaaagatttccacagtgcaaaatagaaaaaacgtaactggcaaatagctgtacaaattacagtccattttcatcatggaatgtcagtttggcaacaatggcatcgaggcccaaaagcagctctgcagtaggggggttcctccttggtgactggatgggcacagccaagcacaaattcctgaagatcccagctccaggaaacatcagcatggttcattgcattgtccacctgaattcttcacccctccctgtggctgtgtccattgccctgtagtgttgcagttcccctcaggaacaagatatcatttacttctctgacccttgatttggagcttggctatgtgacgtgctttggccaatgggatattggatgacacaacaaaggagagacacagatatgc

SEQ ID NO: 216006 - DNA, 793 bp, Homo sapiens
agaggcgtaagggaaggaggtcaccaaggggcaggccaggctttatgtgaatagtgctgttgtgagccaagtacttgagtacttcgaggtccccttctactgcagacatcttccctatggttcctgtgacccaggtttgtctcagagtggggttagcacacggtaccatctccatcccctttaaaagtatttattacatttttctggaaatggaagtctgggaattatatttccctgatagtcttatgagcaggattccaggttgattctgccaaatgtgaggcactcaggtgagactagaaagcagaaagatggtttaaaaaatcatcgttttcttcctttgactctgcacttatgacagcaggatgctcgagactcttgcagtaatttgggcaaagatttccacagtgcaaaatagaaaaaacgtaactggcaaatagctgtacaaattacagtccattttcatcatggaatgtcagtttggcaacaatggcatcgaggcccaaaagcagctctgcagtaggggggttcctccttggtgactggatgggcacagccaagcacaaattcctgaagatcccagctccaggaaacatcagcatggttcattgcattgtccacctgaattcttcacccctccctgtggctgtgtccattgccctgtagtgttgcagttcccctcaggaacaagatatcatttacttctctgacccttgatttggagcttggctatgtgacgtgctttggccaatgggatattggatgacacaacaaaggagagacacagatatgc

SEQ ID NO: 216007 - DNA, 737 bp, Homo sapiens
ggtaccacagaagtggaaggaggattagaaatgccagtcgatcaatctgtgagggctgtgggagataacagaaaaatggaggaaaaaaatcatagattatatagcatggtgttcgtggctgggatcaccaaatccctcttacccggggtaaaggactacatacaaggctgtgttaactttcattaaccttgaaagggaagaaatttaatttgaatttactgtgtggccggccctcttccaaaaagttcaagatgcacctaatgcaagaactaattcttgttctttttgtcacttccagataccaaggctcaaactgtttagcaggaatcactatccttcacctgtacaaagcattctgccacaccaggttataggacagattgccaccttctgtctcccccctcctcccacagactacctactaacagttcattcttcactcacttttctgtctctgaaacatccctttctttagttttctctaaccattattagcacctaatcccacccagattaaggcacctagagtgcccccaagacacaaaggtttcaagtcagtgaaagaaggtctgaccctccccacagatggctcacctttttcaggcaaatatgctcccaatggtggaagctaagatgatcgcaaggataatacagcagatcatgatcatgatcttcttctgctcatccagacaaggaaagaaagaatacatgagaaacatcatcgcaaaaagtattct

SEQ ID NO: 216008 - DNA, 741 bp, Homo sapiens
cacacacactctcacacacataaaaacacagactcacacacacacggacaaacacaaacacatacacagactcacacagacacgcaaactcacacacagacagacacacacacagacacacagactcacacacacaaactcacacagacacacaaatacacagactcagactcaaacacaaactcacacaaacacatttacacaaactcacaaactcacacacacaaacacacacacaaacacgcaaacttacacacacatgagcagacacacacccggcccttctgggctcttcttttcttactccataggaagccatgcaaagtctcgccagacctttcttccaaggccagatctggccaaccccacaggaaccctgcaatcacaatccctcgggccccactttgcagccagatgccaccggttcccatgccccatgcctcgccacccctctacctcctctgcccaggaagccttgaacacttcccacctggcagaatccttatcatcatccatggctcaagcgtaatgtcatttctatgaaggtttccctggacaagaaactgccagagagcccttagctcaggtgttcccggaagcactgttcttgctcagcagatctgggcagcttcttcttgaaagcagatctgggccctactcaacattttttaaaatatatttctggtactgctcaataaatattagttatcagaacgagtactgttagatgctgcccagata

SEQ ID NO: 216009 - DNA, 754 bp, Homo sapiens
ggactccatggggtgaagagcagagtggagaggagggttttagccgagagctctagctggcaggaagcacatctggtggccctgttaaaactggaactctcagcagaaaagttttggtctgtggtcagcctgtgaggcacacacgtgcgtacacatacacacacacaaatacacagactcagactcaaacacaaactcacacaaacacatttacacaaactcacaaactcacacacacaaacacacacacaaacacgcaaacttacacacacatgagcagacacacacccggcccttctgggctcttcttttcttactccataggaagccatgcaaagtctcgccagacctttcttccaaggccagatctggccaaccccacaggaaccctgcaatcacaatccctcgggccccactttgcagccagatgccaccggttcccatgccccatgcctcgccacccctctacctcctctgcccaggaagccttgaacacttcccacctggcagaatccttatcatcatccatggctcaagcgtaatgtcatttctatgaaggtttccctggacaagaaactgccagagagcccttagctcaggtgttcccggaagcactgttcttgctcagcagatctgggcagcttcttcttgaaagcagatctgggccctactcaacattttttaaaatatatttctggtactgctcaataaatattagttatcagaacgagtactgttagatgctgcccagata

SEQ ID NO: 216010 - DNA, 367 bp, Homo sapiens
aaaatctttagatttctgcagtccatacaaatgataaacaatcaagagaaggagctattgcttaagtcaaaaatggaaattaatgaatagtctttccatgcagttgtacacagtggatttggtttgtatccgcttacaaattttagaggacaatggccgcaacacatcatggtgttttgatgttactctgattttgtttcttccattattgagtttttgctttatttgtaaaaactggcaccagtagaaatgctaatttttaaaatgcttagccatttataaaactataacaaaatttaaaatattaatacatttgtaacattggtgtctgaatcaacttaacctctaataaagaactgtctatata

SEQ ID NO: 216011 - DNA, 377 bp, Homo sapiens
gtaccccaggaggctgacttctatacgttatgtggactggtctcccatgtccattggcatctggttgggtttaccccagtgggaggtattagcaggagagagtggtcaagatatttgcattttaggatcctttctttcctctactgaagtttacagctcctgttgggtctacccagaatatggtcaagaagaggtatttagactgtaaagggtcatgtcgcctttggcctgtgattagttacaggtgtcctgagattagggtaatttcatcttctcccgtccctttgggcctaggagtggtgaaatcttctggctgttattagccccaggtgcttcaccttcccttgtagttttccctaaattttgcacatacactt

SEQ ID NO: 216012 - DNA, 343 bp, Homo sapiens
ttagagagctgtaacagccgagaagacacgagcgggagcatagtatggtggacaagacaccagcagactcgaaacttgttttctgccctacatctctaacttgctgtgtgaccttgggcaaatcacttttccgctgatttttttctcctttcctaaaagagagtgggttgatctagataatttctgggactgagtgctaaaattctatatttttatgttaattgggtgctaattgtgtgctgcaagcaattagcaaataataaggtcaggattaatgttcccagttctctgctgggtgaggttagaacagtaaagctgcagagaagagggggtggaagagatt

SEQ ID NO: 216013 - DNA, 430 bp, Homo sapiens
agactagttcttagttggcaaactggcagcctagaggctaaatgctgccatgataaatatgttgagtttggttcacataaggtggtggtggtttaattatgccaacattagaaaatttgagcagtttcacagaaaagtctggattcttgaaaagttttgaaaaataaaatgatctagaaatattgggcctgaaatttcaaatagtagcagtattttagagcagtgtaccagctgtttagagggcacatatcaaatttgcaccagaggccccaacatcccctgttgtcttccatacatactcaatttcatgtattcacattacttgcccagcccctgtgtaagatcgtctcagaataagatactgggatgaactaagaaacaaactcattcaactacccatgaaaggtcctttttagactctgcattgatg

SEQ ID NO: 216014 - DNA, 415 bp, Homo sapiens
cccccagtacttatggacagtgagtggccacatcttatgccctaatacgaattagttcttgaactacagagaacaaaggctccttggagatcaattgattccatgccttgggtgcctcgggatgaagcaaaatttggatagattatgagctggagtggctgccagaaaacaaggaaattgtagcaatgtgtagagttgtaccaaaaggacaaaggagatagcttaacaagacccccactagccaagatgcaacaatttgagcatccaaagggagaaactataactagttgggatgaattgagtctataagaaagccatgacattcaaagaggaaataatttaattacagtgtatgagatgataattatactacaaaaaagggtgaaagcaatttttcaattaactaaaattagta

SEQ ID NO: 216015 - DNA, 468 bp, Homo sapiens
aaggtttcattatatactagggtggcccatcagcagaaaaccaactctgacatatttcatagacaactcaaatagagttcttcatctatccaatatatatttattatgtgttgacattgtttcaggcactgtgtttactgtacactgggggtacaatggtgcctgtcctcctggagcttatgttctcatgtggaagacagacctgaaggaaactaacaaagggttaagatacagaatgccatggttctagttgagaaggattgatcatggagtagaatcagggttaggaagttgttacaatagctgcagttgagagataatgggaggccagtggagctaaagagccgagatatatttgtaaatagagttaataggattttctgatgatgtgggtctggggatcaggtaagagggacaatctactgctactggattactggtttaagtaactaggtagcctttattggg

SEQ ID NO: 216016 - DNA, 168 bp, Homo sapiens
agcacaggtctcaggtggcagccaatatttactagcagacatgtgattgagtgagccttcagatgatcctagcctcctgcctttaagcaaccccagtggaatccaagagaagcagagattagctattcctaaaaagccctacccaaattccatatttgacagcattgt

SEQ ID NO: 216017 - DNA, 348 bp, Homo sapiens
gtctcactctctcacctagactggagtgcagtgatgcagtcaggctcgctgcagcctcaacctcccaggttcaagtgatgctccctcctcagcctcctgagtagctgggaccatacgggtgtgtgtatgcaccaaatctggctattttttaaaatttttttgtagagatgaggtctcaccatgttgcccaggctggatttttttctttcctttttatttgtaaaagtacttaaggctatagtttcccttacctcactgtgttaaataaatcctgtatatacgtagtgttttttattactgttatttttaagtagttctataatttcattttgtgtattccctttaatt

SEQ ID NO: 216018 - DNA, 512 bp, Homo sapiens
agttaatccaacttcaagccctgacccctcccatcgcagaaatccaccctcccagggcttccgtcagccgatatccataggccccctctggggtacttcttcagtctcggtgatcaaggccagaaaatcaggtcagccaacccagcgtcaccaccataacttaggcagtttgagccactgggatcatggtgtcgcctgactggctgctccctgcaccaggcctggagtcaggaggggctggtgccagccatgcacgtgcccagaggcagctcctacgcctgtccaccttttccagcaagaacaaatttctcctggctgccctgggacaaagctaaaggcacctccagggcctggagagggtgctcagggagagccatagaccattccccaaactctctctgtctcagcccttgggtcgtctagaacctcacggaaggaggggccacagggcctggagcccatgacacctttagaggcccacaaaatgttttgatttttttaaaatcagtaag

SEQ ID NO: 216019 - DNA, 143 bp, Homo sapiens
gacatggccagggttgcagcagcatctgcccacgctgcagaggttcatgtaaggagtgaagggcagaggtgagcagggagaggctcagagagacaggccccaaccaagagttgcacccctggatccaatcgtacttcccaatc

SEQ ID NO: 216020 - DNA, 469 bp, Homo sapiens
ctcctagactctacacatactggatttaccactgttcagggaaaaagcaagatcatctcagcatgtggagcaagacctgtgatgccatcttcttggaccatctcattttttagtttacttttcaccatttttatagagaaaacctgagttggctagtggcagaatggttggagctgataactgcaaagagtacatgtgaaatgctaatatccatgcctctgaaacaggatcattacacagagggttggggaactccagttattagtatatgtaactcccattccttaataatgatatttttaataaactcttttttctgagagcaagtttccaaaaagtgtagtctactaaaaaatattctttcagaaacatgtggcttgctgaattacctatcaaatgctttgatacagttcatcctctacatgaggtctggtgtctgtgcatatcattcggtttcagttcttcctca

SEQ ID NO: 216021 - DNA, 451 bp, Homo sapiens
agatattaagacagtgtttaagtgccctcccatatgtagttctgagttagacattaaacaaattaaggtaaaagtcaattccttaaaccaggtaatcaaagttaacatcaacagtgatgtcctgttgatagtatgtattggtgatacaatatgatgattgtagcactctgtgtggtcttcttcacaaagactcataaccctagtctactcatgagaaaaacatctgacaaatctcagtggaaggacattctaaaaaatacttgaccagtattcctcaaacttgtcaaggtcatcaaaaacaaggaaaattggaaaatctttcatggccaagagaagcttaaggagacatgatgattaaatgtatcctggatgggatcctggaacacgaaaaggacattaggtaaaaactaaggaaatctgaataaagtatggatgttagttaataataata

SEQ ID NO: 216022 - DNA, 521 bp, Homo sapiens
atgaataactgaatgacataatatgacaaaaatattttcttcttcttgggaaggcctggacatctttgaacatacattggctcacatatatcacttatcacatacattggctcattttttttcagggggtttttagcattagaaaggtactcaactgattcagtactgccagaaatattctaaacaaatagtagagcaagcttctgcaggtgcactcagttctccaggtacactcagtcctgcccttcatttctaaacgtggtctagaattaagagagatgataatctcagcattattctaaaccattcttcttatagctcagagtctgttgtaagcctcatttttattgaattctattaccaattagattagaaattataaaaaatcttacaagatatttatcattggctaaaaaaaaactaaccttaaaataaattgtatatttttaggttaaagtttgattatacctttccccgttgctttcaagtctaaaaagagttaggttaagaagttatctaca

SEQ ID NO: 216023 - DNA, 430 bp, Homo sapiens
gactctagaagcatctatattgacatgttgtattagttgaatctgaacaggtttaagggtgttttttaagggctcattttgcctatatgttctaatagaagactgttttagaaaatttaaggtgaattgaacatatttactcagagttagacatgaataatttgcttcccccctgccaaaaggatggctaggttcagacaaaaaattatcgaatattaggattcacatgctcagatgccacataaatcagcagtcactgttgctcctaaccctttattattattttatcaccttcagagcactcatcaccaaccacttcatatgttttggttacttgattgcactctgaagccccactaggaaactataagttcctgagagtagggactttgatctgttcactttcttgcaaagaatatatgcttagtac

SEQ ID NO: 216024 - DNA, 477 bp, Homo sapiens
gaaagagtacaaagacgatattatgaaaagctgacggaatttgtggcagatatgaccaaaatttttgataactgtcgttactacaatccaagtgactccccattttaccagtgtgcagaagttctcgaatcattctttgtacagaaattgaaaggcttcaaagctagcagattgtgatatctttagtctgaatttttaactggaatcagaactggatgttggggtcactctttgttttattgtacctcgtgattacctaattcaaaattgccccccaaaaagtcagattagttaatataattttttaatgttaaagatgtatcgtggtaaaaaatttactctagcagccatgttgaacaatgtatttaaaaattgtaaactcttggaatactgtatttatctgctatttcaatataaagtcctttgacttagtcctggtaactgtacagtaatttggtttactaatgaaagttgtga

SEQ ID NO: 216025 - DNA, 555 bp, Homo sapiens
ggctagaagcatttgcgaggcacccagtacctccattagtgtctggagaccacagtcaggctgggtaaggcaagctgaaagaggaatgacttccagaggagacgaacccaggagagtagctgggccaggcaaggggagggaggggcgtggggagccggaaccactcctggttcagagaggcagctcccagaaccctgggaagagagccctgcctggggagctgtgccagctcacagagaaggagccagaaatctggaccagcctctcccacccacgtccgggaagcctctgggctggtagccacagtgtttggaagcaggcttcctccggagtctccgcaggctggaggtggcgcgggtggcctggaagagcctgcagagcccggcggcaccgagtgcacagtggacggggaggacctggttccgccatagccacggagccccacctggacactcaccattggctgtgacgaagcagcttcagcagtgcccggcgggcatctgtgcactgtgggcatctgtggcactgggagggagcccggctgagggcggccgc

SEQ ID NO: 216026 - DNA, 540 bp, Homo sapiens
gtggccctgacgcgggcccggcccggccaggtgagcagctatatggccacggtgtcggggctcctcaagatcgtccaggccttcgtggcctgcatcatcttcggggcgctggtccatgacagccgctacgggcgctacgtggccacccagtggtgcgtggccgtctacagcctgtgcttcctggccacagtggccgtggtggccctgagtgtgatgggccacacagggggcctgggctgcccctttgaccggctggtggtggtgtacaccttcctggctgtgctcctgtacctcagcgccgccgtgatctggccagtcttctgtttcgatcccaagtacggtgagcccaaacggccccccaactgtgctcggggcagctgtccctgggacagccagctggtggtggccatcttcacctacgtcaacctgctcctgtacgtcgttgacctcgcctactcccagcttcagcagtgcccggcgggcatctgtgcactgtgggcatctgtggcactgggagggagcccggctgagggcggccgc

SEQ ID NO: 216027 - DNA, 299 bp, Homo sapiens
gctaacccatacatactatgtactacagttttatcagaaaaaaatgatcaggagatcaaactgataaaaagttatccttcaacatttcccaaaggttttttcctctaagtaaaacaattattattatagtctgtcttatcttttcaactaccacccataataaaatgtcattttattatttcaacatagttcatcaattgatcatctttacctgcggtagtatactctgtacattatattaattcatcataattgagaaattgtaagtgcccgcctatcgaagtagttctttagaccat

SEQ ID NO: 216028 - DNA, 284 bp, Homo sapiens
ctccagaggattacgcactgtgtcgtggtgttggggcaggaggaaaagattcaggagcaaaaagtgaaagttgttgctcaggggagataaagactgtgatgtgtgggaggatttggtcatcaggtcattaatgagggacagaaaccaaatatcagaataaagtctctgaagtattaaaatgggttatgggttaacctataggagctcttcatagacttcttgtcctgatattcataaagccccaaaccaaaacagttggcagaaatggtttcttgacaaatctg

SEQ ID NO: 216029 - DNA, 138 bp, Homo sapiens
cagctaccaatgatttcccccttttcccatcataatcaaaaccctgtgtggtggaaagggatgactgatgagtgagtagctgaagatagctcctggttaatacaaaggcaatccgattggactaattaacactaatat

SEQ ID NO: 216030 - DNA, 151 bp, Homo sapiens
ggagcctgaagctcctatccctgatttgagacggccacctagtgacgtctctagccctggtctgctgatgcccagggggtcttcgtgttaggaagggaggattcttccagaagcacagttctctgccttcaggaaaaaggggctgagaagg

SEQ ID NO: 216031 - DNA, 407 bp, Homo sapiens
tgcaaagactggaacaagtctcagcttcttcaaatgtgcaggtgccaacacatgactacagggatcaagaacagtcagggaaacgtgacaccagtcaaaggaacacaataaggcacctgaaccaaccataaagaaatggagatatatgaactgcctgacaaagaattcaaagtaattgtttaaggaagctcaatgaatttcaagaaaatgcagataaacaattcaacaaaatcaggaaaacagcaatcaaaatgagaaattttgagattgaaattattttttaacaaattctgaagctgaaaatgcaataaatggaatgaaaaatgcaaaagagcattaaaagcagaattgagcaagcagacaaaagaatctgaactcaaaagacaggttatttggctagactaagg

SEQ ID NO: 216032 - DNA, 290 bp, Homo sapiens
ttcattccacagtgagtgaggcattgcatttagaaatcatgcccttctatcttctgttcacattaatttatttaacacaattattctttgtgcctgtttcagcagttgacttttaaagatgaaaacttttcaggaatttagaagaggaccatagactgttttaatggttcagttatttgtttgcagtgccctaatgcacactaggtcagtttcccaaatatcgtgctatacacttggtccctatattagtttgctagggctgggtggcttaaacaatagacatttatttt

SEQ ID NO: 216033 - DNA, 358 bp, Homo sapiens
caggtgtcattgttctgttgcagcatatggtgttcctgacagatcccttgtctttctggttcttggttttctcatatgcagaatcttgttatgaacaagttgtgttgaaagttcacattctttaagtatgtatgttggtcatctctgttgaaaatgatagaaaaatcaccttcggtagaaaatttacaaacaggccgggtgcagtgtctcatgcttgtaatcccagcacttcaggaggtggaggcggttggatttttgagcccaagactttgagaccagccttggcaacacagtgaaaccccatctctaccaaaaatacaaaaattagccaatctcacagcccagtctcaaaataaat

SEQ ID NO: 216034 - DNA, 314 bp, Homo sapiens
ccattagtcaactgtgcacctggtacaggcctgtatccagactgttttctaatttgcacaaaggtgcttgtgtgacaccagtgggccctgtgtatcccctgtgcttgttatagagttggcacacagtattacaataggtgctcattaaatgttgagtaaagatggacggatgttctaggcaaaggtaccaggggtagagatggggggaaatctggcctaatagggtggtattggatactcagtattgacttagggtggttgcagctagtttgtagagggtccgttatgttgggctgagggactaactctttaat

SEQ ID NO: 216035 - DNA, 557 bp, Homo sapiens
atcagcaagatgaagccctctcctgctcccaggcacccctctaccaacagcctcctgtgagagcagattagtctctatccagaaattaagggagagattgctcataaagatgacaagctgctgccatttctaaaagatgtgtatgttgattccaaagatcttgtgtcttccgcgcaggtaaaagctgctgaaacacatcaagagccaaaggaattcagattgctgaaaggtcatcactttgatatgataaatattaagagcattcccaaaggcaaaatttccattgtagaagcactgacacttcttaacaatcataaactttatccagaaacatggactgctgagaaaatagcgcaagaataccaattagaacagaaagatgtgaattcccttcttaaatattttgttacttttgaagtcaaaatcttccctcctgaagacaagaaagcaatacaatcaaaatgaagaaaatcacaaaaatttcctatgtgtactcctcatccctcatcctgactattttctcatttttggcatattaaattatgttaattaccaaa

SEQ ID NO: 216036 - DNA, 439 bp, Homo sapiens
  misc_feature (133)..(133): n is a, c, g, or t
acctctgcaaacgaggagctggtgtctttctttgctccgtcccgtcacttttcacgctatcctccacgtggctgctgtacctagatggctcccacaggagtcagtgaggcctgggtggggggtggggcggcanccccttcgtgggggggccagtgcctggtgcgcccgcactggcctcacgtggctcccctgctcactcggcctacctggcctgtcacctctgcctctggcccatcctcctctgtggaccctcagttgcctccgttcctcaccctcctactttcacaacaccgtttccccatagggcaccttcaagagaaatctgtggtcaaattccccaccttgccccgcacccacccgtctgggatccttgtctactcgctggccccaccaaatcagccagcagaaactcaaccaccaaactctgccagcagaaacc

SEQ ID NO: 216037 - DNA, 448 bp, Homo sapiens
aaaaaaaaatcacccaagactaagcctcaacctcccccttaccacttgcaaatacagtctgcagaaaagcagcctcgggtccccactcgggggtccctcgcggggtgcgtcatatgggctctcccctctgcgacccgctatttccctgctagacccccagcgcccagcggattccaaggctgcgctcccgccggctggtcccgggaggtagaaagtaggcagaggggcgtggcgtccctgtcgcccccacatgccagccctcctccaacgcctgacaccaccacaagccacggctgggaacactgggggcctcccaacccggcgcggggcgcacggccgcaggctggcgaggaggcaagcgagctcaaggggagacctttccttccacccccagccctagccccagccacagccgtgggggcggcttcccgcaacctcgggcggccgc

SEQ ID NO: 216038 - DNA, 426 bp, Homo sapiens
tagatatctatggctgttcattgctgtgcactcaccgcccactcccagcactgcgcctcactgcttactttccagcacagattagttaagagcacacgctcagcaggctcactgtccattggtacctttcacccttcacaccttctagaaggagttgcctctcaacaggctttggaatcagtcagtctctccctcttaatttttcagttgacaaagtatacttcatcaatgtgtagttgtttcaacttacatacaaattcaatcagtaactgataatattaaagggaactttcttatagaaaaataaaggtgatttattctcattataaaaaaagtacattcttggtatagacaaatctgagaaaaaagacacagagagcaaagaaagaacagttgcccatagtgttatcatctgcacaccaccat

SEQ ID NO: 216039 - DNA, 407 bp, Homo sapiens
tgtgcttttactgttttgcctatgctgccagaaagttaaaaacattttgtttcaaataactgtgtatgtttaaaagtcaaacctattatttgctatattatttgtcatgtgctataatttgacagaggggcaatatttctccaaaaagtaaaattttataaccaaaggccatcaattgtacaaacgactaagagaattaaattttattaagttggaaatgtaatttattcattgtaactgttttaagagaaattaagtgagcactttgtatgtagttatcttaaatgttacgtgtattcttttagaaactctttcttgttttccttcttttcaccttcagtgtcctggcacgcgactagcacaaatcaaaccttatctgtcataataaactatagcgttggaaattc

SEQ ID NO: 216040 - DNA, 400 bp, Homo sapiens
taaggaagagctgaggggagcaaataaagtgaagggagataagcatttttaagatgcataaatttcagggcatgttggtgcttgtgaaaaatagaagggaagaattaaagacagtaaatatccctgatgctaatttgggctaatctgtagattgtgatgccttttgttaaaataaggaatctcagaagagtagagtttaaggagaaggtgagctcaattttgaacaggttaaggtggatgtgagtcatccaaatatgaaagtcttctaggcagctgtgacacataggccagaagctccagggagacagtggctgtaaatatgtattggtgtggggggaattacttaccgatggtaattgaagctgaagacattggagacaccgattaaggagaaaaccag

SEQ ID NO: 216041 - DNA, 365 bp, Homo sapiens
ccccaaaatctagccagggaaaggaagaacttaaggctgggaacagtttccccatttctcccccctttccttctgaaatgctcatggctgaggaaggatggggaaggaaggaactttcaccttgggtctttctcacccatgagagaatcaggacaaagaggaggagagccaggtagctccagagtgggccaggagggagagcaagggaatcaggacaaagaggaggacagacaggtagctccagagcaggcagggagggagagtgagagctttaagggggctcttccgcagtggccccggcactcagttcctccatgcgtctgctctctggctgggctagacccaagtcaggcaaatttcaaccc

SEQ ID NO: 216042 - DNA, 165 bp, Homo sapiens
atctttttatttctgtgtgatttaaaatgccatattaacgtatgttaaatatatttactcggttgctgtgtcttttccactaatatgtctctattcctactcagtaccataatattttaattactataatgtatacactaagcgttttattcatgcctgaatcat

SEQ ID NO: 216043 - DNA, 482 bp, Homo sapiens
gaatgctgttatgggagttgtgggttcatttttaggtgtctgaagaagtttcaggacttttgaaatgatagtggagcccattgaactcagaattatccctttctggtctagtaggagtatagtggcatacggaaaatgaagcaaacatcaaagacagatgtactggcacaagattaaaagtatgtctcagctgacatagttgccattttaagactgcttagtttagctgaatatgcctggattttttttttttttagcattttttttctttttagcattggcataccatatgaaatgtgggcagttgccagtactctacagagtaccaaggcagaattggcaatgactaaatcaattcattcaaacaaaaattcatcatgtgcctactgtgcgcataatttgtggaatcaaagtctcttgtttccaggggctttacagtgtaataagtgctatagtaaatatatatacggagtggtaaccat

SEQ ID NO: 216044 - DNA, 167 bp, Homo sapiens
acttccactgggctcttttcaaatacttcctatctttttattgttattctctatttaacgacacattatcaaatagtcctttacttcttcaagcatagttttagttctttgatcttttttttttttttttttttttgagacagagtctcgcactgtcgcccaggctg

SEQ ID NO: 216045 - DNA, 242 bp, Homo sapiens
aaacaccaagtacaaaagaatatatgtaatatcttaccttttgcacaagaaaaagaattaagaacattaatgtgtttatttaaaaaataagaagaagaaaaggccaggaacaaatgatataagggtagggaaatgaggtggaaagaataggagaggcgctgggcgcagtggctcacacctataaccccagcactttgggaggccaaggaaggctcctgggttgagcccaagagttcaagact

SEQ ID NO: 216046 - DNA, 322 bp, Homo sapiens
ctgttggttttgtagctagccttgtaaaattttgtacctcttttgtgtgttttgtatttacataagtgctataagtgctactttgctctatcatttactttctttttcttttcttttcttttttttttttttttttttttgagacagtttgacagtttgactcttgtcacccaggctggagtgtaaaggcgcgatatcagctcactgcaacctctgtctcccaggttcaagtgattctcccgcttcagcctcccaagtagctgggattacaggcacacaccgccatgcctggctgatttttgtatttttagtaaagatgggg

SEQ ID NO: 216047 - DNA, 175 bp, Homo sapiens
ttgaggctattttcttcaattttcctcttatggttagccttttagatatatatatattttttcctctacaaatcttgcagagagggcatgaacagaaaaattcagcttaattagtttggctactgattaaggggaaaacatacttaattctagtagaaggttaaacttactattt

SEQ ID NO: 216048 - DNA, 403 bp, Homo sapiens
ggcctcactccatacggagctatgtgaccttatattatattgggactctagattattacataagactgggcgttctaaggacagtgggagaatgtatgagtcaggattctccaaagaaacagagccaacaggagtatgtatgtgtatatatagagagaaagagggaaggagagggagattttaaggaattggctcacatgattgtggaggctaacaagtccaaaatctgcagggcaggacagcaggctggagacccagggaagagttgacattgcagcttaaggctgaaagcagactgctggcagtgtctcctcttcctcagaggaaatcggtcttttttccattaaggccatcaattgactggctgaggcccacccacattgtgaaaggtaatctgctttac

SEQ ID NO: 216049 - DNA, 786 bp, Homo sapiens
cactcacaagggagtttaccaggcagacactgggtctctcacacttagtccacagagtcacagggacagcttttccttccgtgtcccatgtccccgctctctgtatgcagccttccttctttggggcatccctctatgatgacagaggaaagcatggcccttgctggcttgccagaagaggcctgatgtctcctgtctcctacctgcccttgatcccgttgccgtaactagggagatggggtactgtggttgtgactcagactgggtcatgtgcccaccaaaccatgcgatagagtcaaggagcaagaattccccagaagggagggagtcgtgtgcttctctgggcagatgaaacggtcggatctgtacccaactttaatctgctaactgtgctactttgggtgaacggcttggttctgcaagcttggttctgtctgctgcagacaaatagctgtaatgcttctgcctcacagagcagctaggatgaaaggggaacacatggaaagcttgggcagcccccgtgacaaagttgtcagtgtcctcggaagtggccagaaagagacaagcctccaagatttctcagaatgcttaccagggggacgcctcaatgcagccttctttcttcatattcgtacgggacttattctaattctcgctccagactctgatatcttgaggttacttaacttttttttgagacagagtctttctctgtcgccaggctggagtgcagtggcgtaatctcggctcactgcaacctcccaggttcaagtaattctcctgcct

SEQ ID NO: 216050 - DNA, 552 bp, Homo sapiens
catctgtgcttatgcatgagtagagtgttgactcatgatagtgggatccttattaaagagtggtggatggcttatggtgaaagtggctcctggaccatgtcattctcagattcatcacccttttagccacatagcctttggataaacccttgcatgggtaagttaaaaattacttgaattgccttttaaaatgagcatgcctgaaattgtatcttggtatatctaaatgtgaccttccaccagcgaatgcaactggttgaacccggtgtgagcagatacctgctgccagagctagttattgaaagttgggttattttgatttgtaaggtccaaggagggttatgtgtgcgtaagaggctaggacaatcatttgttcgttttccagtttggcactcactatattatttatgggacagggtgacgaaggatgagcatagtcctcgaagagccatagaagcaaggaaaccttagcttttgcagcttgacccacatgttagtctctgcatcctcacaggagtgattccagttttggaatataggaagatcagtgta

SEQ ID NO: 216051 - DNA, 436 bp, Homo sapiens
tcatcacttctctctctctgcactccacaaagacgcatgcattcagttcctctgaacacatgtgaattgttatcccagacttttctctcctaacctcaggacaagcatttcaaaaagtcttcttcagaacagtaatctccccagatactttgggggaaagggaaggaagaaagccaggttcatagtcaaataattttgggaaatacacttcttcacttggaaattcacagtgtacaataacatgttaaaggcttttgtttaattgtgcttagccaaatgtctctgcaacgtctttttcccgggagtctttgattttgccctttcacagtccctgtggccctagtggaacatactttgggaacgactgcttctgaccctttcagcctcccatctcatggacaccttcctcttccctactcaactggctccctcaccc

SEQ ID NO: 216052 - DNA, 591 bp, Homo sapiens
caactatttttatgattattactactgtttatttatgttaatggtatgcaagtctgtgtagcatcataaagagtccctgattgaatgctttcaatgtgaatttagagggtcaaatgaagggcagggggaaactaaaaccaaccaaccaacaaaaactctacaaggggtggagaaatggcatataatactgacctggacaggtagatggtgatagctcaacaagaggacttcaaaccagtggggtctcataaattccagacaaagaaaactctcccagccaggcgctgtggctcacacctgtaatcccagcaccagccgggcgctgtggctcatgcctgtaatcccagcactttgggaggttgaggtgggcggattacttgaggtcaggagttggagaccagcctggtcaacacggtgaaacccccgtctctactaaaaatacaaaaatacaaaaattagctgggcttggtggcaggcgcctgtaatcccagcttcttggggggccggggcaggagaatcgcttgaacccaggaggtggaggttgcagtgacctgagatcacgccattgcactccaacctgaaaaacaagag

SEQ ID NO: 216053 - DNA, 415 bp, Homo sapiens
cagaggttgcagtgagctgagatcactgcactgggcaacagaatgagactctgtctcaaacaaagaggcctaaacaagtatttgagaaggcagataatgttgaatttggtgcattattttgttactttgtagaagagataattattcttactgtaaaattgcatgacataatgttggtcacttactgcagtgataatctgagagaaaaggccgaaccagaaacgtatttttcttcctttgcttatttggagttaagaccatacccttcagtccacaaggtggcagcatttgtttactttgacagtatctcgactattaaacaatagacaaggtacggaattggtgacatacagtgaagttcactctcataagtagaagatggtcctaggttagcaatggcaaggaacaggaaaga

SEQ ID NO: 216054 - DNA, 384 bp, Homo sapiens
gatttgtttccatgctgtgacggttttgtttttttgcttattgtaatagcttttgctgttgtactcttttctggtctacactgcgtttatgagttgtaacagtcgtcacaaaggcctgcagctttcactttctgcctcagccagcgagactgcaaacccaccaaaaaaaaaacttaactgtcacacccaccctaagggtctgcagctgggtttttgaaatcagaccaagaacccaccaattcgggacacaccatgtgggcagctgaatcaagactttgtggaggagctccaaagtgggtagaaaagtacgttcacccttacagggagactggcaggcagcctttttccttctcggtagaaaaataaactcctgttccatagagt

SEQ ID NO: 216055 - DNA, 399 bp, Homo sapiens
gatttgtttccatgctgtgacggttttgtttttttgcttattgtaatagcttttgctgttgtactcttttctggtctacactgcgtttatgagttgtaacagtcgtcacaaaggcctgcagctttcactttctgcctcagccagcgagactgcaaacccaccaaaaaaaaaacttaactgtcacacccaccctaagggtctgcagctgggtttttgaaatcagaccaagaacccaccaattcagaacccaccaattcgggacacaccatgtgggcagctgaatcaagactttgtggaggagctccaaagtgggtagaaaagtacgttcacccttacagggagactggcaggcagcctttttccttctcggtagaaaaataaactcctgttccatagagt

SEQ ID NO: 216056 - DNA, 657 bp, Homo sapiens
cgcagtggcacacgcctctaatcccagcactttgggaggctgaagcaggagatcacttgaggccagagttcaagaccagcctggccaacatgctgaaaccccacctccactaaaaatacaaaaattagccgggcatggtggcgcatgcctgtaatcccagctactcgggaggcagagaaggaaaatcgcctgaattcgggtggcaggggttgcagtgagccaagatcatgccactgcacttcagactgggcaacagagtgatactctgtctcaaataaataaataaagccagaaaacaataaaatgaaaacttcatagtactgaaagggggaaaaaaacccagcctataattttatatccagaaaaaaaaaaaccttcaaaaaaaaaaaagcaaaataaagatgttttcaggcaaataaaaactgagacgggttgttgacagcagatctgcactataaaaattattaaaagttcactaagctgaaggaaaatctctcagataaaagtaccacttcaggaagaaatgagaaacactgttaaggaaaatatgtggttaaaatcaaaagaataatatttgtgacacataaaaactatataaaactcaataaataaagttttattggaaaacaaccatactcattcatttataacttatct

SEQ ID NO: 216057 - DNA, 910 bp, Homo sapiens
gttgtgctgtgcccaaagtgttgcttcttctatgacctgaatcaagtgttctgcattattccaatgtcagacctgccagagggcaaattaccaaatcaacagtctccttggatgataaatctcgagctcttcagcagaacagcaaaccagctgctattctctgagctgcctcatggaagggcccaactggcaagcaactgagacaagcaatcgtcagagaagaatggatgtaccccatccaaagtcctgcaatgaacttgaatgatcctgcaatctcagaattgaaagaatcctatcaaaaacaaagaacttatgagcacatactgtacagtagaacttgagatgactgcagctcttgtctgcaccttgaagatttgcaagagtccctgaactggaagaccgcactaagctatgctcagtttcctaacccactgtaactgtaagataataaatgttattcttttaagcttctaagttttagggcatttattacacagcaatagataaattatacacaggccataaaatgtcccttgtggatattaatatcttccatctctgaatgataccactcgttttgtaagttaatcattaattgtcttgcattgtttacttagtgttaattggtcatgttcaaatgatgttctacagggccctaaggaatatatgtgtatgaatatgtttgctttttgtatgcagtgtgagtgtgtgattggggtgaaagtttaaataaagaagttaggtagacagggctctgagtgcattttttctaccttagcaagaacagtttctcttttatctgctaaatgtattaggttggtgcaacagtaattgtgatttttgcattgttgaaatttgcagattgatatcggaatatgttcttaaataaatgtggttatgctatacatca

SEQ ID NO: 216058 - DNA, 363 bp, Homo sapiens
ctccagcctgggtgacagagtgagactccatctcaaaaaatgaaaaaaataatttgctttttcctagatgccatatcacacattaaatcatctaatgttaatatcaaaaaagacccaggagttttgcccaagtgttgctgtgaggccacatgtgtttcatatgcggtaatacagtctaggggttaaacacagtcttaggattgttaagatttggaccttggctctattcactaccagttgtgcaagtctagacaactaattaagtctttgacccttagtttttgaaatttgaaaataaaatgaaaaatctacctatttctttggatattgtgaggattcatgcatgataagtcctgagaccag

SEQ ID NO: 216059 - DNA, 261 bp, Homo sapiens
tctcattttgttatttgtaaaatgggctataatctctgtccaagcttccttcaatctccatttcatagtttacagagaaaggagacactgtggagcacagacttcccctgggaatacattgggcttaatgagcttgatagtctggtgggctcaataaatcaaataaagcaaaacatttctcatttttgaataaaagcatttatcacacagtgtttgttcactcatggtcacaagattgattggttcccagtatcatagcat

SEQ ID NO: 216060 - DNA, 471 bp, Homo sapiens
agagtcttctctgcccactagaccccgacacaaccaacgccaatcacaccccgagcatagctgccccactatatacatttaatggatatttaactccctttctactgtttttttgtgtgattataaacatccttgtatatatttaaatcattaatttgtgccatagcaactaaaccaagcttgtttccagactgtaaaggtttgcaaattccagcttcctaagtctttactgaaataattcagcatgatttttaaatttacttatagtgcctaccttatagcctgcattgtggtaaaaaccaaagcagctgaagaatgatccctgcttatgatgtaaaaatggaggcagaagacctaaatctaaggcaatatacaatttaatgtgacaaaattatgatatagagggtatgtaattgctgaaggaattccaaagaaaaaataaataaattctgacttagctaatgttggcat

SEQ ID NO: 216061 - DNA, 285 bp, Homo sapiens
tgtagctatgcatggccataagtccaagctttggtcaatggaatctaggtagaaaatcaagtcagaatttccaggatactccctgaagttgttacgcactttttatttctcctttttgttttctttctccatcctgttgcctggagtacagacatcacgatttcaggctgtaagattaaggccagtacaagggagggagcaagaaggcgggaagaacagggtctctgaggactttcaggagcagagctgccaaagagccttggactgcttaccttgggacttgac

SEQ ID NO: 216062 - DNA, 147 bp, Homo sapiens
tgccagggtcactactgtttacctctctctttctttttcctttttctgtcttactttgtttcctccctgacacttcaccctttgcttgtcttaggctgtttcttagttttcccttcatcttgacccccttctgtcgtcttctcgagc

SEQ ID NO: 216063 - DNA, 481 bp, Homo sapiens
gagtgggccgggcgcggtggctcacgcctgtaatcccagcaactttgggaggccaagacaggcagatcttgaggtcaggagatcgagactatcctggctaacacggtgaaaccccgtctctactaaaaatacaaaaaattagccaggcgtggtggcaggctactcaggctactcaggaggcagaggcaggagaatggcgtgaactcgggaggcggagcttgcagtgagacgagatcgcaccacggcattccagcctgggcaacagagcaagactctgtctcaaaaaaaaaaaaaaaaaaaaagattagagtgaagattaatgaaatagtgaataggaaaacaatagaaaaatcaatgaaaccaaaagttggttatttgaaaagattaacaaaattggcaaatctgtagctatatttactaagaaaaaaataggataaattactgaaatcataaacgaaagaagagacattgttcctgataa

SEQ ID NO: 216064 - DNA, 399 bp, Homo sapiens
aagaaggcagtggggtgtgtgggtggttgcagggaccagctagcgacttggcttgggcaaatatggcatgaattttgaaagccacatttccccaaggcctactcccttttcttgattcgagagtaaggctcgagtatcacctccttccctcctcttggcaggtgggttggctttgaggatttttttttttttttttttttttttgagacggagttttactcttgttgcccaggctggagtgcaatggcgtgatctcggctcaccgcaacctcctcctcccgggttcaagcgattctcctctgtcagcctccagagtagctgggattacaggcatgcgccaccacgccgggctaattttatatttttagtagagactgggcttctccacattggtcagtc

SEQ ID NO: 216065 - DNA, 405 bp, Homo sapiens
atgctaggcttggtctttcctaatgaaggagaggctgctgactagtggggctcaggtcagacttcctgtcaccagctgggcttgcacacgtagggaacactgacgaatggcttgggctttgtgccccatcagcactgggccctcatggcccagtcacaggaatatggctagcaaggcagcacgactgctttacaccagagttcagggaaaggcatcacatccctcaagccacccaagcaagaagtctggtggtcgtcctagcctcttgctctgcctcatacctcacagacgatttgtttaccacgtcataaagattttacttcttaaatacctctcaaatccatcccctttcctctcaatggctctggccactgacttaattcaggtcctcatcattgatcatca

SEQ ID NO: 216066 - DNA, 392 bp, Homo sapiens
gatgtaccatttccgatttgattgtgaaatgtccctcccttgggcttcatcttctttcactgtatcagtgccaacaatttaacctgccaactcaattaaggttcattcctatagaagtctgtcatgtttttacttgaaattcttgagttctccttgcttgtttggttaagggacatatacggctctgttttcaatgggatgttttagagccacctcaattagaaatctagatattctgatcttattccagtgatctaagtagagcagtacttagttaaatggcctggaaacttgttgaaattattttatttgcttactgaaagcattcatttatatgtgggttactatggctagattttcctggtaactgctctttattataataatgggaa

SEQ ID NO: 216067 - DNA, 167 bp, Homo sapiens
aatcccagctgcttggagactgaggcaggagaattgctgtaacccaggaggcggaggttgcagtgagctgagatctcgccacttcactgcatactccagcctgggcaacagagcgagactccaactcaaaaaaacagacaaacacacagaaaaccaaaaatctaata

SEQ ID NO: 216068 - DNA, 234 bp, Homo sapiens
ctgcttcctcctctgattttggactcagacatacctaaacttgaatcttgactctaatcttactgctggatcttctctgagcctcggtctcctcttctgtaaaggggcacaacacagcactcccacctcctttggtggttgtgggagcaatggttcccgcctgtaaaccacctcgcagaagcctgggcccaggcagcacagcccggctgctggagcgttactgcttgccttcct

SEQ ID NO: 216069 - DNA, 695 bp, Homo sapiens
tggtgcaacctcggctcactgcaacctccccctcctgggttcaagtgattctcttgtctcagccacccaagtagcttgggactacagatgtgcaccaccacacccagctaatttttgtatttttcacagatacagggtttcaccatgttggccaagctggtctcaaactcctgacctcaagttatccacccaccttggcctctcaaagggctgatattataggcgtgagccactgcacccgaccattaatcacttacttatatatctttatggcttaagtgcctactcctagacattatagtttaatttgcttatgttttttgatatgcatcttaaaattcttaatttacagttccccccaccatctttttttttccatataatttatctttgaacaatctgagctttttgacttagagagtttcccacagtttggattttattcatacagtcctgttgtctgtttccttcagatttgcagctggattcagaggcttaattaattactcagacttgatctctttggtaaattgtgcccttatagtgttgtgttctttcattgaggaggcataaatatctagttgtctctttttttgtgacatataagaaaagataaaaggataaattcttgattatttttcccctccatttatttaccagtttttaagaccatgaacatcttctgaaagtgaccc

SEQ ID NO: 216070 - DNA, 410 bp, Homo sapiens
gagcacttcatgatttgtttctctcgggtctttaagtcttatctcatatttccaatcatgttcttccaccccaaacataaagtactacccttggtaacttgaatcttctcagctttctcaagctgtaatgcttttgccttgccctgtcctctgtatctgaaatgatgcttctatacaacatctgtgtatcttttaatgtttaacttagcacattttctaaaaaaagcttccttggatttcaggcttgggcaggtatgcattatccacccgtgtaaggatgaagtactttcctctattcgttgttcttattgacagttattttttgctttttaaaaatcgtgttttagtttttttaaaacgtctttctcctactagattttaaattctttcgggacagaactgtaacttta

SEQ ID NO: 216071 - DNA, 499 bp, Homo sapiens
gcactcttagatatgtaggccaatttattcattatttgagttctttagtacacatagtacattcctctgagatatgaaatggcaatgatatgtactcgtcttattacaaagtgaagatgggatagattttagatatttcaaaaaatgagtgtactttatttctgtttgtacagtagtcccccccttatccatggtttcacttttcatggtttcaattgcccaacatacaatacaataagatattttgagagagagaccacattaacctttattacagcctattgctataattgttctattttgttattgttattgttaacttcttactatgcctagtttataaattaaactttatcaaaaagttatgcatgtatagcagaaaacagtatctatagggttctgtactatttgccgtttaggcgcccagtgggggtcttgaaatatatcccccacgggtaagggggaaccacatacttcaatacaaagttgaaaaagctct

SEQ ID NO: 216072 - DNA, 603 bp, Homo sapiens
aagtgggtttcatacaagggatgcagggatggtttaacatatgtgagtcaataaatatgatacattacataaatagaattaaaaacaaaaatcgtatgattatctcaacagatgcagaaaaagcacttggcaaaatccagcatccttttatgattaaaattctcagcacaatcggcatagaagggacatacctcaaggtaataaaagccatttataacaaacccacagccaacattatactgaaagtgaaaaagttgaaagaattcccccagagaactggaacaagacaacaatgcccactttcaccacctctattcaacattgtactggaagtcctagacagagcaatcagacaagagaaagaaataatgggcatacaaataggttaaaaggaaatcaaactattgttatttgccagtgatatgatcataaacctagaaaaccctaaagacatccaaaaagcttctagatctgataaataaattcagtagtttcaggatacaaaatcaatatatacaaatcagtagtactgccatacaccaatagcaactaagctgagaatcaaattaagaactcaacccatttccaaaagttgcaaataaa

SEQ ID NO: 216073 - DNA, 220 bp, Homo sapiens
tagccagggtcatactctgtcacccaggctgcagtgcagtggtgcaatcatgactcactgcagccttgacctcccaggctctagctattctcactccactgcctctgtaatcttttttcttttcttttctttttttctttctttctctttctttctctttctttcttctttctttcctttctttctttcttttctttcttttcccttctgtcgtcttctc

SEQ ID NO: 216074 - DNA, 456 bp, Homo sapiens
tgtgatatagaaagatggtctcattactttgggagtagttataaatctccctataatgcctgtatataatactcatatgtgatataaaatgatggtcccattactttaggggtacttggaaatctctgtataatgccgacatataattctcatgtgtgatgtagaaagatggtcccgttactttaggggtagttacagatctctgtagagctcctgtgtgtaatacccatatactatgcctctgttgattcagatagatcaattacttcatagaatgaatctgcgtgtctatttttaggtggatgagttgctatgttttaccattactattcttgctacattagttcagcttctacaggtaaccaaatgattttcattatcgtatatttataatgtctcatccagttattttctggaatgagagtacaaataaatgtatttctcaagctgaaaaca

SEQ ID NO: 216075 - DNA, 498 bp, Homo sapiens
catgtgattggatgatcaggtgtagaggagagaattccagcaagtgttaataaggcacctgtcagttgcagacactgatacaggcacgggggtacagcagtcagtaagataaccccttggaacttatattctaatggggataaatagacagtaaacacaaataagctctcatagggctgtgacaaagataaactcgagtaacatggcagaatgatttgtgcgagaggtactgcttttagccaggatcttcaaaacattccacgcagaaagaagaacaatgcaaaggcctgagagagataaattcaacatagaagaaaggggtagaagaaagtccagcatggctggagataatgaataaaatggggattggaagaagttggggtgagagagatggcaaaggccagttgcacgtggttaggatgtgggatttcatttaggttccagtgggcactgagttggagcagcgtgggcagcagtagaatgcacaaggtctatttg

SEQ ID NO: 216076 - DNA, 578 bp, Homo sapiens
ctcgaactcctgacctcaggtgatccacctgcctcggcctcccaaagtgctggaattacaggcgtgagccaccatgcccggccaatatattataaaacaagactcactgaacaatacttaccctggccacagttgatatacttttgatgttttaaaattctattttgctgtttcatttttaaaacgtgctggtcatgattagcttcatgacttcatgaacagtaaaacgacttgccatttaaaaagcactaagttggggaggcatcactctcaaagttctattatcagcagaagtggactgactaatataaggcaaagggaatgtattagaagaaggtcagaaactcatagactcactaggaaagctgcagaaccaggcttggaaatggacaaagtgccaggggctcgaaagagagaactacaggaagatgagggcagctggctgttacctctgccagtctgcacatcgtggaaatgggtaggtttctgtggtacaggtcaggcagcctggctcctggatttacaataggggaaacggaactcccagagggaagtggctgtgctgtcagggagggggc

SEQ ID NO: 216077 - DNA, 668 bp, Homo sapiens
ctcatttatggtgcctgaaaggtgctatttctggttcttgtagcagatgaactcatttcaggccattgataatattaatatgtcttgtttttcagcctgccattcatctcacatcttttgggaagtgagtaggctcaaatctcatatactcaagatgaaatggaataaaaaggaaaattattgattagaaagaaacatgaggttctaagataggttttcaaggtggattggaggatttctatcacttaaaatgaccaataatggagggccagccatttgactcaatattcttggccatcattagtcacctgtacttgtgtggtaatattcgggtctctatattgttgtcccctcctcccacaatccatggttttactttccatggtttgttacttgcagttaattgtggtccaaaaatattaaatggaaaatccacagataaataattcataagttttaaattgtgttctgttctgagtcatgtgatgaaatcctactctctttgcctaggatgtgaatcatccctttgtccagtatattcacactgtacaggtatgcatgcataggaaaaaatcatagtatatatagggttcagtataggctatgaactgaatatatatactagggttcatagtatatataggttcactatccatggagtcttggaa

SEQ ID NO: 216078 - DNA, 421 bp, Homo sapiens
cgccagggacattttaatatgcatattgttgctttcacatataatacagtaagggagtatcagaaaacctgaatctgcctgactaaaacataccctgttccacaaagctatatatatgagagtattgaaggtggtttaataccaaattcaaaaattcagcctcagtgtagcaaacttttaaattttccatgatataaagtaagttttaaccaacaatggaagtcacagcactaaagtacattactattatatgattctctgatggtaatagaaactgtgctgcaggacacgttttgattcaggaagaaatgtggagtaactccacagaggaattcatcctttctaagtttaaatctgaacggaacccatatgcccataccctgaagatgcatgtaagggaacaacatggcttggtctgttg

SEQ ID NO: 216079 - DNA, 489 bp, Homo sapiens
ggagtgttgacatttagggatgtggccttagaattctctctggaggagtggcaatgcctggacaccgcacagcagaatttatataggaatgtgatgttagagaactacagaaacctggtctttgtgggtattgctgcctctaagccagacctgatcacctgtctggagcaaggaaaagaaccttggaatgtgaagagacatgagatggtaactgaacccccaggtttacagtgacagccaagacagccctcttcatggcacataagagactgtgaaatctgactgctttttcattgtttttgaaaacacatagataatctgcataattttgagaaactctatgttaaactgtttttcaagttctgtttttacatcatgtcctaaatgtgtgagagcagtggtttctgttccattggttttttattgctaatttttctgcacattgcattctgtcttattatagtcttgaagtatagtttgaaattataa

SEQ ID NO: 216080 - DNA, 376 bp, Homo sapiens
acatttttccttccagcattatggtagactcgatgccctgaccaagcaccctttagcatgctcaagtaattattctcagtctagaattgtagagttccttaagttagctttcaagaatgagagtgaaatagatatttttagaagaatttgagaaaccaacagaatttggtatcagcaaaggccatgtgaagatggagcagaaatcagagggatgcagccccaagccaagaagccagaggaacaagaagctgcaagaggcaaggaaggatttggccctgggggcttccagagggagcacttccttgtcaagccctgattttggacttccagccttcagaactttgagagaataaatttctgttgttttaagccacta

SEQ ID NO: 216081 - DNA, 464 bp, Homo sapiens
tctttactcctctatcccacacatatatttgaacttttttttggtttttattactgacctggtccatttggaagttattcccagaagtttttcctcggtacaaggtttgtttctggtgggggtttggtattcgggtgttttaagggcccagagcttactacatcatgatccctttgtaatcatctgcaaattagatcctgtagaactttttaaaactttaagccctgttttcagattggcctgtgctttccagtgggttggcagtgttctcagggctgtcagaaacccagtcagttaccttgcatctgcttccttactaaccagtcttgtagttgtcagagctttgtttctgtccaattatatgcaatggttcatggttttgttgtagataatgtctctgggtctttggttttctcattcagtttgctgtttttgtaggggaggttgggagggaataaaacaaa

SEQ ID NO: 216082 - DNA, 277 bp, Homo sapiens
tcgagggatgtatgtggacaggacacctgtgctggcgctgaggttcacggcacaggatccagtggagaggacacagcactcaccatcaccttcccctttccagcaaatatgctcttgcccactgtgctagtggtgggctgtaccctacagggcttggtgcccctagggctaggcgtggagcattaacttcatatttgttaaatggatcagctattaagtaaatgaataaaaaggtataattcttttaaaagtccatgaataaattttactttaaagg

SEQ ID NO: 216083 - DNA, 404 bp, Homo sapiens
atcatagctctctgcagcctcaaacaactaggctcaagagattttctcaccttagcctctggagtagctgggactacagatacataccatcatgcctaactgattagatagttttaaaagttacctttctaggccaggcacagtggctcacgcctgtaattccagcactttgaaaggctgaggtgggaggatcgcttgagcccaggaatttgtgactaacctgagcaacatggtaaaaccatgtctctacaaaaaatcaaaaataattagctgggtgctgtggcgtgacctgtagtcccagctgctcaggagactgaggtgggagaattgcttgtgcctggaaggttgaggctgcagtgagccatggttgtccatcctggccaacggagcaagaccctgtctca

SEQ ID NO: 216084 - DNA, 467 bp, Homo sapiens
atagatgggaatctattaggagttgtcatgagggagccttctggggtgccagaaatggtttattggtgtgggtggtggttacatggataggtacatatgtacaaatttgttgtgccacacgtgtaagattagcacactttcttatatatatgtatacatcagttaaaacttcctctgagcagaagatactttttaggtccctttgagatctgacttcccaactgacacaaataaatatctggctgcctccccttggattcctcggttagagactgaggcacagctctcatctggagctcttagagactccacttagagtttgtactgcagagagaaagtaaccctgaaaagtggggtgattttctagtagctgattgagcagggcagatgtcattttatagcaagaccctccccagtcccaaaatctatccctctcctcccatatctatgggaaatgctctccctca

SEQ ID NO: 216085 - DNA, 320 bp, Homo sapiens
caagaaataaggctttttttggcataatttctactacattgttacactatcatcaagtacaatgttttctggcttaaatatgttggtttctttggcttcatagttatatatacacacatgtgtacgtacatatctgtgggtgtgtgtaaacatattgccatacaaaaaaaaagaatgtgagtcttggactcttccaacataaaataaataccttatatttttgcacccagactaaaatttaaacacaaaatcagaacgccaaatgaaatgcattttcctttggtccaaatgaacaaagacaattctgcttctttctcaaa

SEQ ID NO: 216086 - DNA, 497 bp, Homo sapiens
ccataagagaacttggcacatccagggaactgtgagtagtttgctactcaccgagaagtaaaatgaaatgcataagcaatcatgggcaaatatacagttaagatgtaaaccttaagcagaaagaaattattaatattgatttaattattattgagttatcatttacctgttgcaaaatgcagattttaggggttacagtatgattatatttggctattgaatttgcttacataacccatatcccaacaagatacagtcaattctaccctaatatgaaatatgcattcctaaaaatcgccattgccacataaaatcatgcaataaaagtcacatcataaggtttagcacaaaaatgagactgggcaaaacattcaaacacttcatcagtgacacataaaaatatgtaggagcctaataaaaacactagtgcagttttacacatgttatgcgattaggaagttcataaatgctacaataaatatggcactttaccttga

SEQ ID NO: 216087 - DNA, 393 bp, Homo sapiens
gaaataaagtccgatagaaatactacaaagatgtacctgatgagaacaagtgacttgtctcccccacctgaaagtggaatggctggctcaagcatagttctgccatctcacagtcagagtcccaaacattctcatgaactccaggggcatttcatgttccaaagacttctgtttgctcgcccttctttggagagtatatatggatgttccccaagtgcttgttctcctaagtgatttccaggacctaacacactctccatttacaatgccaagttattctctcctaattgctgtattcctcccctcccatttgaaaaccctgaaggtagatgtgacccgcacttagggttagctgagctttcaaataaaactcaatccaaagatccaaaacca

SEQ ID NO: 216088 - DNA, 531 bp, Homo sapiens
cagaaagcattaataacagccaagaacagccttcaaagaacatacaagcagcattcgaaccatgaaaacagactgcagttttactccaaagttcagtagttaattaaagaccagcagaaaaagaagacaatttttgttattggcaggaggaagaaattttcctttaagcatatattttacattaagggaaatgtatttatgtgtgtgtcttcatggagtgtcaattaacagatgggtggcctttcaagaggtgccagaaggtccccctaatggctatgagggttgtagagggcaagaatcaccagcagcaatgtcttatgctggaagactgtggtttgaagatacataggtctgtatagggaaagtgcatatctaagattatatctagataattttagattggggaatcatatgacgtcacaagacaactttttattaaaataagaataatatgtttctgccagtttatttcagcttttaaagaaactgatatttttaaaattaagtaacattgtgtcaattcatagaaaa

SEQ ID NO: 216089 - DNA, 498 bp, Homo sapiens
cctaattaaaacaattgtccttaactcttcctgcattaaggacttctttgagaatcagataaaaactatggattcctccttctagaaaaattcatacatgtaatatttttcatataattccaggaagcttatggtctggtccatctaaagtctccacatgtacccctaaacataagaacccctgattaaagactctggcatggctcctggtataaaatgggtgcttaaaaataattgctgggacaccatccaccatctgattattgcccagttctggactcagccatgttgcaagctataaccgtttttgccccctggactagggacaccctgctgttcttcccccactgagtctgggtgctagggagataaagttaaaaaaaaaaaaaaattttttttggctttctcaaaaaaaagagcaattattagagcacttatgctctaattatgctctttctcacctagagaaagctgtcattctaaggaaaaaagggaaag

SEQ ID NO: 216090 - DNA, 420 bp, Homo sapiens
tgttcccagatcgccaattcctggtgataaaaccagaaggtttggggctgcattagccttaaatgcaccaagtagcagcctccatcgaggtgctctgcttacaccccttcacatggccctggtctggggtggtggcccaggtgggaggaggggtgagcagggagaggctctgctggggacctcttgttttctgctgggagcttccagtgacatcttttcatctgagttgagccgagacaaggccagtattttcagaaaggcaacctactaggaagggaagggaaaagcaaaacagagaagcaaaataggtgagctatagaccttgtttaccatcctttactcagctagctggtgtcaacaggtggggagcatttcctgagaattccagcccttccttcctcaacctagtctgtagaactc

SEQ ID NO: 216091 - DNA, 361 bp, Homo sapiens
cctcctgtttttccatagacttttaaatgtggatgaggttaggcgaaatctggcaaactgcaaagaggcagtatgctggcccaatagggaaatgtaataatggcaagccattcaggtccacaactattttttttctggaccacatagcttcccttactatttcccatcatttccagtctcagagattctgaaagcggacaccagttgcttctggaaacaaaggatgaagctgtggatcattagttccattttcatgctgcttgttacttgcctctcagaggtttcagcacctctgtggactggtgtaagtttgcagggcagccagggaaggcttgaggcagatccagtgtttgctgccatc

SEQ ID NO: 216092 - DNA, 278 bp, Homo sapiens
gtgtaagggaggaactctgggatttccaagcagagagaagtatgagaaactgacagtaggacaaggttagtaggagaaaagctctaacatgttgggcaggggacttgatacttgagtggtgaggaaccatcaaagactttcaaacacgactaacaggttggacgtgagtgactcagtgattcactgttttttgttgctctcaatctgtgcacaatttcagctctggtttaaaaatataaccttagaaagtgggattttgattttaaaaagtaaatata

SEQ ID NO: 216093 - DNA, 463 bp, Homo sapiens
ctgaggctgcgtcttgggtgcgcagctccggcccagcctcacccaggggaacgcctcgcaggtgctcacggacgatggagaggtccgcgcccagggtgggagtccgcgcttccgggtgtgtctgcagctcggggcgctggagggtgggatgtgaccccgagacggcggcggcctggcacgtgatgtatgtgtgtccttgtctgatgtgtcggtgtccccgatggaccgggttccagtcccagctttgccactccccggcttgtgtgccttggggcaggtgactaccccgcgctgtgcctcagttgcctcatctgtacaatgggcatgattaaaaaatacctgtctcagagggcggttgtgaggattgagaggtaattctgtacgtgtaaaacgctgcggacgatacctggcacagactaaatactcataagaataaatacattaaataaactatgatcatgta

SEQ ID NO: 216094 - DNA, 1080 bp, Homo sapiens
ctgtgccttatgcagagccgactcctggcagtttgcacaggctggaggtggagctgcaaactccctctccctctcggccttgcctctgtaaatgggaaagccgttgacattcacaaaagaggggcagggaactgctacacaagagcagctacacaagagggtcctttggtccacacaggaaacaagccatagtgatgacatattttgaagctgttagatgttttgtttccctagctggctattatttttgtatggcttgtctttctcttttgagtatgtgtgagaacaggatgggttaacattagggaagagcacagaagaggaaggaaggaaagaaggaagggagggagggaaaggagagagaatagggatgagaagctcagcttgtagaattggcaggtgatgtttgcagtcattaatcatttgagaagtagagagagaagccaagcaggaaatcttcagactggaaaagaagtgctcaccattaaaaaaaaaaaaaaaaaaaatccagtgtggttcacagctgtaatcccatcacttggaggctgaggcaggagaaatacgtgaagccaggagtttgagaccagcctgggcaatataacaagacccacatctctacaaagagaaaaaaaatgtaaaaaaaagaagctttaaacctaagacggcagaattcaagactgttgtccttgagaacttcctggctctggaaaaagctcagtgagttagtctcatcctgtcgttagctctgttttttaggggctcactttgtcttcacgacagtaccttgcaccattctcatgggtatcccagggtggtgcaaggcagttttctgcacttcccagaatgccctgtcagctggcttctgggtaggttctgcaaattggaggcccctgtgaaagatcgctgtggggtgggaggaagaagctttatctgcctgctggctgcagggtagaggactgcagtggggttatagggatcaccacctgcacatgtggagctttgagcggcttcactctaagtttctgctcaacagtggcagccctggagtccttcgggggcgagtgtgggctcctgggctcc

SEQ ID NO: 216095 - DNA, 299 bp, Homo sapiens
gaagattgagtgtttagttttgaaaatgttaaatttgatatttttattaaacatctatatggagatgttgagtagacaaaattgtgaagagagatctgaattgaaaatatgaatttgggagttatggacatacagatgatatttaaagccatgagactgaatgagactaccatgggaatgactgaagacagagacaagaagaataaccaagagctgagcctctaggtacatgaacgccaaaaacaaaatagaataaaacacacatacattaaaaatgctcaattttatgagtaacaata

SEQ ID NO: 216096 - DNA, 269 bp, Homo sapiens
tggcttgcaacgccattgtaactcactaatcccaattatcagtatgtagcttggatcaattccgtgaaccagggtttctgtcgaatctcaaacgttaagggtccaaagccatgctccctgtttcccctctaacctgctccttcaccaccgttccctatttgatgtaaacggtaccatttttactcagctgctcagactaaaagccgtgagtcagccttgccctgtcttgcttccacatctgttctgactacacctctccgttatgtata

SEQ ID NO: 216097 - DNA, 630 bp, Homo sapiens
taccggattttgacgcgtctcctaacggaagtaaaatggccgtgtgcgcatcgctggcatcgggaatgtataaagccacagtgcctgcttgtggcactcacacccagtcaagtcatcgtaatagagtgttagtggccttctatcatggggggaaagtctggcacaggaagaagcaggtcttgactgacaggggaattacctgggaagacagctaacgaaggggcaggggagggacagaggacccgagtgttcaaggaggagagcagccagaaaaccacccaggcacctcccgagcaggaaggcagcagggggagctgcggggactcgtgtgatttcaatagtagcgcttctgcggagagacacagcgaggaaaccttctctatggagaggaggccgtcgttcttctcaggccagacatccttgccctccagttcatagaagagaaaattgagggccgggcgcggtgtctcatgcctgtaatcccagcactttgggaggcaaaggtgggcggaccacctgaggtcaggagttcaagaccagcctggccaacatggtgaaacctcgtctctactaaaaacacaaaaattagccaagcgtgatggtgggttcctataatcccagctactcggg

SEQ ID NO: 216098 - DNA, 647 bp, Homo sapiens
ttgcacctcctccctcctcctcagccctgagatttatgacatggccgtgtgcgcatcgctggcatcgggaatgtataaagccacagtgcctgcttgtggcactcacacccagtcaagtcatcgtaatagagtgttagtggccttctatcatggggggaaagtctggcacaggaagaagcaggtcttgactgacaggggaattacctgggaagacagctaacgaaggggcaggggagggacagaggacccgagtgttcaaggaggagagcagccagaaaaccacccaggcacctcccgagcaggaaggcagcagggggagctgcggggactcgtgtgatttcaatagtagcgcttctgcggagagacacagcgaggaaaccttctctatggagaggaggccgtcgttcttctcaggccagacatccttgccctccagttcatagaagagaaaattgagggccgggcgcggtgtctcatgcctgtaatcccagcactttgggaggcaaaggtgggcggaccacctgaggtcaggagttcaagaccagcctggccaacatggtgaaacctcgtctctactaaaaacacaaaaattagccaagcgtgatggtgggttcctataatcccagctactcgggaggctgaagcag

SEQ ID NO: 216099 - DNA, 420 bp, Homo sapiens
accctgaggagctgggcaaactagcagaaaagatggcgctgggagaaaggaaagttagactctggacgggaaatctggaaagaagtggttcccagctgggccaaaaagcctcatcctacgccgtctcatcgacctgggctccaccctgagtgcctccagtgtgaggtgctggactggctctgtgctgcctgtttgggttgagggtttgctcctaggagaggcatgtatttctcgtacagctgtcacaagcgagtgagggctccggaggtggagggcccaagagggtggggagctcaggcgtcagtgatagccagatttccatccatcggtccgtccgtccgtccatccatccatccatctatccaatcaacaagccattccggattcttcaggaatccagtcattcatttatatttaggt

SEQ ID NO: 216100 - DNA, 466 bp, Homo sapiens
agacaggcaccaatttgaagcttaatgacagcagaaacagagaacaactactaactaagagtatttttaatacagtgctgaagagccagctgaactggctttgtagatcatcctcaggaaactgacggtcaggcctcctgtatgacaccagggagctgaggctttatggattggatcactgcacccaatgagacacacctgctgcctgtcgaaccaaccctcttcctagctcctccataattcctttttttcctgcacgtgattacagtgagatgctagatccctcattcagctacctgctgcctgttgaccagctcctcttcctctcccccggccctggttcttcttccaagctattaggtgaaagcaaaagtaattgcggtttttgcattgttgaaatttgccatttgatattgggatacatttttaaataaatgtggttatgttatacataattttaaaaaaa

SEQ ID NO: 216101 - DNA, 457 bp, Homo sapiens
caacagtttatagtgaccagaataggaatatttttctgtttccagagtacttaaaatgtttaaattaataattcttaatgttttgaggtgaaagaatttggagcagaggtcacaaatttgtgaccttctggctaaaactactcccagatgctttgattagacagtacagtattttttaaaggaattgggattaattactaacatttataattcaggagataacaccaagtaatccagattattatatttttaagatctgaactttagctggctttgggggcctgtatttccacataagtaaaaaccacctggccatattgtcaccacatttaggtggggtatactttttttacgacagccttcacgcctggcctctgtgtatgcatttgagtttattacccatggtctaggaagatgtaataaaccaagccagggaaaggtttggctatctctcttt

SEQ ID NO: 216102 - DNA, 374 bp, Homo sapiens
tggcggcggttagggggctgcgcgccggccgcggatggcgtcgcaggcgcgggcgggcgaggctttggggatctgtaggcaggtcttcgggggcttggcgaccagcgccccggttttttcttctccagtccttctctctggtctgtaatggggcgaggggaccccgggatggagcctcggcaccgctgttccggaccgaggctaacggacggcggcgcctctgctcctactagttttctcccggaccaaccgaaaagccgaggcggagcgcgggggtgtgaagatctcggcctgctgggggtccctggagctgagggtgagggtggggccgggtcggtgggacaggccgggtgggccggaggtggcgcggccgc

SEQ ID NO: 216103 - DNA, 323 bp, Homo sapiens
cagtatgtaggcccggtttcttagacatgatgtctgctgaaatggtgataaggtatcccacattatcggtgtttttttgaagacagcctttagggtttcagtgtcatcatctttatgccttttgctaaaacagtttatgttctgccttttagtaagcctttatgttaaaaacgtttcatattaaaaaaagttatcatttggaatacataggtcaactatctaggaatgggacaaagtacagaaacaatgagacaggatttgtgggatgagaaattaaaaaagcagtcccttcagctgaagaagctgcttagaaatttaagccg

SEQ ID NO: 216104 - DNA, 544 bp, Homo sapiens
ttttaaaaccagtttgtcaacttttatctaaaacacctgctgagaatattattagggttacattgaattcatgaattaatttcagagaaataaggatcttatatattgaaccttataatccatagacatgatatatatctttactaatttaggttttctttaatttacctcagtgattatttgtagtgttctatgtagatcattctctctcagtgaggttttacaagagaagtaatccataatgctcgaatgcatccttcatatgtaatgaattaacttattgcttatgcatctggaaatgtattagcttgttagacttctttggtagaatcaagagtagagtcacaggttggatgtggtgacttgtgcctgtaatcccagcaacttgggaggctggggtgggaggattgcttgagtccaggagttcaaagaccagcttggacaacatagtgagaccccatctgaaaaaaaacaaagaatagaatcattaaaataactttttgcttaattctctcatggattggggcaacatcttgcaatactg

SEQ ID NO: 216105 - DNA, 469 bp, Homo sapiens
ttaaaattttttatttttttgatacagcatctcgctctgttgcccaggctggatgagtggagatcacgccactgcactgcagcctgggcgacagtgtgagactcggtctcaaaaaaatatatatatatagatagatttaaagatatatatctttgtatgtgtagaaaatttttgcaaagaagttcaaatgcacaacataatagttaagtgccacctattttttccctctaagttgatgtctaatatagtggtgttgagatcacatatcatccaaaggctatttctcaagagtggtagagtaatcctaattccagaagagactttaataagaaaatcaattgttcaaaaattcaaaggcttctaataaagggtagcttattgtcctgtaagagtggtataatttgttaattagccaggtatgtacttatccagtgggaaatgattaaaagtaatttggaacagtttgtaa

SEQ ID NO: 216106 - DNA, 361 bp, Homo sapiens
tgtggtgtggtcgcctgtctttcagctcctacagtcggggcctgggccaccatcgctgctctcgcatggctgatgagccttatagagcctacatcacatctcttggacctggaaggggaaggaagaggaaaggcctggagactcaccaaaaggaaggaattcagcaatggcagaagtgagccccgaagtcccaaagtctctggattattctttccaccaagccatgttacgcccctaattcaacacttgtcatttctctttctctctttttttttttttttttaaagcgacggggtctcattatgttgctcaggcctcaagcgatcctcccacttcagcttcccgaatagctgggactaca

SEQ ID NO: 216107 - DNA, 654 bp, Homo sapiens
tgtggtgtggtcgcctgtctttcagctcctacagtcggggcctgggccaccatcgctgctctcgcatggctgatgagccttatagagcctacatcacatctcttggacctggaaggggaaggaagaggaaaggcctggagactcaccaaaaggaaggaattcagcaatggcagaagtgagccccgaagtcccaaagtctctggattattctttccaccaagccatgttacgcccctaattcaacacttgtcatttctctttctctctttttttttttttttttgggtaatttctgccacattaaatgtgggtgagagagtgatctactcataatgacttttcacgtgtaaaaaaagttccctacccatgaagccctgctactgattaaaacaaggtataatggtcataactttgtacccctatctttccaagcacttcgtgtacttcagctgttaataacgtgatccaccaacaccaaaagaggctatgctacagtctctagctaattggaagacacattcatccttctccctcgtacgtgcttgaccatcattaatggcttctcatacctaatttcaaaagttggaatgggaactttaaggcccttttgggagggcaaaggaattccagcttctcggggaaacttgttttaaa

SEQ ID NO: 216108 - DNA, 594 bp, Homo sapiens
gacttgtacatgaatgttcatatcaggtttatttgtaatagccaaaacagtatacacctgaatgcccaccaacaagtgactagataagcaaagtacggtacatggatatgatggactacctcagagcaataaaaaagaatggactattgatacatgctacaacatggatgattctcaaaggaatgacgttgagttcagaaagcaagacaaaaaagtacattctatatgattccattaatataaaggaatatattatattcaaggaatagtatataaatataaaggaatattttatattcaaggaatataaatgaatataaatgatataaagcagatcagtgattgccaggagatgaggtggagaagtagagaggggaggaaagaagggattactaaaggacatgaagaaacttttggggataatgtttatgttcactattttgattgggctgatggttttacatatgtatacatatatcaaaatgtatcaatctttatactataaatatgtgcagtttgttgtaagtcaattatacctcaatgaaactcattaaaattaccatattttggggatctatttctagaatctctatt

SEQ ID NO: 216109 - DNA, 537 bp, Homo sapiens
acatagctctaaacatcatattgtgccctacaaatatacacaactagtatttgtctattaaaataaattttaaaaaacacttgtacaaaaagaaagcaatgtaagtcttacccaaaagataacagctgagccactgtggtcagagcagtggagagaaagactaccatggccccacctacgtgtcttaaatgacttctgaataaagctcattggcagagaaataaaaaactttacatctaaaaataatctattgatattgcccacaggttctgctttttgaaaattacctgccgaaaaagtacgtatggcttgcctacttttgagtcttctgggcataattgaagactgcatctttaatatttacaactttcttgaagttatattgttttgttaaaggatctgttctttgagtgtgtgggatctggtcgtgagaaatggacaagagtgtcctgatgtggtacacggcttcctgctggcaggactcgtgtgccgatggaggtcgcaaacggaacaccctgcttggtttatcctttctcc

SEQ ID NO: 216110 - DNA, 215 bp, Homo sapiens
aggggcgtgtgagacactgtctggtctgcgaggtgtctggggctccgggcgtgtgtctggagtgttcgcggcgctgtgtctcgggctctgagtggatgtccgtgcgtctgtggagtgtgcgtggctgcgtggctctgtctgggtcttcggcgtctctcggggtgtctgggggtctgagtcgcggtcttgcccaagagtgcgtgtcaccgagtctt

SEQ ID NO: 216111 - DNA, 361 bp, Homo sapiens
gtgtatctttattattatgtttacaacttcccccaggtattaattacctttatttagtaaaaagagaggttcaaagagtttcatatattcagatgtcatacaaagtatcatacattagtaagtcaggtttcgtgtactgtcccagcagccattctggtctcaaaagcattgttcttctcactctgctgtgctgccttgtgtaaagggatatgagaggagataaaaagaaagtaaaaggaaaggccaggcactgagtcacatacctgtaatcccagcagtttgggaggccgagatggcagaccacttgaggtcaggagttcgagaccaacctggcgaatatggtgaaaccccgcctctacta

SEQ ID NO: 216112 - DNA, 448 bp, Homo sapiens
atgggcatggccatgtctgtcttgttcactgctgtatccccagcatttaaaacagtgcccggcacatagtaggctcaataaatattttatggccaatacataccttttatcttgaaatattcctgttgaaataggaagtgatggatcattcccatttcataaacagaaagggtgaggcacaaagaggggaagtaacttgtctaagtaaaagatagatctggtgttacaatcctggtcctgtgattttcagtccattgttcaaatctgtctgataaaattgcttttttaacattacaacaaggctgactcattgccaccactttcaggataacacattgtaaagcagaatcttgagaagtatctcctgacattgtctataaccttcaatcagttctagtgctgaaacaattttgctgtaaattgagaatcataaaaccacttaattcca

SEQ ID NO: 216113 - DNA, 587 bp, Homo sapiens
ggctctgccgatatgtatctttggggctacagtagttgaaaaatgaatctactaattaatcagttggataatactataaaagcaaggaatttaaggatctttagaagaaatgagacacttttccatacactctgagcatattgtgagcctttagtataatctcagggtgaaagtgacctggctattgtgtattgctgtagacgtaactgttgattaagtgttagagattgctgtactagaggcatgcatggtggtcctttaaaaacagaaaaggctgttaagctcagctagtaagacaatcgaacatatctgaacggcagagaatagctcatagagcttcctagcttccctgatgttgtttgcataaattgttgggggatgtttgtttgtttgtttgagacagagtctcactctgttgcctaggctggagtgcagtggcatgatctcagctcactgcaacctccgcctccagggttcaaattattctcctgccttagcctcctgagtagctcgaattataggcatgcgccaccatgcccagctaattttgtatttttagaagagacgaggtttcaccatgttggcta

SEQ ID NO: 216114 - DNA, 478 bp, Homo sapiens
gggatgaacaggcaagatgaaaaaaacaagataaaaaataggcaagataaaaagaaagcctggcaccacgaacttgctctggctttgcattcaactgtcacgtgacttgggatcccaaagatatttttttgtggattcttccagctacaaaagagaaatgtgtacatctcagctagcgtaccctaaaattccagtattctgtcacatgttctaatggatttattcctagttgtcaaactatgtgtcacaatttttggtctcagaaagtagtttatataagcccaaatgtctgcagagagtgaacttaagactgaatgttacagatgaaggaagaaaaggaaattaccatttacttgtgtatttggtattccttgtgtgccaggcactttgcgtatattcagtaagtgtgagaaggattatagcatataaaatgatctgattttaagtttgacttggtaatacttagttcatttaacgc

SEQ ID NO: 216115 - DNA, 433 bp, Homo sapiens
ttcaccaaatggttatttccttgggctgaattcagttttggaattaactccagcatttagctgttgatcttgttctctttatcctagtagataagtttttggcacgttctttctccttcccatcattatctctcctctttacccgtcactttctttctgttgtggtttgcatttattgatctctgcctttcctgatactactcaatttatgtttcacagaaataacggctgtacttaaatgaaactcagattcctatataaaaatgttgggataactttgttccttcagtaagggtcatacagacattatagatcttatcgggaagaaaaattatcacaatatttagacatgactgtcttattttaaaaatgttttcagtttactttcagattccatatatagttttaaaatacatgttttagctgaatagta

SEQ ID NO: 216116 - DNA, 131 bp, Homo sapiens
tgggcaggacctttctttttttcttttttggcttgacaaaggtcagaatatccccctaatccctcagaaaaaagagactgagaccctgatcccttcattctcccttttcctttccccttcttgcaaatttc

SEQ ID NO: 216117 - DNA, 571 bp, Homo sapiens
ttctaatgctttcccagatgatatgatgctgctggtccaaggactacatttcgagaaccccaaccacgcatggattgttgtcaactatgaatcacaagatttccagggttttgtctgctgccttccctgcaagccctgccatccactgagacccaacctcagccattcttggcacatcagcccatgagaagtctgccactctttcttcctaagcaaagcagcatccttcagggcctggagctcctggacacaaaagccatttttgggagaaaaatgtggataaagtcactcctgggccacctgtctgtgaggctgtatggaagctgcctactggtttgaggagaggctgctgggttctttcctttactaaggatttgcttaagtcagccctccaggatccaaaaaagagccagaaaaaagccagcaaaacagctgaggcacagactagatggtagtccaaggaccaagacctggccagccagagggaccaggtgtccagaccccggactgttttcaatacagttatacaatgaaatcaaataaatggatgtattgattgcttggcaattaa

SEQ ID NO: 216118 - DNA, 1080 bp, Homo sapiens
gtagaaaggaagaaacaaagaagaaaaagagaagacggaaaaaggagaagtgggagagaaatcaatggggaagaaggatagaggggaagagagttggtgagtccagagagcaagaaagttaagtagaaaagtcaacaagaaatgggcaaataagaattagaagcaaaggtttaaaaaaaaaaaaagggaagtgtaagaatatttgtcatggccatctccacagtaaccctgaaaatactggccattttcccccatgactttctcaaatgagaatcacagccatgaaggtttatgaacccatcgcccttggaattctggcagagtggaaaattaggaaaagctcttttaaaaaaatcaggtatccctgagtcatttgatatctaagttttttctaagaagcatatgttcaaaacaggcgacgttttgagagcgtttaatgagaattgtaaattccagtcagtagagtcattgcactacccttggttggaatctgacaaaactctgctctgtccacgccagtgctctcttctgagccaacaggagatttagatgggtgacaccctgcagaacagagcctggtccccgtgtgccccaactgagatttgccttctaaatggaaatcagtttgaatgtggcaaagtgttttcaaagctgtgaactacacgcaggacttagatacttaggtgcctgatgccagtgcccctgccccctgctgtcatcccagcaggaaagctggggagggcacagagagtaggttcattattactacaaaagcagtccctctatcaggggaaacacccatagctagacttagatagacagtcatcttttaagatgtttaaacaaatctgtgtagaagaggtgcttatcatcagataagtcagggttccaaagagtcatttggaaaacatttctgagtgacttctatatagattttttaaattaaatggcttacgggctaggcacggtggctcagacctgtaatcccagcactttgggaggccgaggaaggcagatcacttgaggtcaggagtttgagaccagcctggccaacacagtaaaacccccatctccactaaa

SEQ ID NO: 216119 - DNA, 465 bp, Homo sapiens
ctgttctattagtgcctacaggataagtgctacgtggccccaagatgtcattcatatatgacaatacaaaagctggttagataacatggcaacaataaaaagttgtggactattcagtgaagttatgggctattcaatacagtttaggatttttaaaaaatcattttaggcatgcaaaataactatcagattttattcatttgaaataataattttatgttatattgtgagtctcacagtgactttgtaaggcattatatcctcactttgtagatgaggttatgaaggcttagagaagttcagctgcatcctaaagacgccacagttaagtaagagagttaagtgacttggctgaaacctagatttgctgattgaaaggtcagagctcttttcctttataccacaaattgaagctgtcatttggggcatgaaactaataactgttttttgtgttttttttaattt

SEQ ID NO: 216120 - DNA, 438 bp, Homo sapiens
caaagaagaacaggtgtgtgcagagatcacatgatgagagaggaagaaagagagtggggaaggaggtgcctggctctttttttaaacaaatgttttccccaagaactaaacgagtgagaactcactcactcaagagagggggcattgatcttttcatgaaggatctgcccctataacacaaatacctcccattaggtcccacctccaacactggggataaatttcatcaggaaatttggtgaggggtaagcaaaccgtatccaaatgataccagggatatgtcaggattaagactggaggctgcaggtagatgttgtgaagacttggagaaagggaaactggattccagttcttcagtttcctaaaatgcaaaggtggtattataatagtcccatagtctctttctatgaacggggggagaaaaatctatttccccgt

SEQ ID NO: 216121 - DNA, 348 bp, Homo sapiens
gaggattaatcccactcttgacccacacagatggttttagtgactgtatcttttgtgcagctccatttcttctcaaaatgtgcagatgagatgtttcttccagcctctggatattgaggtgcctgggatacctgagtgagggaagaaaggagcaccaagaagtggcagctgaagccagattgcacaagagagaaaggaagaccatccaaggcagacagaaaaactcaagagagcagccgtctggggctatttatcacatgaacaaagtcagaagcctttcaatcttcctcctgtattacatcagggttcatttttaaaagatacgcaacttggtgatcacaagttatt

SEQ ID NO: 216122 - DNA, 313 bp, Homo sapiens
tagtttcgaagcatatggtgaagtgtgctataattttatatgcatatatattctttattctggacttccagaaagcaatgagtttcatctgtttttttccccacctctggttccttcttcctttcccttgctctctacaagtctgctgtggctttattaggaattccctttggtttagggggaaaaaaaataagagggagagagagagaggctggagggggaagaaacaaaactagctcttggctggccgcccacagcatgggcccaacagccttgtttgagcgcgttgccccgcccttctgtcgtcttctcg

SEQ ID NO: 216123 - DNA, 502 bp, Homo sapiens
  misc_feature (32)..(32): n is a, c, g, or t
atgggtactagaacatttagtgcatttcacanagtattgtctgaaaaagctcaaaatgaggaaattctgtatgttcttcgccattatattcagaaaccaagctcacggaaaatgtacttatctgggtatggtgtggagctagcaattaagagtacagaatacaaagcactggatgatacccaagttaaaactgtgactaatactactgtagaggatgagactgaaacaaatgaagttcaaggatttctctttgggaaactaaaagaaatatattcagatcttagagataatctgacagcattccaaaaatacctgattgagagtaacaaacaaatgatgcctttgaaagtctgggaactacaagatcttagttttcaagcagcttctcaaataatgtccgctccagtttatgatgccattaaattaatgaaagacatttcacagaacttccccataaaagccagatctctaaccagaattgctgtaaatcaacatatgagag

SEQ ID NO: 216124 - DNA, 450 bp, Homo sapiens
ctcccaccttccaccctcaagtaggttccagtgtctactgttcccctctttgtgtccatgtatactgaatgtttagtttccacttataagtgagaacatgtggtatttgtttttcttttccaacatagcaaaacttaagggaatcagctaaagcagtgcatagagtgaaacttatagctacaaatatctatatttaaaaaagagagagagaattgtcaaataaataacctaatgttccaccttaggaaaccaaaaaaagaagagtacactaaacctacagcaagcagaaggaaataaatagtaaatattagaatagaaagaaatggaatagagcagaaaaacaatagagaaaatcaatgaattgaaaagttggctctttgaaaacatcaacaaaattgactcacattcaggtaaatggatggtaggagaggagtagtgtgtgtttgtgtg

SEQ ID NO: 216125 - DNA, 471 bp, Homo sapiens
agctatgcccaaagtcacacaaagtagagaaatcaggaaaagaaaagtatattgacttcagaatatgcccccttaacctctacttttcgtcaaaacatttcatgaaattcttttctaaatccaccatcacatatgtagtgatgtttaaaatttatttaaaatcatgattattgccttgcctttattaatactgtattttattttttcctaaaagaataaagttgtgtattcaccttgagttaccaaactttaggtgctttaattttgtttggtttgatgttaaatagtggttgcttctaatatttttatgttcatttttgggaatgataaactgttttccaagtatatgccaatatggaaaatttgctttatcgtatatttgataattgtgtttacatgttgaatgcactattcttgaatgtttatgaattatattttcatcaataaacagaacacatctcaaaaccagta

SEQ ID NO: 216126 - DNA, 433 bp, Homo sapiens
ttatggtaatttttggataacagactgtaatagcaattcccttttcatcaagaaaaaaatagagcactctgcctattcagatgctatatccaccaacctaaatgaatacaagaaataaataaataaaaattttaaaagacagaactgagacagagaacagtaagtagggcaaattcatgaattcatttatgcctttggctaaaatacatccctcaaatcagtttgaagctgtttgcacggtagggtgtttcacctactaatgatttcacagctggcacgcgcatggcatcaatgtttattggcatcctcaatgtcagttatttttaaaaagctttcttccaggactctgaataaattatctatcaagtgcagcagtgcatggcaacatccaagacacaatttgcagtcctgcaccggcttcattatttggtgg

SEQ ID NO: 216127 - DNA, 636 bp, Homo sapiens
tcccgtcaataggcgcagtgcatatttagttgccctcctagggtaaactagatttaaagcctcaggaggctcggctgtttgcactgatgatgaacggacgcgaaggtggttgtgtgtatatgcttggtacacagtggtcactctctttgcttgttgagcgatgatgggtggtgcagccatatcccaccttaaaaggttttgccttgaaggtgcttgtggtggggtaggagaataggggcccatacagaaaaaacaagtgtatgtgtggacagatgtgagagagagccacaggcgggcgcatttcgtctaataagtgcgcagggcacgaggctatgttggggagaggctggaggaggtgaagtggagaattgtggagagattaatgagagccgaagggagtgaatacttcccgaatgccaactggatgccaaacattggtcctttaatccccctagtaatttggagatgggtagtttcccagttttgcagataaggagactgaagtgcagagaactggaataacttgcccaaggtcgcagctggcaggccgcacagctgggattcagacccaggactgcctaaggttggagccctgtgtcaagggcttagacacacctgcactggctcccaaggggg

SEQ ID NO: 216128 - DNA, 453 bp, Homo sapiens
cagtgagccgagagcgcgccactgcactccagcctggcgacagagcgagactctgtctcaaaaaaaaaaaaaaaaaaaaaaaaagaaaaaaaaaaaaaacgtgaaatcactgttgagcctgccagctcaaatcatgctaaattaatttggcgtagaaatatctcctaaacggctgagtgcagtgtctcatgtctgttatcccagcacattgggaggccaaggcaggcggatcacaggagcccaagagtttgacaagaccagcctggggaacatgacaaaccacgtctctacaaaatatacgaaagttagctgggtgtagtggtgcatacctgtagtcctagctactcaggaggctgaggtgggaggatcacttgagcctggtaagttgtggatgcagtgagccgtgattgtgccactgcactccagcctgggtgacagagtgagaccctatct

SEQ ID NO: 216129 - DNA, 470 bp, Homo sapiens
gctcacgcctgtaatcccagctctcagggaggctaagaggcgggaggatagcttgagcccaggagtttgagacctgcctgggcaatatagtgagaccccgttctccagaaaaaggaaaaaaaaaaaagccaaaaaaaaaaaaaaagaaaaaaagcgtaaggtaagggactcttcatatttttcttaaatcatatggagcaggctgggtgtggtggcttatgcctataatcagagcactttgggaggccagggtgggttgattacttgaggtcaggagttccagattagcccggccaacatggtgaaacctcatctctaaaattagctgggcgtggtggcgggcacctgtaatcccagctacccaggaagctgaggcaggagaatcgcttgaacctgggaggcagaggttgcagcgagacgagaccatgccatggcactccagcctgggtgacacagcaagtctctgtctc

SEQ ID NO: 216130 - DNA, 449 bp, Homo sapiens
atcctgatctttaaatccagatgctgacttggtaatttgaatttgacctcaatttctggttattctctttgctgctagtggggttcaactttaactgaaactggccctgtactctgtggtatactgatctccttaccctacaagccaagtattttatctagactaatccccccaaaaagctcattagaatgagatttttgccttgaaaagaatctcttatgaacaataaaatagcacaaagattgatttgttcaatattttatattagaatgagctgccaaggagcccagtgctgcctttggttttctcattttcattaatcttaaaagagatacatcttattaattaaatctgctcttctaaattggatggcattataaactggagagaaatgacccaaagaaggaaattgaaaatgggtggtggtgattaacaataaacacaagatt

SEQ ID NO: 216131 - DNA, 256 bp, Homo sapiens
gaccacaaccagcaatattatttaaaagtaaggtcacacttttaataataagtcacattttaagttattatcaatttataaaacacactgttggtataatgatagcttttcaagaaggatataaaaaggcatgttgggctgggtgcagtgactcacgcctataatcccagcactttgagaggctgaggtcggcggatcacttcaagccaggagtttgagaccagcctggccaacatggtgaaaccctgtctctgct

SEQ ID NO: 216132 - DNA, 865 bp, Homo sapiens
ttcaggtggattaagaaaccaaccgtagagaagttacatgttggagattcctttcccagttttatagcacagtgcccagaatgctatccatgcctgagtgtggcttggcttctcctacccactcaatgtggatgttttctcagttgcccagtgggtgtctctcgactggtccctgattttctctcaaagggaattgatctgtaaatagatgttgatttcatgtatctgtgagtggaggagagtctggaaattcctattccaccctgttgctgacatcattccttcctgtatatctaattgatcaccaagttcggtcagcagtacccctcttaaatctcttcctcatgtctccatctcctttggtgtaatttggagcattatcatatatatttccccaactctggttcttccccatcaccagtaagtcctccctcaccatggggacaccttgttaaagaggaaactcagtcacattccctggtctgtttaaatcccttgagcatccaccccttagccacttcaacagctttcctactgccatccctccttataacccccacttcagcctaaacataccttataactacactcatgcttctaactggattaccactttccctctacaactactcatatttaaagatgctgttcaaaagtcaggtcatctgtaatgttttattctgtaatacccaggcaattagttgctgcttcatccgtttttctctcatagtacattgcatatttccttatcatagtttatgcaattgtattgtatcatataactgtttattaatgtatatgtcttcttctaaggcagaattatctactgccacatagtagatgctaaataaatgtttgctcaatg

SEQ ID NO: 216133 - DNA, 170 bp, Homo sapiens
cctcggcctcccaaagtgctgggattacaggtgtgagccaccatgcccagctgcagagtgcatttttaagcaaacacatcatatgtcaattcttcatatagtgttctttaatttatcttgggaagccaaatatcccatttagaattctgtaagaactgatttttcaaatg

SEQ ID NO: 216134 - DNA, 170 bp, Homo sapiens
cttgttcccttattacctattatccacacagtaagatagtgaactttctaaaatgtaaatcacaccatgtcactcccctgcttaaaaccctacattggcttcccattataacaagaataaaatcttttcattggagcctattaaggtctagtcccagcactttgactgtg

SEQ ID NO: 216135 - DNA, 190 bp, Homo sapiens
gcatcgagcctgccagtccacataactgaaacctgaagctctgcccctgcccagctctgtgacttccagcaagttgtttagcttctttaagcattgattttctcacctggaagatgagggttgcattcacactctcttcatagctgtgacctaaggatgatatgaaacgacgcccttggcagatctatca

SEQ ID NO: 216136 - DNA, 507 bp, Homo sapiens
ttggccacctaaactggtaccctccactgaccaggccaacataaacatggctgggaaaagggcaatgtttttatggtccttagtccctggagaccctgtttcactgggaaagatactctcactatagtgaccacttgcctgagactcccaattctggaagcctctcacggaagaagctgtctaggaccacctcagtgaattgattcagctcccaaaacacccaggaagcccttccagattaatgagaacaggaaggcaaacacactcccaggacgctgatccttgtgaacaagaaataagcagtggccataacccctcccttttaattcaccaccttttaaacttcaatcatattttcctgagacaacattggaaactggcctttctgttggcattccttcttcagtgcatagatcagtcattttaggctcacttcaaacctatttgaatcccacgtcccctgctcaccatgctacctttctttttactgtcctccaatcttagtct

SEQ ID NO: 216137 - DNA, 517 bp, Homo sapiens
agtccatccaagaaaggctaaaaaatgttctgtgtgattctggacttaagaagtctttttcactgaattctggccctagatgctcactcaactagtaaccataatgccctgtttttcccaaatgctgaaatggaacatttactgcattggcaatgttttctagtgggattggttacagaaactgtcattcattcttactgtgcaatattacacagccataattaatgatgtagttaaaaacatttgatggcatataatatatatatacattgaatacattgtaagtaagaaaatatacaggttagaaaactgtaggtatagcatattgtaaaaagaaaatatatatacacgcatagcgaaaaatgtcaggaagaatataccaaaatgttaacgattatctttaagtagtatcatcttttttacttcttgtctttctgtttctcctaaaacttctaaaataaaaaggtattatttttcatgtaaaagtttaataaacttatgtgtccatttaaaaata

SEQ ID NO: 216138 - DNA, 253 bp, Homo sapiens
  misc_feature (224)..(225): n is a, c, g, or t
  misc_feature (231)..(231): n is a, c, g, or t
  misc_feature (234)..(234): n is a, c, g, or t
taaataaagacagggtttcaccctgttggccaggatggtcttgaactcctgacttcaggtcgtcctcctgccttggcctcccaaagtgctgggattacagacgtgagccaccgcacccagcctgtttagtgtttgatgcatagtattttttagatggctattgaatgcatgtaaatgcgtacataatcttttttaatctcgttcttccatctgcccttctgtannttctcncanccgtatagtagtagtaggc

SEQ ID NO: 216139 - DNA, 284 bp, Homo sapiens
taaataaagacagggtttcaccctgttggccaggatggtcttgaactcctgacttcaggtcgtcctcctgccttggcctcccaaagtgctgggattacagacgtgagccaccgcacccagcctgtttagtgtttgatgcatagtattttttagatggctattgaatgcatgtaaatgcgtacataatcttttttaatctcgttcttccatctgcccttctgttggtcctcctttcctctacataaattgaattataccaattcagcagcatattgttcttcttg

SEQ ID NO: 216140 - DNA, 427 bp, Homo sapiens
acacacaccaaaacaaacaaaaaagccaaacttccagaagggttaaagagatacaccgatttttaaactataaaagagcacatggaagaaaaatacatgtaagaggccgggcgcagtggctcacacccgtaatcccagcactttgggaggccatggtggacagatcacgaggtcaagagattgagaccatcctgacttcaggtcgtcctcctgccttggcctcccaaagtgctgggattacagacgtgagccaccgcacccagcctgtttagtgtttgatgcatagtattttttagatggctattgaatgcatgtaaatgcgtacataatcttttttaatctcgttcttccatctgcccttctgttggtcctcctttcctctacataaattgaattataccaattcagcagcatattgttcttcttg

SEQ ID NO: 216141 - DNA, 712 bp, Homo sapiens
aggccgggagttcaagaccagtctgagtaacacagcaaaactcctgtctctaaaaataaaataaaaatatttttgagatttttttcttactctgtctcccacgctctgtcacccacgctggagtgcagtggtgtgatctgggtctcactgtgtcactcttgctggaatgtagtggcgtgatcacagcccactgcagcctcgacctcccaggctcaagcaatccttccacctcagcctcctgcatagctgggactacaggcagacgccaccacacccagctaatttttaaattttttgtagagacaggtctcattacgttgtccaggctggtctcaaactcctgggctcaagcaattctcccatcttggtctttcaaaatgttgggatcacaggcgttagccaccatgcaaggcctctaaaaaaatttttctttttaattagctggacatggtggtgcacgtccatagtcccagctattcaagaggctgaggaaaggatcgcttgagtccaggagttcaaggctgcaatgagctatgatcatgctactacacatcagcctgggcaatgcagcaagacactgtctctaaaacaaaacaaaaccccccaaaacccaactacaataataaacacaagatcaataggctgggcatagtggctcatgcctgtaatcccagcactttgggaagctgaggtgggcagatcacctgaggtc

SEQ ID NO: 216142 - DNA, 341 bp, Homo sapiens
caccgcagccttgctgagctgcagtgggctccacccagtttgaacttcccagcagctttgtttatcctgtggctgtgaaactgcctactcaagcttcagcaatggccgacccccccgccccaccccgcaaccccccgaccaaggtcgactgtctcaggtgcatctcagattgctgctgtgctggcagcgagaatttcaagccagcggatcttagtttcctgggctccgtgggagtgggacccgctgagccagaccacttgactccctggcttcagcgcccctttccaggggagtaaatggttctgtcttagtggcattccacatgccactggggtatggca

SEQ ID NO: 216143 - DNA, 528 bp, Homo sapiens
acacaggataacaaaagcatccatttggatagagaggaagaggaagaatctcttttagcaggatttcatgaaggaggtccacaaagaagagtttattctgattgcgtaaaagttcagattggtttgttgagcctggactagaaccaaagctagggcccagcccatcgaggcttctttcacccctggactattgactcttttcatgtcatttttctcctctacatacatgttcttcctcattgtctttgttcaaatctcagtcaccattaactctcttatccttccccctcctgctcttccccttttgtctcttttcacaaggtagctctaaagcatctctgtatttgtccggttccaggcatggcaggatgtagaagttaacatttgttggagactgttttgcttcctggaatctcccctctagaaaactttgtgtcgctctgcttacaaacctggtatatccctgagtagaggcagtgctattaaaactcagtaataataataataccaataagcaatgtgcatcag

SEQ ID NO: 216144 - DNA, 358 bp, Homo sapiens
aagtattaacaagcaagcttatatatttataagagatgggaaaatattagaaaggaataaatcatgtcttgtcaacatgaagaaaaagtgtattttttttgttaacttattattgtgtttccttgtataattttcacttggttttgttggttttactacttgcttcattctttcaaaaactacatcttcatagaccatttcagcttttgctatgtgggcagaattataaaacccaatttcaaaatttcaactgaacgttgtcagcatttttctttgggctttttattgaaaaaaaatcctaattgtgtgtgtgtgtattttagtattaccatgaatgtaataacaataaaataaaaca

SEQ ID NO: 216145 - DNA, 705 bp, Homo sapiens
ctcggtggctcacgcctataatctcagtgctttgggaggctgaggtgggagatcacgaggttgggagatctaggccatcctggccaacatggtgaaaccccatctctactaaaatacaaaaaattggctgggtgtggtggtgcacttgtagtcccagctactcaggaggctgaggcaggagagtcgtgtgaacctgggaggcggagcttgcagtgagcagagattgggccactgtagtccagcctgggagaccgagtgagactctgtctcaaacacaaagcagaagtaagcagaaggtacaatgcttggcataaagaaaatatgcaacaaatattaatttccttcctaattttcatttcatttgatttagtcatttaaattcatttcacattttaaaagctacgattcttacagctgttcagaaacttaacacagtttagttacttttatattaactatttaaaaaaacaacatgcaaccttcatgaacacaatatcaaataaacaactctcaaatctgaataaactacagccacaccaaattgagccggtgctttcttagattttatttttcattttataatgaaaaatacacctctaaagagcatatggccgggcgtggtagttcacgcctgtaatcccagcacttcgggaagccgaggcgggcggatcacctgagcctcaggagttggagaccagcctggcc

SEQ ID NO: 216146 - DNA, 395 bp, Homo sapiens
agcatcatcagtagggtttgtccctgatgcctttacaacagcatctgagcacctctcaagtttttccaggccagctccagtttcagtgaggagagtgtgggctttctattccccaaatattcttactacagttaatatgtaggttactgccccagcccaactgcaggttcccagatgtgagttccatgtaggcagaaactgtccagttcttgaaattgaattacttccttgtgtatgtgtttttttcctacttaaagctcctcgggatgcttcctctcaaaagtctttgaagaataagaggttaagctaagacaacctgaatcaatttttttttttttgtcaaatgcgattgaaattatccccataattcaataaaatagctttttcccttcttt

SEQ ID NO: 216147 - DNA, 2272 bp, Homo sapiens
aggatgagtgtactaagcttctggttggcaatattgttatcacctgatataacaatcgtacctatcgtattgatgatgtggattggaataagactccaaaggatagcttcacgatgtctgatgggaaagagatcacattcttggaatactacagcaaaaattatgggatcacagttaaggaagaggaccagccattgctgattcacaggcccagtgagagacaggataatcatgggatgctgctaaaaggggaaatcctgctgctgcctgagctttcttttatgaccggaatcccagagaagatgaagaaggacttcagagccatgaaggatttggctcagcaaatcaatctgagccccaagcaacaccatagtgctttggaatgcttgctgcaaagaattgcaaagaacgaggcagccaccaatgaactgatgcgttgggggctccgtctgcaaaaggatgtacataagattgaaggacgtgttctgccaatggaaagaattaacttaaaaaatacttcgtttatcacatctcaggaactaaactgggttaaggaagtaaccagagacccttccatcttgactatccccatgcatttctgggcacttttttacccaaagagagcaatggaccaggctcgagaactggtcaacatgttggagaagatagccggccccattggcatgcgtatgagcccaccggcctgggttgaactaaaggatgaccgaatagagacttatgtcagaaccattcaatccacgttaggagctgaggggaagatacagatggttgtttgcatcatcatgggcccacgtgatgatctctatggggccatcaataagctgtgctgtgtgcagtccccagtgccctcccaggttgtcaatgttcgaaccattggtcagcccaccaggcttcggagtgtggcccagaagattttacttcagattaactgtaaattgggtggtgagctctggggagtggatattcctctgaaacagttaatggtgatcgggatggatgtttaccatgaccccagtagaggcatgcgctccgtggttggcttcgtggcaagcatcaatctcaccctcacaaaatggtattcccgggtggtgttccagatgccgcatcaggagattgtggacagcctgaagctatgcctcgtgggctccttaaaaaagttttatgaggtgaaccactgtctaccagagaagattgtggtgtaccgtgatggagtgtctgatggccaactgaagacagttgccaactatgagattcctcaactacagaagtgttttgaagcttttgagaattatcagcccaagatggtggtgtttgtagttcagaagaaaatcagtactaatctatatctggctgctcctcagaactttgtaactcccactcctggaactgtggtagatcatacaataacaagctgtgagtgggtggatttctatcttcttgcccatcatgtacggcagggctgtggcattcctacgcattatgtctgtgttctcaacaccgcaaacctgagccctgatcatatgcagaggctgactttcaaactgtgccacatgtactggaattggcctggcaccatcagagttccagctccttgcaagtatgcccacaagctagctttcctgtcaggacacatcttgcatcatgaaccagccatccagctgtgcgagaacctgttcttcctgtgactgcacagcttggagatgggctggtgagaagaaaggcggcctcagaactcagctgtgactcttgcagaatcaacagagactgaagtgggcttttgtgttataattttccctttctccaaccctgtagaataagatttctttcttgtcttttaaacctaatatcaccaagaagcaagtttctgagtaacagctgaaaatggccttgttgcctgtgtagagcaagttacggtggtactgccactctgcaggtggagcgggtgactctgggggaccattaagacctccagaccgggtgcggtggttcacacctgtaatccaagcactttgggaggccgaggcgggtggatcatgaggtcaggagatcaagaccatcctggccaacatggtgaaaccccgtctctactaaaatacaaaaaaattagccgggtgtggcggtgcacgcctgtagtcccagctactcaggaggctaaggcaggagaatcgcttgaacccgggaggtggaggttgcagtgagccgagatcacgccactgcactccagcctgttgacaaagcaagactctgtctc

SEQ ID NO: 216148 - DNA, 1244 bp, Homo sapiens
agaagctttttttccctgccctctaggcacagtagctttggcactaactgcaaaaggatctgccatgattccaggctacacaatgcgagtgggcctctcactgactgtggtccgtagcctgagggctctgtgagtcacacatcctcgctgtcatttcaggtgaaccactgtctaccagagaagattgtggtgtaccgtgatggagtgtctgatggccaactgaagacagttgccaactatgagattcctcaactacagaagtgttttgaagcttttgagaattatcagcccaagatggtggtgtttgtagttcagaagaaaatcagtactaatctatatctggctgctcctcagaactttgtaactcccactcctggaactgtggtagatcatacaataacaagctgtgagtgggtggatttctatcttcttgcccatcatgtacggcagggctgtggcattcctacgcattatgtctgtgttctcaacaccgcaaacctgagccctgatcatatgcagaggctgactttcaaactgtgccacatgtactggaattggcctggcaccatcagagttccagctccttgcaagtatgcccacaagctagctttcctgtcaggacacatcttgcatcatgaaccagccatccagctgtgcgagaacctgttcttcctgtgactgcacagcttggagatgggctggtgagaagaaaggcggcctcagaactcagctgtgactcttgcagaatcaacagagactgaagtgggcttttgtgttataattttccctttctccaaccctgtagaataagatttctttcttgtcttttaaacctaatatcaccaagaagcaagtttctgagtaacagctgaaaatggccttgttgcctgtgtagagcaagttacggtggtactgccactctgcaggtggagcgggtgactctgggggaccattaagacctccagaccgggtgcggtggttcacacctgtaatccaagcactttgggaggccgaggcgggtggatcatgaggtcaggagatcaagaccatcctggccaacatggtgaaaccccgtctctactaaaatacaaaaaaattagccgggtgtggcggtgcacgcctgtagtcccagctactcaggaggctaaggcaggagaatcgcttgaacccgggaggtggaggttgcagtgagccgagatcacgccactgcactccagcctgttgacaaagcaagactctgtctc

SEQ ID NO: 216149 - DNA, 422 bp, Homo sapiens
cgtgcgatctcagctcaccgcaacgtccatctcctgggttcaagcgattctcacacctcagcctcctgggtagctgggattacaggtgtgcaccgccacaaactaatttttgtatttttagtagagacggagtttcaccatatttgtcaagctggtcttgaactcctgacctcaggtgatctgcccacctcgggctcccaaagtgctgggattataggcatgagccactgtgcctagctctcatgattttttaaaaaataatttcaacttttattttaaattcggggtaacgtgcagatttgtttcatgtgtatattgtgtgatgctgaagtttgaggtacagttgattgcatcacttaggcagtgagcatagtgtccagtagttagttttttaactcttttcccccttctgtcgtcttctc

SEQ ID NO: 216150 - DNA, 355 bp, Homo sapiens
tggattcaataagttgagaaatcccaatgaatcaaagggagagcagctatctggtaaataattatgtaaaagaaaagatgccagttggtatccctttggtgagattttcctaggaattctgctgttcatatagagtagcaaagtttagagacttggctaaagaatgaatgaatgaatgtgttccattgttatctgttcaaactggtataagctataaagcacatcatgcaagaggcagtatgctagtttgggcaggcctcttctcctcctcctcctcctgggaggtcaaagctgcagtgatttgtgattgtgctactgcattccaggctgagtgacagggcaagaccttgtctca

SEQ ID NO: 216151 - DNA, 273 bp, Homo sapiens
acagttttctgggtggccctggaatgaatgacttctctcttacttgcttgtagttctcaggaatgaagaatgtggcattaattgcaagacagccaactagatgcagccaggaagaacatctgccaccaaaagactgggatattgggaagcctggagcactctgaacagatcttcagagggaaggcattgagaatgggtggagggaggacacagataccaggctgaagggaaagaaagctgggaaccctgcacaggactacaactcatggggaa

SEQ ID NO: 216152 - DNA, 492 bp, Homo sapiens
atcgactatcctagggctatacctacgccgaggttcttgctcagagcagcataaactgcagtctgtttgggaggtggctttcttggcagaggttctttgaaatgcttttatgacacttttgtttgtttctctgtaacccaaaagagttaaaagggagatgagatggctgcattcaaattgattgcatgtgctgaagcaagggtatgttctttgtcagcaagcaggatttatatttggagagatatttatctgtgggaataggctaaagtgaagaaatcaataaatgtgttttggctctttagaaataatttctgctcagcaaatagaatgtgctaagttctttaattaaaattccatacctcaagtggaggtaatttgggagatgtttctgcttaccaagtatgatgttttttttactttgcttactttttgttttaactgcctaaggttgagcctttctgtcttttaaggataaaagagatggttgactag

SEQ ID NO: 216153 - DNA, 368 bp, Homo sapiens
taaaaaattagctggtgtgttggtgcatgcctatagttccaaatacttgggaagctgaggcaggaggattgcttgagcgcaggagttccaggctgcagtggactatgatcctgccactgtactccagcttgggtaacagagggagactgtgtctcagaagaagaaaaaaaaacaagtataagttctcaccggtatcttaaacatcaagtaaaacagtatcgagtaaaacaaaaaactaaaaactccaaaagtcaaaaacacttttaaaaagaacatggtgttaagagtagtttgttcagtttccccatagaaaatgatttatggaaggagaataaaagattattctgaacactaaaacaataagactg

SEQ ID NO: 216154 - DNA, 117 bp, Homo sapiens
gtgcctggcctttagtgccatacttgattctgcagagaggtcaccacacattctgaagttgggcacccaccccaggtccgtccccgttccatcaaacatgaggaagaggctcatgtg

SEQ ID NO: 216155 - DNA, 510 bp, Homo sapiens
cagaataaaattttctgtatacaagagtcaccttcaatagtgatattttcagtgcaagttaaggatagcactgattggttgaagatttcattgaatgttagataaaaatgaatgtgagtaaaattattcctatccatctttattatgagagagtgaatattattggcggatttaaaaaatactggatgcttttattagtaagggaccagaactagttagatgctaggtctaactagcttcaagcctaagttaactccacctaagggtgtcctctggaatatgagatgtcacagaaacagttcaaagagaattctgcccagagatttttttaactcttttactcctttgctccatttgtttcagagtaggctcataaggaaagagccatgttttatagtggttgtctttcacgcttcccctcatttgttaaccatttccatagatgtacaagttctgttaattaccttgtctttttttttattatacatgcccaaaattgctgtcctatgt

SEQ ID NO: 216156 - DNA, 397 bp, Homo sapiens
cactaaattagactctctcccgtctaactggaaagttgggaaatctcgccacaggtgaccaaagaggtctctttttttttctttctttcttttttccaggacggagtttcgctcttacatccaggctggagtaaagtggcatgatctccgctcactgcatcctccgccccctgggttcaagcaattctcctgcctcagcctccagagtagctgggattacaggcacctgccaccacgcccagctaatttttttgtatttttagtagagatggggttttgccatgttggccgggctggtctcaaatgcctgacctcagatgatccacccaccttggcctcccaaagtgctaggattatggacgtgagccaccgcgcctgaccctacttggtggttttt

SEQ ID NO: 216157 - DNA, 668 bp, Homo sapiens
agtacctgtgggcttaatcagaatcagaggtcagccagcaaggaatgttggagggggatgggagggagtggggcatcattcagtttaatggtcaatagctagttgtgggggttggggggcagtggttggagaaaggtgagtcaaaaagcagcactactgcctccggagcaaatgaatgggaataaaggttgatgataccaggtcagtaggagtctaaggtcagggctgggtcatacaagacagatgagattctgataagcagagactgaaaataaaggcaagacaggaaactaaggacttgttcagtgaacaagactgtcaggtttaaagggtgtgtgtgaagtggactaatgaaagacaaaacaggatggtagatttaggtcatgtaatagtagatgtaaagtaagaagtttaagattttattctataggcaatggagagacagcaaaacatgactagaactaatattgtgggagaataatcaatactggtattcaagataaaacgaagaaaagctgaagcttggttaggaggccacaggattaatctaggcaacaagtcagagttatattaatgggaatggaaaggaagagttgcacacagaatgtagaagtacaatcaaagtctagcagtatattgcaaatgatgggcaaaggaaagaaggaact

SEQ ID NO: 216158 - DNA, 354 bp, Homo sapiens
tgaacagaaagcaactaactcaatctgggttgagtgacagagaaaatgtttctaaagaggtgatacttctcagtcttaaaaccaaaaaggggttagccaggtagaagaggaagagtaatatgtacaaaggcaccatactgatatacaataaaggattacacatttaagaaactgcaagtcaagtctgtatggatggaatatagtactcaggctgaggagaagctgcagcagaataactagcatttaatattcaaaccactctctgaggtaggcactattaatatccccccattgtgtagatgagaaaactgaggcacacaaaggtgaagtaacttgaccaaggttaagttatga

SEQ ID NO: 216159 - DNA, 430 bp, Homo sapiens
gaggctgaggtgggcggatcccttgagctcaggagttcaagaccagcctgggcaacatggtgaaatcccgtctctacaaaaactacaaaaattaactggatgggatggtgggcacctgtagccccagctatttgtgaggctgaggtgggaggatcctttgagcccaggaggtcaaggctgcagtgagtcgagattgtgccactgcactccagcctaggtgacaaagtgagaccctgtctcaaaaactaaaaataagcatgaggccctgtgttgttgattggccacagggcacacccacagagctgaccctgatattcaatatactcacagcactgatcagcttgcaaaatgcatcagctactgcatctacctccacccacaagtggatcaaagaatttagataccaaactcaccctgcctgacctccctg

SEQ ID NO: 216160 - DNA, 409 bp, Homo sapiens
actccctggtcactttctaggatcagaagtcttcaagtagaaaagaaaaagaatgctttcaacccgatgatccccaggccccttctagctctaaaataagttaagcatctgtggaagggagagatgatgagtgtgactttcatgcattaagaaacgtacataaaaatgagatgtgcacatagaagtgtgagtcaggagttctgacactatttcctctgatacttctgtgtcttcttaggtttcactggaatggcaatttgaattctcttctttgagacatacatggtgttaaagatgatttaactaaagacatttaagccttggccatttgtaaaattctcaaatataactagatatttagaaagtatatgcatgtgcatatttttcacacaccgtgtgaaattcagat

SEQ ID NO: 216161 - DNA, 259 bp, Homo sapiens
ttgaatcccatcaagatgtctgttgtaacactccgaatgagctgcttcagaatcacagggagggctgctcagagggaagaaaacttagcaaccacagccaatcggctccaggttgaggcacactgattgatcatttcctccctgcttttcaggacgggaaacaacatcacagcagagaagaatgcttgaaggccagacgcttggcctcctcaggcaggaagatcccatctagctccttggctctgggactatgtgtggg

SEQ ID NO: 216162 - DNA, 159 bp, Homo sapiens
tctgtgaggagcagagaaaaacggtttgaaatggcgattttggaacttcccatgttttccataatttcaagagaaagctgacatttctgagtccttcctggcagtaacctaggatattttttctctttcagagttacagaagatgtaccattttccatg

SEQ ID NO: 216163 - DNA, 205 bp, Homo sapiens
ccctccctgcgccccgtcatcaagaagaaaattcgaagaaaaggtttagcagggacagagaagcgacctgtcccggaaaccccttaaagcctgcgggtaacatgtttgctccctcctcccccactcggactatagaagtatcaccaatccactgcagagaaattgggaaaattcagaaaaacaaaaaataaaaagaaatccacct

SEQ ID NO: 216164 - DNA, 203 bp, Homo sapiens
actagactgggagccatacgcctagggcctgggcttttctccatatgatgcccactggaactggaactcacgtagctgaaaagtgatgctagctgttggctaggagctcagctgagcctctccatctggcttggactcctcacagcatggcagctaggttccaagactaaatgttccatagcacagcaatccaaaagagaatg

SEQ ID NO: 216165 - DNA, 598 bp, Homo sapiens
caccaacatgactggtgtccttatgagaagcaaggaagagacataaggagaacatggtgtgacaattgagacagagattggagtgatgcatctacaagccaagaaatgtcaagggccgtgagccacaccagaagctaagagaaaggcatgggactgaccctcccctagagccatcagaaagagcctgaccctggcggcaccttgcttttggacttctagactccagaattatgagaataaatttgtgttgctttaagccactcagtttgtggtaatttgttatgacagttctaagaaactaatccaccctgctaaagagtaaatgtctgatgcaaaactcactacatggatgaaaaggctgagatattccgaagagtcataatgaactgtgccgtcatctacaaaggaagtgcagcactgcaacaactcaagatagattctggagacgtggcaggacagacgtgcctaccagactaggagcactttcaggacagcgtcatgccttgttctcctccacatccctccgtgcctgaaaatcagaaatgctcaattaaatgttgaaaatgtcaataaattcataggaaaacgaatcagataa

SEQ ID NO: 216166 - DNA, 368 bp, Homo sapiens
aggaagcgctgtgtgattgctgcttagagttatgacattagatccgtgaaattagatttagaaacatgaaacgagaaatttgagtataatcagtgtttatcaagtattcatgtgcaatgtactgtgctaggtatttaaattagcactaatgctcacaactctacacaaagtaagtggtgtcggcccaattattatagacgaagaagctgaaacactgatttctcttttaaaatgggagtggagaatagtcatgtaactaataaatgccagagctatgattcaaactcaagccttttgtgacttcacatacttcctaagaagattcatttcctagagcacatttttcccaccttatgctttaactcgct

SEQ ID NO: 216167 - DNA, 458 bp, Homo sapiens
atttaactgaacctaccagaccccattcaaaacatacagggataaaataggcctgagtactgagatgtactcagatagcatttggggaaagtacgtgagtcacacataaaaacagaccgttcttaatgcaatgggaagggtgttaactataaaaggaccctgtccagctggctcagggattcaggtagagttactttggaaaatctacccacaccttatcctgaatcactgctccctacactcttaaatctgtgtccactgaaggcattggcctttactgttcagggatgtgagttatgttgcatacttgtgaaaaatttaaaaatcaacttaaaattcaaacccaaaacttattaaaagaaagcaaatttaggccaggtgtggtggctcacacctgtaatcccagcactttgggaggctgaggcagccagatcacaaggcaggggaatcgcttgaac

SEQ ID NO: 216168 - DNA, 462 bp, Homo sapiens
tcccgcctcagcttcccaaagtgctgggattacaggcgtgagccaccacgcccggtcctgattgaggaatttaaaagactactctggttgatttggagaatggatcagggggcagagggagccccgagagaggaggctcaaggcatagaacagcctaagaacagcctcgctgaagatggtggtggcctggatgagggtgtcagtgctcttggggtgcactttaggtgggctcaactcatcctatgaccatttgcattttcagcaatgcctttttctggaaagaagttttcaaatgaatgcaaaagtgaagagattagttcagtaatgaggcgtgtatccatcacctgcttcaataattacaaacattctgctattgttgtttcacgtatccccttaacatttgaaagtaaattgtagctatcacactatttcactcataaatccttcagtatacatctctaa

SEQ ID NO: 216169 - DNA, 409 bp, Homo sapiens
tcttcaactaaatctttgaaatcttaaacttgtgccacatctcagctttgactagctgtatttaaaatgctcaatagccacaggggagccactgtattggacagcacagttctatacccagttttacggatataaaactggtgttgggcaaattactttccgtctttaggactcctgctttcatcagtaaaatgaaggattcagacttgtttgtcttctaacaaaaaaatgtggttccctccaggtatgagggagccttcagaggtgccctaaataatctgtatctcgatctgggtggtgcttgtgtgggtgtatgtataatacataaaaatttatcaggcagtacacttaagatttatacacttaatagtatctttgttatatctcagtaaaagtttaaaaaaaaaaa

SEQ ID NO: 216170 - DNA, 454 bp, Homo sapiens
ctgggttcaagtgattctcccacttcagcctcccgagtagctgggattacaggtacccgccaccatgcccggctaatttttttgtagagacagggtttcaccatgttggccaggctggtcttgaactcctgacctcaggtgatccgcccacctcggcctcccaaagtgctgggattacaggcctgagccaccgcatctggcctcaattaccaatgactaaatttgtcttcttaataataaactttacttctagtaatttgacagttcaaggcaagttgctaaatattccaaaataatttttaaatatagtaaggacaagtatagatgataattactataactattttcaacacatataaaatttttctatcaaaaaactgagattactatttctaagacaacaaaatttgatatcagaatctccacttacatgattgcatatgtgtaagcacga

SEQ ID NO: 216171 - DNA, 572 bp, Homo sapiens
gccacgctcctggtccacccactttcatgttccatcctgtacacctggctctgccttttagatagcagtagcaaaattagtgaaagtactaaaagtctctgatatgcagaaataatgacataagcctgtctctctctcttcctctctctctctgccttggctgccaggcagagaagggccccctgtccagtggacacgtgacccacgtaaccttacatatcattggagatgagtcacactctttaccctgccccttttgctttgtatccaataaataacagcgcagctagacattcggggccactactggtctccgcgaattggtggtagtggtcccccgggcccagctgtcttttcttttatctctttgtcttgtgtctttatttctgcactctctcatctccacaaatggggagaaaacccaccgaccctgtggggctggaccctacatgtgtatatctttggataattgtttattcaaatcctttgcccttttaaaaatttgactttttgtctttttattttttacttataagagttattttatatcttagtagactctatcagatata

SEQ ID NO: 216172 - DNA, 621 bp, Homo sapiens
ccatttgcactccagcttgggcaacaagagcgaaactctgtctcaaaaaaaaaaaaaaaaattcaagtgaaaatccgattgttaatgaattagaatatcggatcataacacgttctagagctggaagaatgtgtcatggtttggcatctgttccacaccaaattgtagagtgttaggctacctgtattttcagattccttctgctttgagaattaaatctgttgtagtcacattctgactttgggcatagttctatttgcctccccagtgagcagacacctggctcttcttggtgtgtatatgaaaagtagaataagtggaattcattagaagctggctgctatcatgtttagggaattcaagaatgatatcaacaaggagaatgaataaaagaaatatttaaagacccaaactccactaagatgagtagactcagactgaaaaaaaaaaaaaaaaatcagacctggaagcaatggggaatgatgtgcctttttagagtcaagatttgggtcgaatagagtgtaagtttcagaggcaaagtttcaaccaatgtcagcagtacaaaggctacaacttccaacatcagatctccatcagtaacaacatcttggaagagggcag

SEQ ID NO: 216173 - DNA, 557 bp, Homo sapiens
cggattcatcaatttcctctaggttttcctgtttgttcatgtatagttcatgttctctgatatcttttgcatttctgtgatatcagttgtaaggtctccttttcattcctgcttttggctcttctttttttcttggttagtctagctagtggtttattgattttgtttatcttctcattaaaccaacttttcatttctttttttttatttcttagtctctattttgtttatttctgctctgatcttcattatttccttccttctactaattttgggtttggtttgtccttgcctttctagttccttaaggtccatcattaggttatttgaaatctttctactttttttgatgtaggtgtttattgctctaaacttccctcttagcactgcttttgctgtatcccataggttttggtatgttttttccatttaaatttaagaaattttttttcttctttttggagacagggtctaactctgtcacccaggtggagcaaagtggcacaatcatggctcactgctacttcaaacacctgggctcaagagatcctcttgtc

SEQ ID NO: 216174 - DNA, 376 bp, Homo sapiens
agtttctcataagttataaccagatggtggctgaggctgagtcccaaaggtatctgcacctaatgtgcctgacctctgggctggaaagactcaagccagggctggcatctctccctcatcctcatcctcttcctccatgtggtttcaccagcatggaggcttcagatcatctgcttttctcatatggcagctcaaggctgcagtacaagtgaggggagcgagagagcaagcccctcccctattgcctcttctaagctagcctcagaagctctgcagcatcatttctgccacagtcttgtttgtccagcagtctcaaagcctgctcaagttcaagggaaattggcatagacaccatctcttgatagcaagtgtattt

SEQ ID NO: 216175 - DNA, 219 bp, Homo sapiens
taaaattatctttctgatgctagagatgatccaggaattcacttatagagcaatgataataccacttcaaataatgtttctcttagactcccagaacttaatacgctttccttctgagtcactacatttgccaacaaggaagattctgaaagataagcttgctgatgatgaaaacatcacttggtggccaacctccttattacacataaagacaaacaa

SEQ ID NO: 216176 - DNA, 436 bp, Homo sapiens
ggaaagcctgcgactaactgaaaaagttacacagctgacactgctgcttaaagaaaccagatggcgccagagcttcttgacccctgaccagatgccagaggaagataagacaccataaaaccagcgcaaatgggaactggcaaaccctgggtgcctttagatcatgaacatatcattataatgctaatttcccttccctaaaagaaaatctctgccattttgtgtacatatgatatatgaagatgcatgtttatgaattgggcctgcgtgtctggagtcccaccctgcacatactaacattcctttcctgccccataggaataaaggcaataaaccccttgccttttattcttcaagaaaagatgctttcagaggaagagctcaccttctccattccctggcaaatgaataaaacctgattgcctttttcaatggg

SEQ ID NO: 216177 - DNA, 244 bp, Homo sapiens
gtagagacagggtcttgatatgtcacttaggctggtcttgaactcctgggctcaagtgattctcctgccttggcctcccaaagcgctggaattgtaagtatgagccactgtgtccagcctggccctggtcattcttaaaatgcactcttaaaatgtacctcccttcactggaaaacatttttctttctttctttttttttttttttgagataggggtcttgctatgttgcccaggctggagtgc

SEQ ID NO: 216178 - DNA, 325 bp, Homo sapiens
tagatttgttttgaaattcagaaatcttcagatttcagaagggcattatggtgtatataatgtttaagtcatccccagtggggcttaggttaagtaatatccccagtgggaattactcctgtaatcaaacatataatctctactgaaaaatgtatgaattagactaaataaaacaaagactagaaaaccttaagttgaagtcaggttttcttaccatataaattatatttgagactttgagttttcaaaatcttctgaacttctaaattgttaagttattctgggcctgtttattaaagactctggaaagtcttgaagaaaagaa

SEQ ID NO: 216179 - DNA, 490 bp, Homo sapiens
ccactggcccacctaaattcaggcccaagactaccctaatgccaccctaagggatggagtttatgataaagtctgtggccaaaatatcctggagaaagagaaaggagggtacaggtggaaattccctaaggtggcacatgcccaacaacacaaaagcctgtcttcaagttcaccccaagttcatcatgccatcattataatagaatttacatacagttttgcccccccatccctgggaggcttttcttaacaaattataggtaagaccatgcacagtttaattttagattgtatagctatacacttcaatcaaataacatcatcctgtcactcagatacagcccaaacctcaactcctccccacaaaccccataaaagcaccttgagctctgtaaagaagtgctgagttcacttcgcagaaataagcccgctgtccctcagagtgtattattgtgcttcaataaactttgctttaagcttgcattttggt

SEQ ID NO: 216180 - DNA, 235 bp, Homo sapiens
ggcttaaagaaagtctttccttcccttcgcataagcaagggaattttcatcatcattaaaatggtgatttttcaaaaagggcagaaaagtcagattagcgccccctggtggtataggtaaatcccaggggaaaggggaaaccccggcagaggaaggcgaaaaccagaacccaacatcattagttggaataacaaaaggcttaagaggctaggcgccttggcagatggatgcctgc

SEQ ID NO: 216181 - DNA, 457 bp, Homo sapiens
gaatgaccagacatgtacaatgactgcttttaggaagtagaaaaaaaatgagagtctgtcgtaggagtctttatctctttttattaaaacaaaaaaatcaacacgtccttttgaggatatagtaaaaatgtacttgagtagctgacagaagactacagcccaggatccaaagcagcacaaatcagtgaggcctgagaaggcgctaggatctctcagaggcgtctgcttcctccatcaacaaagcacaaagtttagacttagttttgtattcttgaggctaagagcttaatattttaatattagaaaaatataactcctgcacattcttgaggatagtattttattaattagaaaaatataactcccatatatctaacacagtatacaggaatctgatgcgtgtcactgaataaatgggtgaaaacgatgtttcgaatctttggaaagaaggaaagaa

SEQ ID NO: 216182 - DNA, 450 bp, Homo sapiens
cagttcggtagtcatgatccaaccacatgtccattgagcatttgcaatgagtcttatccaaattgtgatgtactctaagtataaaacacacactgaatttcaaagatttagtataatgaaatgtaaaatttctcattaataatttttatattgaattttatgttgaaatgaccatacttggatagattgggctaaatcagaggttgacaaactttccctctgaaagactggatagtaagaattttcagctttgtggatcacctggtctcaactatgcaactactcaactctgccattgcagtgcaaaatcagccatagacaatataaaaacaaatgggcatggcttgttccaataaaactttatttaaaaaaaacagatggtgggccagatttcccccacaggctgtatagtttgctgatttctgtgttaaataaaatattaaatatatt

SEQ ID NO: 216183 - DNA, 526 bp, Homo sapiens
ggaggtggggcatccgggtctcttggtggctgcttctacccccggagctcagctgatcttcccttccagactacgaggtgtgaatttcaaacttccgtaatggagttagcccacagtttattgctaaatgaagaagctttggctcaaatcaccgaagcaaaaagaccagttttcatctttgaatggttgcgatttcttgataaagtcttggttgctgccaacaagaccgatgtaaaggaaaaacagaaaaaacttgttgaacaattaactggattaataagtagttcacctggaccacctacacgaaaattattagctaaaaatctcgcagccctttatagcattggggatactttcacagtttttcagacacttgataaatgcaatgacattatcagaaataaagatgacactgcggcctacttaccaacaaaattggctgcggtggcttgtgtcggagcattttatgaaaaaatggggagaatgttgggcagcgcatttccagaaacggtaaataatctattga

SEQ ID NO: 216184 - DNA, 395 bp, Homo sapiens
tagcactgtcttaggaaatggagactttttgatagaaagttgccaactgccaggtgtgacattgagtcgagagaactttctctccgaagcctctggtgtttggtttgtcactgagctctgcttcagggctgttttctctccgggtgagaacagtggcagaagcctgtgaaatcaggctgacctgccttgcctctctgccgcatacatgatgtcagcgtcttcacgtgtgtatttttccggccaactccatcatctgccattgtcttcgttttggtgccttaggttgatgttagccagtaaggatgtactcaagacaggctgtggaattcctttttctctttagtggcgtaattcatagttttattaatgatcttatatttatagaatcactgaag

SEQ ID NO: 216185 - DNA, 436 bp, Homo sapiens
gcagagagtcaggcgtgactagagacctaacagcatcttctttccttcctccctgggccctgccccttgtaggcaatgggtatggcattattttgcttttattttgcatccttcgacatgggccaccctactttaagaaaacttggagggagggaaggttggggaggacacacctcatttccctggaccccttttggaactagccaaatccccagagggccttaatggttcttacttggatttgcagcccaaatcgggcttaggttgaaacctcagaagcagacagaagcagcagaagagatgtattaagaatagagataaagccgggcatggtggctcaaatcccagcactttgggagggtgaggtgggcgtatcatttgaggtcaggagtttgagaccagcctggccaacatggtgaaacccatgtctactaaa

SEQ ID NO: 216186 - DNA, 319 bp, Homo sapiens
ctggtccctcagatccccctgcaggggcaggaatgtctgagccagggcattgtttctgtggaatcttcccaccaatgaatctcccagcaggaccaactgtttggctgtatttaaactgtcatttagccaaggcagtttgctggcacacccaacttcaacccagcaagcacaacaggtctgcagctcgcgccaaagcttgtttaaacatcatttgaaccaaacagccagtcaatttaaaaatactccaagccaaaagccaatgagatttgaaaacaagaaaaactgaaaatgaaaataaaagggaaatatatgaatttat

SEQ ID NO: 216187 - DNA, 487 bp, Homo sapiens
gacagtcttgtcatcatgttactagatgtgtgcagcactaaacgtggggtggtgaatagaagaaccatattacatccagatggcttgcatgcatatatagtgttttgtgtttatgttactgccttactagatgcaggtactgaaaggtatccacctactttctgaacagagatagtcgtggttgtataaactgtcagaaaatgagtgcataaactttctgtttgtaaagaaggtaacattgtaactatttctcatcagacagaatatagtatttatacatagcataattcattagtaaggtataaattgtctttttaaatatctaatgtcttaaattatgacttaactaaattcaaaattatttatcatagtaatccttgttatcaaaattcaaataggtgagtgtaatatacaaggtaagggtctgtggccctgtcaaacaaaaacaaaaataaaaacatggtgacctctttgatggtaaaaaaaa

SEQ ID NO: 216188 - DNA, 496 bp, Homo sapiens
agcaggatttgaaccctggcaattgggctccaaagtctgatcctttgtctataatgttgacaaaaacttgtggatgttgtggtaaattgctttctctccatttgaaatcccattgagttgaagagatagacgcatagtgagtatacgtcccaaggaaatgtattatattgttttctgggtttcagttaattcaaataaaataaaaatagtgaagcaaagatttggactagatgctgtgaggttttgtgtcagcatgcaacagtgtcacaacagtgtcatcaccacgtttggttctgtgttgtggatgtaatattttgccccacatacatagaaagttcaatgaatagcactgaaccacatatataccaaattaaagacaacttttgatattatgtattctagagggaatctttctggtatcagaatattcatactactgtcattgggatgagttttaaatgtatacctttttaaataaatcctctttaataataaa

SEQ ID NO: 216189 - DNA, 367 bp, Homo sapiens
gtttctatggtgtttagacaccctactgggtagagaggtaattgattgttgggtaatcagtatatgtagctgttggggagataaagggaaagtgggttcatcagcagatacggggctaggtctcttaagtgtcagatccatctttcactttgttttccatcttcctcttgcctgcccccagttaggcctttcaagcatttaaaaatactgagcatttttaaatactgaggttatatagtgacatccttctttttttttcttttaaaaaatgttattatatgaacaacattataaaggagagtaatattatgtaccgtaaatcctggctcatggtgaacacttaataaacatcttattaagtgaatga

SEQ ID NO: 216190 - DNA, 355 bp, Homo sapiens
ggatatcagcacatttggagcctccctgtagccccattttctgacagcatgttccatttccgtgtagctgcaccggatttagctgactgttcaactgatccttattttgctgggatattcttcaccgattacttcttttacttctatcgacgctgtgcctaatttgttcaagtttggggactttaccaaagaaaaatactcaggaatacatttaacagaaacgaacatcctcttgcaacttcttttttcttctttgtaaaacatttacgtttattgctgaaggactttttcaggctttagcttccaacagttttgagacattaatgaggagaataaaatgtttgctgaaacttga

SEQ ID NO: 216191 - DNA, 423 bp, Homo sapiens
tacttgtttttttggctatttgtgttagctaaataccttttatagttcaaacatgtcacatgcttgtctctttattataatttttggttgaggactctattctgtgttctctttatgattatgtaaatattgttcattgctgggccaagaaatatgctgtaatcacattttcgttcttatataactttttccaggagttaattattgctttatgatttttcctttgtatctagctttattttcattttctacaagaactctgtaaagtagtggacttctcaatacaaaatttcacataatcaaacctgtcatatatgatagcatttttacttcttttctggagaagtacctcttcgatcacagcatcttactttgtagtgtggactggaagttttctgggtacagctattattttgtcagctg

SEQ ID NO: 216192 - DNA, 339 bp, Homo sapiens
acataaggatgaatgatttagtccttgcccatagggaagtagagggtcagacacaaaattcttcccagtcctgcaatttcaaatttcagagaggctgtggcagtgcagaggaggaaatgcttccaactctattttccatttacccagttaagatatatagaagagacgcatttttccttgcttttctttttaaagactgggtctcactctgtcacccaggctggagtacagtggcgtgatcatagctcactgcagcattgaattcctgagctaaagtgatcctcccatgtcagcctcccaagtagctgggattacaggcacatgccaccattcctggcc

SEQ ID NO: 216193 - DNA, 637 bp, Homo sapiens
cgcggtggctcacgcctgtactcccagcactttgggagaccaaggcgagcagatcactaggtcaggagttcgagaccagcctggccaacatagtgaaaccccatctctactaaaaatacaaaaaattagccgagtgtgctggtatgcaccggtaatcccagctactcaggaagctgaggcaggagaatcgcatgaatgtgggaggcggaggttgcagtgagccaagatcatggcattgcactccagcccaggcgacagcgcgaaactccgtttcaaaatattttgaactgaatgatatataaacacaacttactaagagtttggggatgcacttaaagcagggcttagaaatgtctatagctttaaaccataagttatcgatataacttaaagaaggatgccaaatcaagaagctaggaaaagaaagcaaagtaaacccaaaataagtgaaaagaaggaaataataaagataaaagcaaacatcaatcaaataatggataaaagcaaaaataaattaaatagaaaattaagaacagcataaaaatcagtgaaacccatgagttctatcgatcaatataggctgggcgctgtggctcatgcatgtacacttgtaggtcaggagtttgagaccggctgg

SEQ ID NO: 216194 - DNA, 422 bp, Homo sapiens
aattcagtggtgacagcagtttttgtggtttatgctgtggatagagaaaagcagaggtggttagtcttaaaactgtggcacagaaattgaagctgataataagaattttaaccatgtcttaggaaaagccaaatcaaagtcccctgctgataagagagtgagatgaatttgaaacatgggcaccacatccatgttcttgtaggcctggtttgtggtccagggccaattgtaagctgggatcacaagacagacacttctccagcaagcagacaacaagggaaggtctgaacttaaagctgcctctcttgtgagcccgaaagttgaatgtctctgtttccccaaatacatgatcccttgtcatttaataaaatcttcaggtacagaagcattagaagtggggtagaatcaggtaaggtcctgct

SEQ ID NO: 216195 - DNA, 614 bp, Homo sapiens
tctgaaggggagaagtactgctctaggcaggtgattctcaaagctaaagtgtgaggagcaccaggagggcttgttaaaccaagattgctgggctccagccccggtatttctgattctgcaggtctgggtgggaccagataatctgcatttctagaccagctctagatgctgctgccgccctggagaccccttgagagccacagaactagcctggagatgagcagtctaagcctgctttcgcctccctccatgagctaaaaatggcttttacatttttaaatggttgaaaaaaaatctaaggaagagtagtattttgtgacacataaaaattatacaaaattcaaatttgtccgtgaattttaaaagttttatttgaacgcagccaagctcattgatttatgaattgtttatggctgcttttgaagtacaagggcagagttgagtaattatgccaggggctgtatggcctacagaggcttacaatatttatcatctggctctttacataaaaatgttgccatccatgcgctaaactatttagaatataactggaaactaattttcagaaccgtcagagattcaatgcagaattcattacagtaagttcagctact

SEQ ID NO: 216196 - DNA, 262 bp, Homo sapiens
tgatggaaatgagagcattaaaaaggtttgggtgcactgggtgaatgcatcttaaggaacttgaactgcatctggaagaagatagggtgcccactgaaataggaaggtaacataaacacatttaaatttagaaattcaactctgtgctgaacatggtggctcttgcctacaatcccagcactttgccaggccgaggcaggaggatcgtttgagcccaggaatttgagaccagtctgggcaacatagcaagaccaatctctac

SEQ ID NO: 216197 - DNA, 611 bp, Homo sapiens
taggtgctcagcatctgcacttgtttagggattttttctattgtgagtcatggtgggaagcagggcctaccttccactacagaagtggaagagagcagatagcaagcttctactctccaaggaataaagtgcaggtgtgttgcctgtgctgccaaccaggtgctctcactcaggtcttagagactggaacaattacggtaatagggattcactccagctgcacagactacaacacccagtgaccatcagtagccgtggaagctgagggcctgaatctctagaagccctcgctactcaaagtgtggtctggggacttgttaggaaggcagaatctgggacccaccctagacctactgagtcaatatattatagtgccttgcacatagtagggccctaatgaatatatcttgatgtatagacatatgaaaatatattgaaatttgatcttgtggaagctatctgaattatatttcttcaaaatataattatgtaaacagcccttaacccaatgactgtactcttgaaaacatattacatgatattgtgtataataaattgcattttacttgcatttcattgatatttaaaagactcttccagtgaaaaaaaat

SEQ ID NO: 216198 - DNA, 526 bp, Homo sapiens
tgagtttctatttaacaaatacttatatagttttatgtgccacacactattacaagtactttacaagtaacacatttatgcctcatatgaagtgtagatgctcttatctctgttttacagaataggaaattgaggcatagaaaacgtaaataatttgcccaaagacaaacaactagtaaatggcagagatgagattcaaattcagggcaatctgggtctggagtatgtgcccctagtcagcatgttatatctttcagaggctgacacacctttgtgtatgtttattattggatcacctgcataattattaaggtttatttataaacctagcagaaatgtttgctgtacagtacataacttctttggaaatgatttatagtcatattctgaagcatttagtgaggacagagctaaagatagcagttttcacatgaattcagatatgcccctaagtagttcctcttattttaactcattctgtgtttactacagtaaaccagagtaaaaattcagcagtaataatttt

SEQ ID NO: 216199 - DNA, 386 bp, Homo sapiens
tacactgtagtgtgtctgcatttggtttgttctgaatgcttgcctagactaaaactgcagtctctctctcttacttacagtgtatctctctgttcagatgtttccctctaaccctagctagctccctagggggcctcacctgaacttgattagtttagtggtcaacaaatgaattgagcaggcagctcaaatacctcaaaggcttccaccctctgtcatctgagctgtgtgtggattagagaatacattcagagtcacagcaaattgacgtctccccaggctttcagtttttgccagactctgggatattccacatacatgcctacgttagcagtcaggcagggatctggcaagtttattatcaggctttcatagccctcttgctt

SEQ ID NO: 216200 - DNA, 602 bp, Homo sapiens
cgaccaacacacagggatggtgccaacctgtcactcaatgacaacgcagggctggtgactaactggtttaattcgagaccgtgggtcggaccacttgtctgtgctttgataatggagaatttgagtccctggaaaaagctactcgaccaggttagactagtggctggtagagtgcgaatgacaacatgctataccatcaagatgttcctggatcagtgtactgaccgatctattgcactactgtcagttgtaaccaagattgttgtattcgaggagaaagacacttgcctggaaaacacacggaaagttttttgagtatgggggagccctgcaccaccccattatgatttgaggtctctcctcggatgctcccaaatctggcaacggcggcaaactattgggctgaaagactcaatccagtgtattctggatttaaggctcatgacataatgcccggagcgaatatcacacttccacttactcagatggctgcctctcactgagtgtcaagaggaacagggacgggcatatggtcactccagctttgaacatcctaaagaattatggggtaacaggctacaaatgaatacggtcagttccct

SEQ ID NO: 216201 - DNA, 631 bp, Homo sapiens
ggagacagtcttgctctgttgcccaggctggagtgcagtagtgatcttggctcactgcagcctctgcctcccgggttcaagcgattttcctgtctcaaccttccaagtatctgggattacaggcacgtgccactacacccagctaatttttgtactaagacgaggtttcaccatattggccagtctagtctcaaactcctgacctcaggtgatatgcccgcctctgactcccaaagtgctgggattacaggcatgagctacggagcccggcctagaagtggagtcttagaaggagtgaccatgatatgtttctactgagtagaagggggaagggaggacataacctttgcatgatatagtgaaatgcagagctggaaagaactattaagatttgagtgaaacttttgccccctgtgttgaatgagttaactttcagtctgtaaaataaacaggaagaactgggaagtacactgtatcaattgctaacactgaataacctgcgctgcctgttttttcagcttctgctcccagaccacagaccagtggtggaagaagttacagatccctgtaagccactttgctcctggcctttgtacaactatctttcatcatttcttttattcatcattag

SEQ ID NO: 216202 - DNA, 310 bp, Homo sapiens
ttttttttctctttaaagcaaatattagttgggatagttctaaactgtcagagatattcaaataatgttgtagaaagagatcacagtgttcttctttattgctaccagatctgtaccctgagactttttatataaacagcgtaagagcttttctcaggtagtggaagcttctatgccatccttccttagagtagtaggtatcaacttgtggttggcccctcaagtgatctgttatctataataatgaagatctctcaagctgcttgcatcagtatctcaagtttataaaatattttcggattctatttca

SEQ ID NO: 216203 - DNA, 519 bp, Homo sapiens
agacccccactggtccccgtctacttcttcaatctgatccctctcactttcacccctcatttagttggtgccagccatatcagcctttctattcctatatcgaaccaggttctcatatttgtgttttacaattctctctgagtaaaaaattttcagagggcagatgcctgcctcccagtcattcaactcacaatggacatgtcccctcctcagggatgctttccctggccacccaatctaaataaacttcacattaaaagtgctaaggaaattctcatctgcactgtaacacattttttctacctatctcctgtaatcagaggaaatttttttttttatttacctgtttttagagacagggtctcactatgttgctcaggctggtcttgaactcaggcagttcacctggtctcaaatctcatgagtagctgggactataagcctgtgccaccacactcagcctttaatactttaatattggattaacatgcctcaattagataattttttatactttaa

SEQ ID NO: 216204 - DNA, 479 bp, Homo sapiens
cacatccatctctttaagccaatatctaatttggattattatgccaataaaatctgggtagataaagatatctacgagaccataaattaatgaaaaaaatcctctcatttaaaacaaatgcacatgcgtgtgtgtgctcacaaacacacaaacaagattcttgatcatgtagatttatagcatttgtatattttgttcctccttgtttgcacaagtagagaaggttgtccttaacagtttttcttcaaattttgtttctataaatgaaaaacatgtcggccgggcgcagtggcttactctgtaatcccagcactttggaaggccgagagtgggttgatcacttgaggtcaggagtttgagacatgtgaaacctgtctctactaaaaatacaaatatagtatccgagcttggtggcgggcacctgtaatcccagctactcaggtggctgaggcaggaaaatcgcttgaacccgggaggtg

SEQ ID NO: 216205 - DNA, 424 bp, Homo sapiens
ctgccaccaggtcccacctccaacatgggcaattacaatgcaacatcagatttggtggggatacagatccaaattgtatcacaaaccaacaggtaagaagaaatggggaggtacaggaaaactggccttagctttgtgttaatcccagacaaatttcaagaatggactattaaatgtggtttatgattacttagaaaatggttttttcatgatttattttgaaaaaaattatagacccataggaagttataaaaaatgtataggtcacgaggtcaggagttctagaacagcctggctaacatggtgaaaccctgcctctactaaaaatacaaaaattagctgggtgcctgtaatcccagctacttgggaggctgaggcaggagaattgcttgaacctgggagacagagttcgcggtgaaccgag

SEQ ID NO: 216206 - DNA, 176 bp, Homo sapiens
gatctagagtatcccgtggtcgatcactgtactgcagtgatgaagctgagattcaaattcaaataatgtatctccaaagtccatgctcttttttttttcttttttttgagacagagtctgctctgtcgcccaggctggagtacagtgatcgaccaacagctcagtgcaatgtccgc

SEQ ID NO: 216207 - DNA, 260 bp, Homo sapiens
ccgcctcggcctcccaaagtgctgggattacaggcgtgagccaccgcgcccggcctctttcgctttcttagatgctaaccagatactactcttttgtttttctgttaattcaaaccatgctaatttgtaaatgcagattgcaaaggcccaagtgagaaattggagagatcacagggagcactatgagcatccgtcctgtgtcctgcagcatcaggtgggaaggaagaggaggcagtgtctgggatttctcatgatggtgc

SEQ ID NO: 216208 - DNA, 381 bp, Homo sapiens
gtcctaggtgtaactcaaagggacacagcaggctatgtcacctgggtgcgttttgtgccgtgacaaaaagctaatcaccttcagttataaacagtagctacctcagcatcagtcccctgttttgtgagcagtgggagatattgtcctacaggagcttacagagattggcaactcaaggatccatcactcaaaacagatttcgattgaaaacattgacggaaggatatattttttctatctgcccaggaaagtggctttctggaagggtgcacattgcaggagaggccaggtagattatatcagtaggctcctttccctagcagaccacacaaaatatggggaacaaatttgtttatctgcatatgcatacccgaaaagcca

SEQ ID NO: 216209 - DNA, 543 bp, Homo sapiens
tttcttctgcttggtctacattatggttaaagtatacaactgtatttggaaatttctgtagtaaatttttctattccagaagttctgtgtggttctttcctaatatatagctatgttgtctttcatgctctgaatctttcttctgtcttctctgtatttgatttcaactttctctggcagattgttgagtttccttgccatccatattctgagttctatatctgtcatctcagccgtttcaatctggttaggatccagtgctaggaagtgagtgcagtccattggaggtgatggaacactcttgtctcctgtaccgctggggttcttatgctgccttcctaaccaaggaagctgatgcttcttttattgaatttgcttcatttggatggggatttttttttattttttcccttgaggatatgactctggtgtgtgttgtatataatcaattggctttgtttctgggggctttcagagggccaatattctgtacatgttcctcagtggcaaataaattcatgaggtgactatcacagatgttgt

SEQ ID NO: 216210 - DNA, 487 bp, Homo sapiens
ccctcaatggtggtctccagccaacaagacagccctcaaggatcctgcctcctggtattcccctgctttgtccagtctccttccacagtatatcagggttgctctgtgcctataatagaacgtaacagaagtgatggtatgctacgtctgagattatgtgagagaagatacggggtctctgtcgcttagccctcttgctcaagggaaagcaggtgctgtgtcctgagcagccctatggagaggccatgggggtaattgaactgacatagattctccaaccccagtcagcccttcagatgactgcagccctggctgacagcctgactatgtcttcatgagagactgtgactcagaatcagccggctgagtctctccctgatttctgactgtcagaaactgtatgagatgagaagtgtttgttgttttaaaatgccaagccttggggtgatttgttatacagcaataaatatctaatataccaactcta

SEQ ID NO: 216211 - DNA, 384 bp, Homo sapiens
agagggaactgctctgtatcccacttctgacaccacgtaatataaactaataagaaataaaaccaacgctgtggatcagcaaacaaaagagaagatattttagcccagcatgatggctcatgcctgtaatttcaatactttgggaggcttaggtgggaggatcacatgaacccaggggttagagaccagcctgggcaacatagtaagacattgtctctacaaaaaataaaattagctgggcacggtggcgcatgcctgtagtcccagcttgggaggctgaggtgggaggatcacttgagcctgggaggtggaggttgcaatgagccaagattgtgtcactgtgctccaggctaggtgacagagcaagagaccctgtctcaaaaa

SEQ ID NO: 216212 - DNA, 644 bp, Homo sapiens
gaagggtagagtaaagggatgctgaaagtgaggtggttggggttcagtaaaatagaagatctaagtattgaggaaggagagctaaataagacattagttcagaacacattaaagtaggaaacacaggctaaagcgcttacggctggtaatgtaagggaataaagtggtggtgtttaagggttaaggaaaataggaaatgatggcaacaagcccaaactcgagtttgtcccatccaaaaaaagaaaaaaaaaaagggcagcggctattcaactattgcccattgatgcatgccagaatgtggagcaatattgccaaatcttctggtcttccaagagaaaccagaaatctggattttcatataacatatatttaaatttagaaaacttttttttaacattacacatgacgtggcattatgtgaacccaatcaaatgcacctgagaattgttttagcccatgcactttcaagttgcaaccgttttttgtgacatactcagatagtgtgtaataatggatacacaatgtaggaggaggaacagggagcctgaactgtttggggtaatcatcagattcaaatactttttaacagtaaatggctggaatgggttaggctgaggatacaaaagagatttagaaatgaggga

SEQ ID NO: 216213 - DNA, 456 bp, Homo sapiens
cctgtttgcagatgacatgattgtatatttagaaaaccccatcatctcagccgaatatctccttaagctgatatgcaacatcagcaaagtctcaggatacaaggtatataaaaatcaattgctttcctatataccagcaatggacaagtggaatttgcaattaaaaacataacaccatttacattactatccccccaaatgaaataattaggtataaatctaacaaaatatgttagatctatatgaggaaagatctatatgaggaaaactagaaaactgattaaagaaatcagaaaaaaatacagatcttttgtattcattggtaggaatactcagtattgtcacaatgtcaatctttaacttgatttgtacaatcaatataatcccaatcaaaatcagagcaagttattttgtggatattgacgcactaattctaaagttcatatggagagaata

SEQ ID NO: 216214 - DNA, 366 bp, Homo sapiens
aatgctcagcatttctcatctatacaagaggcctccctagggcagagagggcaaactagaagaagggttgtggggcagagtggaaaggagaacaggggtatgaatagccaaacgaattaagaagttaaagagccagggagttggcttatttgtctgcaagtcctagacctaactgtacccattcctgcctaaagcaaggtactttgcctctctgagcctgagttggctcacctagaggctggaaataagtccctgcaggtagaatgcacagcctgagtcaggtaacagcctgagactggaaccctatgtgggaaaggtgccaggtgaagccaagacactattgtttttcctgttataggcagtagt

SEQ ID NO: 216215 - DNA, 482 bp, Homo sapiens
aggtaccctgcaaggtctggtgtcctggggaactttccttgcggccaacccaatgacccaggagtctacactcaagtctgcaagttcaccaagtggataaatgacaccatgaaaaagcatcgctaacgccacactgagttaattaactgtgtgcttccaacagaaaatgcacaggagtgaggacgccgatgacctatgaagtcaaatttgactttacctttcctcaaagatatatttaaacctcatgccctgttgataaaccaatcaaattggtaaagacctaaaaccaaaacaaataaagaaacacaaaaccctcagtgctggagaagagtcagtgagaccagcactctcaaacactggaactggacgttcgtacagtctttacggaagacacttggtcaacgtacaccgagacccttattcaccacctttgacccagtaactctaatcttaggaagaacctactgaaacaaaaaaaatcc

SEQ ID NO: 216216 - DNA, 496 bp, Homo sapiens
ggaacatatgaattaggacagtgcttggcatatagtaagttttaaaaaggtatctatcattgtctttgccatcatcatcatcattatagattcttgacacctgtggaatatatatagcccatgaaatgacaaataaggaatgcttatattggctcctaaatttctccaaatgacatatttcagctatagaatccagtgttttctgtatatatcctccttatgccacaagttaaccagtagctggcagtctccgagtccctctatctttccagccttctgatcctcaccctatcccaagctgagaccttggcccagagcctcagcctggcagtaggcatgattcagatttgttcctcagcaaaactgccagttatcaccccatgggctcactccatctgcagtcattgaagccaagaaagttgaatccgggaatgccagaaggtccactactggtttctcaaggtgtgtttcacaggatgctggttctgttgagtga

SEQ ID NO: 216217 - DNA, 470 bp, Homo sapiens
ggaaggcacagggtatgacacactggtgaccttataactgtaaggagtgtggataagtatttattagtccttgtgtgttttagatacatgaaagaatttactcaaaaggaaactctatgaatgtaaagaatgtggtaaaacctgtgtagtttcagtttctcttgaataaagtcatttcctggtattctcaggggattggttccagcaccccttgagaatatataattttgctcaagtgctttacagaaaagtgtatttgcctataactaggcaatcctgtatactttaaatcatctctagattacttataatacctaatgcattgtaaatgctatgaagacaactgttttattgtatttagggaagtatgacaagaaaaaacatctgtacatattcagtacagacacaaccaccatacggctacctacctagtacacatcatctacaatataacattttctttttaaaaa

SEQ ID NO: 216218 - DNA, 710 bp, Homo sapiens
  misc_feature (710)..(710): n is a, c, g, or t
ggtcaggctggggcttatggcttgttctgacagcaatgagaaacatttaaaattctagttagctgggtgtggtatctcccagccataatcccagcactttgggattacaggcgtgagccaccacacccgcctgtaatttatttacttatcttttttatcagagacaggttttcaccatgttgcccaggctgatctcaaatacctgacctcaagtgatctgcccgcctcagcctcccaaagtgctgggattacaggcatgagctaccacgcccagcaagactctgactttctaactcactcccagtgatagctagtatactgctgctccccagaccccactttgagtagccaaagattaggatattgtcctaaattcaaggcatctactacaatataatattgaagtagaaagagaaaatacaccaaaaacatggggggccagatacagtggctcacaccagtaatctcagcactttgagaggctgaggtgggaggactgcttgaggccaagagtccgagattgctgtaagccatgattgcaccactgtactccagcctgtgtgacagagtgagactccatctcaaacataataaacgattatattaataatacagacataccacttataagcatagaggcattcacataagcatagagggatatttgagaaaccccaattacaccgaagtagccagttggcggacacttn

SEQ ID NO: 216219 - DNA, 577 bp, Homo sapiens
gagaatgagtgcccagtgaagtgcgaagccccttataaaaccatcagatctcatgggaactaactcactatcacgagaacaggatatgggaaatcgctcctgtaattcaattatttccacctggcccatcccatgacatataaggattatgggaactacaattcaagatgagatttgggtggggacacaacaaaaccatatcaagactcatagccatacaactgtggtggtcttggataagatccagaagaattctctggattgtcaggccaagactcttgtactttttccttactttctttcaaataatggagtatctctgtgctagagctgcatgcaaatggtgttgggggacaaaagcacccatgtgtccagcaccactgggactttgctgtttcagacctgaagccaacacttcactgggtcttgcccaaggcccactgtaaccactacctgtctactacttatagtcattcaaggtttcagggctctacaatcagcaatcagcaggtggcaaagccaccgatgtttgtatctctctttttagagcagtgagttcccccaggacctgagtggg

SEQ ID NO: 216220 - DNA, 583 bp, Homo sapiens
ctgaaacaaatgtgtatttcttcttgtgccacaaatcttttaaaataaagtgaatatatttttacaaataagcacaaagaataaacctataatagtactgaaaaaagaaaatgaagccttcaggagcaattttgagaagcttctgaaggttagaaatttttaaatagagaaaccaagagcacagaaaccatacagaagaaaatgaagtcaggaggttcatggtcaccagcgtgttctatgcatggctaacttggatataccaaagatacttctaactcaacatgtttaactagaacttagcatcttcccataaacatatttctttcatttgtggttacttttcttggttgtggcagtattatccacctagtcactgaagccaaatctttgaccctcatctttgcttttactctcttctcacatacatgcattgcttcatgctctattgatgcaatcttttaaactattcctcaaaaatacctgctcttcccccagttctgtttcattactttagttcaaggcaacgtgttctgttgcctagagtatgacaatgtcctccaattcagtctcccctaccttcatg

SEQ ID NO: 216221 - DNA, 423 bp, Homo sapiens
ctagaaagtcttcctgtagaggcatttttaagaagcattatgataggcattgcctctggaaagcaggcatgaatagatggctggggtctatcatgagagagaccgttctccatatatcactttgtaccttcatatgttgccttttgttttgttttggtttttttttgagacaggaccttgctctgtcactcaggctagagtgcagtggcatgatcatagctcactataaccttgaactcctgggctcaagtgatcctctttcacagctccccgagtagttgggattacaggcatgcacccccatgcctggctgtatgttgctattgtgtattttaaaaacctaatcctgactgtgctggtagtcgcatgaatctgtgcacatacgtgcaaacaagtacatgtaaaactggtgaaatctgaata

SEQ ID NO: 216222 - DNA, 493 bp, Homo sapiens
ctttgagcttacattttgtggggagacagacattgatcaagtaaacacaagcatgatagctgttgtgaaatagacacaaaaacacacagggtgttgcacaagcacacaatgggtgccctcacctagtctgggggccaggaaaggatctctgagataggtgaagatgaagggggtttttagagtatcattcttctttgttgaactctcacgtgccaaatactctgctttgcaattagcagatgctagattcatatttggtgaccaactagcaagtgaggaagatctagcaggatgagaaccagtgaaaatacagcccagtccctgatgggactaattcctccttaatcctttgcttttgcctttttttcctgccaaaattatataaagatttgcatccatcttttatctttatttaagtccattttgttcaaagttttcaatgcctggtaaaccaaaagtgaattaaacattaacatattagtttacattgcta

SEQ ID NO: 216223 - DNA, 431 bp, Homo sapiens
atctatgaatggatgcaatggaaactgtgaggtaaatggtccaaggggcatagtcctgcaaactggagctttgtctataataaacactgtatggttgaaagtatgaagattcatcttacaatgcagagagatagacacaatatttaaactactattacacaaataatttagataaaagaaaatttaataaaatatgccttagaagtttccatgctttattacctgtagaagaacataatgaaacatccctcactatatttagcttactgctctcccaactctggaaaaatagcctcactctggaaaaataactatcaaaccatggttttatactaaaattttaaattatgaaatgagcgtcaattttcattccaaaacagagtatgagatttagcagatttgttgactcaaaaataaagaaaagatgtaaa

SEQ ID NO: 216224 - DNA, 492 bp, Homo sapiens
ggagaatcatttgaacccgggaggtggaggttgcagtgagctgagacactccagtctgggcgacagagcaagtctccatctcaaaaaaaaaaaaaaaaaaaaatcatgacctttattatctcactctttacatgggtcaggaattcagaaaaagccatagtgcctgttatgaccttgtcttagaaagtgtacagcatcactcactaagtccagccaacactcaaggggaggggaagagtgtcagaaaagagtttccagacatatgtttgtgtatgtgtgtttctgttggacataaatattttattgggctttagatttcgttccgcttcctgggtcatcaaaaatatgtcagctaatggcttttaaaaatacatggcagtgttcttgtacttgaaggcgtttagtcatatttcatatctacaaattctttaactagttctttcaatccagaaagtcatttcatgtatatgaatgtgtttatggatccttatg

SEQ ID NO: 216225 - DNA, 256 bp, Homo sapiens
gtaaatatctcgcttaattttagattccttggggaactaagagttaagtaaaacatgctccaattttcttaggtttatttttaagtatttttgttttagctttttttttctctgatcatgggagtacattttcgctcaaacacttcaagaacaaatgctattttaaaacttagaactctggaatgatcagtattaaaaagttgtgagtcaaaaggaccttgacaaaaccttaagagtgtggctggaaatggaaatg

SEQ ID NO: 216226 - DNA, 254 bp, Homo sapiens
cattcctccttggaataactccacctcctcctacttgtctagtctggtgaaatttctcttatccttcaaggcgtagcttaaaggccagcttctctgaaaaaccgttcctattgcctcttcctctgattggagtctgctctcctgagcttttcttgctacttaacagtgctactccaaatgtaccagtaagtctataattatttttcttacatcttatttgttacagcttcacatttagtaagtcttaataaatg

SEQ ID NO: 216227 - DNA, 509 bp, Homo sapiens
ggattctaaaaggacccctacaacttgaatgataattttaacttctgactcatttgcctgatagtcttgccagagctttgattgtcattttagttagatttagtgttggccatttgagtaagctcctatgcagctgtggcaaatgttcatttccatgaagccataggcatgttgtgagtataactatctacaagaactagtgagagatcatcacattggtatccccagacactaaagaataacagcagcttttaaaagcaaataaaaataataagcaatataggctgccagtttgtctcaagaaagaaaatgaaaatgagtttgtaataagggaaaataaaattttaatctgattctaaaaataatctgctgtaagtagatatttaaaatttaaaataaataagataaaaaattaaaaagcaaaagtaaaataaatattaaggaagaaatgtcaagagtagtctctctcttctttttcattctcttttcctttttcttctttgctttct

SEQ ID NO: 216228 - DNA, 145 bp, Homo sapiens
aacccttcaattgcttcacaccaccttcaagacaaagttcaaatgcatggtaaacacagtccttcttcctctggcttctctcaccagtccccattcacatgctaacctccagctaccctaaactacttacagttctccaaacaaa

SEQ ID NO: 216229 - DNA, 160 bp, Homo sapiens
gtgccttctatttgttccacttgttctgtttctttttctttctttcctttctctggatttatcattgcatttgcactattttcccctctactgatttggagtttattcttttatcttttttttttttttaagaaacggcatctccctctgtcgcccaggc

SEQ ID NO: 216230 - DNA, 403 bp, Homo sapiens
cctgagtagttgggactataggcacatgccactagcctgatcatttctactttggtctttgctactacatactacgttctctttctgtttttcaccaaagaaagtagtctcttttccttgagctctcatggctcttttgttagtacttcttatattacccatcacatctacttgtattatagttattttgtatagtttatcttcctgattaaattataagctctgtggaggcaggaatcagctcttctttttctccatctccttcagagtccctaggactatatttcatacagagtaagtgcctagtacatgttttttgcactgaattgaccatgagtacatgaattccatagtctaaagttcacccctttgttgactaccttactttctctttcacagaaaa

SEQ ID NO: 216231 - DNA, 497 bp, Homo sapiens
attcagtgaataaaaatagagtttcatgtccgtttttaggtgcatagcaaggctgtgctgggagctgttcttccgcccagtcttatatgaaccagaatgttacttagtgtcgagcacctcctaggtaacaacacaaaggagaatgaggccaggagcagaaccaggccataatggccaggcagatgctgggggaggagacgctgcgtctttccctgagccttcctggtattttctttccttgaggagtagcagctacactctctgtctttggccccagcctcacaaaagttagccaggggacctaaaatgcaggggagatgcggttccctagtgggagagctctatgacatctctcagggtgagcatctccactgttgggagcaccgtctagagagccagagctcctgatggacttgcaagatgtgtaccagggcgccaggatcagggtagaggcatggagaggtgccaagtcttgaaagtaggggtgtcgatcagcc

SEQ ID NO: 216232 - DNA, 434 bp, Homo sapiens
agcttcttcccttcggtccgaaacccctccgagagggctgagtcggggacagacaggtggagtttccagagcctgcaccacccgggacactgctggcagctctctaggccctagagtctgagctgactccgactttggctcaccgctctgcggccggacgattgtatgccattcaaaaagtcgggagttgaaagacagcacgcagcacctttgtccccctccccgttttcccggcgcgctgaaaagaaatggggctgggacttaggggcgggggagggcttccaactcggtttctctatctcctccaccaccttagagcccaccctccccaatgagcgttttgttctacccagccacgtgtttgtcggatttttgtttttgtgatttttttttcccatggaacaacaagaattaaagtactaggagctattaaa

SEQ ID NO: 216233 - DNA, 416 bp, Homo sapiens
cctgagaaagggaacataatatgcaattaaaattaaggacgttctatttgaggggacctgttacatgaaattacagcagaaggcaattggggaatattattattttgcatatttaggaatcaggataattagaagatgccaaacacgtagggccaactggtaagggtttgggaagggaagagggaaaaagacctcaccttgtgggatgtgggcatcagtgggagggtagctgtgcatgttatgtacagaaaatagggtgcttggagctattgtaaatgatgaggggagtcctaagggctgtgattgtggagaagaaacttagaccctcaactgaacaacatgagtcacattcctgcccctccattttgttgttacatcatttgctctttccaaatctttgatttcttcctcatctg

SEQ ID NO: 216234 - DNA, 398 bp, Homo sapiens
gccagctaaaatcccaaagcatgtttaccatccatgggcacaaccccaccaacatttgtttagttcttcctagtatgcagaacacacacacacacacacacacacttctgtgacacgtggcctgtcaggactaacacctagaacttatgcatctctgaaatcttaactaaaaagctctacaacctcttaccatcccaaacctttatctcttactcccaaatagctgtgctttgagcctttgagcctttgcgtttccctggtcctcctattttctccctcccagtcttgcccatcctcgttccatctggagccagcctagatattaaggttcatttcttcaatcattctcttcctaacacctttaactcgttgttcccttgcccttctgtcctcgactt

SEQ ID NO: 216235 - DNA, 425 bp, Homo sapiens
taaagttgaagaaattagaaaataaaaagatagatgatagaaaagataagaaaattatataatctatctaggatcccaacatcttattactaaaagtcccatacagaaaaaggagggaaagaaattatcaaagaaataacacatgaggctgggcactgtggctcatgcctgtaatcccagcactttgggaggatccaggagttcgagaccagcctaggcaacatagtaagacttggtctctaaaaaaaaagtaaataaataaaaaaataaataaattagctaggcatggtggtatgtaactgtagtcccagctattccagaggctaaggagggaggattgcataagcttgagaggtcgaggctgcagtaagtcatgattctgccactaccctccatcctgggtgacaaaaagagaccctgtctca

SEQ ID NO: 216236 - DNA, 577 bp, Homo sapiens
atacttaccctgtcatacgctttcacttccagtcttagttcccatgttattagcctaaacagagcaccatgaaagcagaaaacctgttctccaataattacaacttatgtctgggttacctgctgtctccatgccatggtgtcccatctttcaacacgagagagagaaagctggactctttctcctgcctgtattcaaacccataagaggcatcagctttaacatttcaagctagcgtttcaggaagagtaaattcatcttcaaccacacacctagtcattttcaaccacacacctagtcattatgttgacatctcatttcctgctctctcatgacactggtttttctctatcagtgatttctgacaggaacagtgaactagcatgtgtggaaggtgagttcctgggggaaccaattttgttagcaatttctctttctgccagctgtagcttccaaacattgcctatatttttgcttttatttctatatctattttatataaaacaacaaaatatatacatcaataagtatataaatacatatacacatatatatttaacagctttattgagatata

SEQ ID NO: 216237 - DNA, 170 bp, Homo sapiens
caggacacctggggtggggaagggagcacagaacccagacaccagcctggacacagacacctgggaaaatctcctattccttggaaagttagagtctctgaggggggagcagggacttctggccctgacctaagtggaggccgagggactggaatcagagcctcaaacac

SEQ ID NO: 216238 - DNA, 724 bp, Homo sapiens
tgaagtggctcacgcctgtaatcccagcatttcgggaggccaaggtggacagatcacttgaggtcaggagtttgagaccagcctggccaacatggtgaaaccccatctctactaaaaatacaaaaaattaactgggtgtggtggcaggcacctaaaataccagctactctggaggctgaggcaggagaatctcttgaacctgggaggcaaaggttgtggtgagccaagatcacgccattgcactccagcctgggcaacaagagcgaaactccgtctcaaaaaataaataaataaaattaaaaaaataaaataaataagtaatacagaatggccaatgtgggcttcacagggaggacaaggatttttttggtaaggggctttttggaacccctcaaatcaactgcagggcccttcctgggcatcatgctacacaagtaaaagtccctctacgttccaggattgttggctccctgggcatctggttggggcaaaaagaaagatactgattttaaagtagaattatcttataagtaagaattctaggctgggcacagtggctcacgtctgtaatcccagcactttgggaggccaagaccgcgcgatcacgaggtcaggagatcgagatcatcctggctaacatggtgaccccatctctactaaaaatacaaaaaaaattagccgggcgtggtggcgggcacctgtagtcccagctactcaggaggct

SEQ ID NO: 216239 - DNA, 356 bp, Homo sapiens
cgagaggatcgcttgagcccagggagtttgacctgcagtgaactatgattgtgtcactgtagacctcttcctcttcagctgcctcaaaaaacgaacaaacaaacaaaatagccagatctcctctctacagaatttttttttttaattagccagtggtggtaatgtacctgtggtcctagctacttgagaggctgaggtgggagaatcacttgagcccaggagttcaaggctgcagtaagctatgatcaggctactgtactccagcctgggtaacagaatgagaccttgtcgaaaaacaaactacaaccctatgaagtattggctgggtgctctggctcacacctataatcccaaca

SEQ ID NO: 216240 - DNA, 495 bp, Homo sapiens
tgtttcatttcaattttgtcttatggttttttgccccaacatggaatctctcaaaagtttccatggactccaagtttaagatgttgggatattgaacagttctctctgctcagcagagggtagggaataacattatcacttgaatgttctttgcttaacccttagacttggttccttctatgttcagagtctcatcatcaggggaaggaaagggagtgagggtcagggataggggtcttggtgatgcatcctctcccgagccacagaaccaaagagtttatagaggaatttacagcctcgttttcatgtgattgctacatcctaacagggcttcatttgggggtggggggaaacatgtaaaaataattgccagtttctacttttctattagctttttaaaaatcagctgtaaagttgcatttctaaagaaagatatatataatatataaaatacatatatagatcaacttgacattggtgataaccaaaattatt

SEQ ID NO: 216241 - DNA, 580 bp, Homo sapiens
ggttgagcttcagtcatttagtttttattaaagttacatattaaaatagatcctgagaaatgcgaatactaatgtaacttagtggttttaagaacagtgatactatacgatatataggctgttatcatgtagatgcagagaaataacattatcaaaggtatcttcatgatgcaatgtatattgaatgtgaaattaattcctgcagaataaatgctgtaggaataactaaggtccttttgctaaggtttatacagtctggcatgccctggggaatctagttccctccgaagtaactaaaaacagacgaactttaactgaaaacatatcatctgaaagaatttcgttaatgactttctccttattacttagagtttaaatttggtaaatcttctgatgcttttctttccttcccatcccccaggaatagcaactgaaatccagacaagcattcagtatagaaaactacgtttctgagggaccattacattttattttgctttgctcccttgttggagttgtaagcaacctattaaaaagtttttgtttttaaataaaacttttttcctaaagaaggtttaaa

SEQ ID NO: 216242 - DNA, 693 bp, Homo sapiens
catggtggctcatgcctgtaatcccagcattttgggaggtcgaggcaggcagatcacctaaggtcaggagttcaagaccagcctgaccaacatggagaaactcccccgtctctactaaaaatacaaaaaaatagtcgggcgtggtggtgcatgcctgtaatcccagctactcggaaggctgaggcaggagactcacttaaacccaagaggcggaggttgcagtgagccaagatcacgccattgcactccagactgggcaacaagagtgaaactctgtctcaaaaaaaaggaaaagaaaaaagaaaggttagattctcattactttccacccagtcttcactctcttcctttcatgacatactagaaatagctatcctaaaacacaactctatcatgtcactcctttatcagaacaccttcaaaaaggctccattccccaccaatcaacccttcaagattcagaccaaatgcctccttctccaagcaaccttgtgtaatctccttcccctaaggagaggtcattgcttcctcctctgaacttcagcagtacctcacttgacccttaccaatttcagcctcctatcacaagtacctgtactgacatacaagcatcgtcaccctactggaagacaagcgccttaggagaaggttcaatgtctaattgaactgtgagtctcccacaaattctggtga

SEQ ID NO: 216243 - DNA, 740 bp, Homo sapiens
ctttgtataaacaagttccctaaaagattcttgcattaatagctaggaaccatgttttgagaaacactaccctggaagtttataatttctctgttagctctggtgttggtgaactgtaatcgggatggagtataagcaaaatgataaaaaatgtcaaaaatattaaaagtgtcttaagaagaaaaaaaaaaaaaaaaaaaaaaaaaaaaaaaaaaaaaaaaaaaaaaaaaaaaaaaaaataaaaaaaaaaaaaaaaaaaaaaaaaaaaaaaaaaaataaaaaaaaaaaaaatataaaaaaaacataaaaaaaaaaaaaaatttggggcgccttttccaccagtgtttttttaatccgggcgctttttattccggcccccatattggccctctttgggcaatatccccttttgggggggggtataaaaaaattggcgggcgttttaaaaacacggtgtggggggaaaaacctgggggttcccccatattaaagccttgggagaaaaaccccttttttggcggcgtgtgttaataaagaagggcgccccccacaggtgtcttttatcaaaagggggccccctcttgggggggaaaataaaaatggcggcgcttttattttttaaaaataacgcccggttaaatttttgtagaaacaaccctctttttttaacaaacagcgtcgcgcagagtcgggatctctcttttatacccccctcccgatcggggttgggtttcttcccc

SEQ ID NO: 216244 - DNA, 111 bp, Homo sapiens
aatctatagattaagcagtggaatccaaaacttccactctcaccctttcctccctccctgtcaccctcacactaatagtggcagattccaatgccccaggctccagcggac

SEQ ID NO: 216245 - DNA, 336 bp, Homo sapiens
ctttgccacagcacatgggagacaggaagtcagagctgccaacaaatccccaccttgttaattttatcagagccacggataatctgaaaacaggaaagatgctataaatggtggttctgtttgtggatccatcttgcagtcggttttaccagcatctacccagccagaggccaggagagggcagggcttgagatatctctaaattcctcttttcctttgctttctaagtcctcatcctgctgggcttgcagcctgtcttggggtcccttcagcctccccccattccacctgtaggccaagtggtgctgagccttccactatgggctgtggtcactc

SEQ ID NO: 216246 - DNA, 381 bp, Homo sapiens
ttttgagacagagtctcgctctgtcactctgtcccactgcatcaggctgggatgcagtggtgcaatcgatctcgcctcactgcaacctctgcctcccaggttcgagcaattctcttgcctcagcctcttgagtagctgggattacaggtgcccgccaccacaccaggctaatttttgtatttttagtagagacagggtttcaccatattggccaggctggtctcaaactcctgacctcaagtgacccacctgccttggcctcccaaagtgctggaattacaggcatgagcaccgcggctggccctgaaccctgccagttctaaagaatttgaacttccaattacttctttcttttctgagactcccttctgtcgtcttctc

SEQ ID NO: 216247 - DNA, 559 bp, Homo sapiens
aaaggcttaaaaagaaagccaaaccactgtacttatatttgcagaagcaaatgaagtaaactggcaaaaggaacttggattgcaggaaagtcaaagtaatatcaaatcctaaattcagttgatctgggccgagcatggtggctcatgcctgtaatcccaccactttgggtggccgaggggggcagattacttgggctcaggagtcggagaccagcctgggcaacatggcgagatcctgtctctgcaaaatatacaaaaattagctgggtgtggtgtcagatgcctgtagtcccagctacttgtgaggctgaggtgggaggatcgtttgagcctgcaagatggaggttgcagtgagctcagatggtgccactgcactccagcctgggtgacagagtcagaccctatctcaaaaaaataaaaaataaataaaaaatcagttgaactatatggaaacttctgtacctgtgtcaacggtgcatcttatctaatactatatgatactgtaatctaatattatctctgataattcaaaaatgctaataaactctgctcaaatgtg

SEQ ID NO: 216248 - DNA, 926 bp, Homo sapiens
aaaggcttaaaaagaaagccaaaccactgtacttatatttgcagaagcaaatgaagtaaactggcaaaaggaacttggattgcaggaaagtcaaagtaatatcaaatcctaaattcagttgatctgggccgagcatggtggctcatgcctgtaatcccaccactttgggtggccgaggggggcagattacttgggctcaggagtcggagaccagcctgggcaacatggcgagatcctgtctctgcaaaatatacaaaaattagctgggtgtggtgtcagatgcctgtagtcccagctacttgtgaggctgaggtgggaggatcgtttgagcctgcaagatggaggttgcagtgagctcagatggtgccactgcactccagcctgggtgacagagtcagaccctatctcaaaaaaataaaaaataaataaaaaatcagttgaactatatggaaacttctgtacctgtgtcaacggtgcatcttatctaatactatatgatactgtaatctaatattatctctgataattcaaaaatgctaataaactctgctcaaatgtgttagtttttcatacttcatcctatgccaggaaatgttttgaacttcaccaaagctttgctaatgtctccctaccataaggctgtcagctgaaaatagcaaattactgcccgactcccattgaccataatatccattccgcatgatcctagttctttaatttactggaagtctttactgttttgtggtacctactaatcagagactcaaagcctatagatacagaaatgtaacagtaaatctcaacctaaggctaatttgcaaataaaattacaaaatcaacttagaacccaaagactcactaagtgatatgcttttgatgttttgaaggttttaaaaggttataaattccattaaattttagcatac

SEQ ID NO: 216249 - DNA, 819 bp, Homo sapiens
gtatcctcagaggcagggggctgccacctttgcactaagaaggaattactgatttctaccatttgagaaaaggagtgttgaccacatggaactccgaataggttcatgcacatggaacaaagccctttaggagaaaagcccgttttttgctgtctgcctgatactggatggttgagaaacaatcgtggtgggcagtcacgccaacacttgtgcgggcctaggacacaggaaggtttagccctggcctacagggagggtgggcaagcacagcaatcttgtcccccaaaagaacatcagtggccgctggtgccaagacccacgggaaggttagagctctgggttacatttgtggagagagacacagacagcggcagagacagagacgtagtaatccaggctgtgtggcataagaagataaagcggccccccagcccggggcccctcccatggacctcatggtaccgagcctccattttctcatctgttcagtgaggatgaagcctcatctcccagggtttttgcaaagacagggagactggccgggcgccgtggcttacgcctataatcccagcaccttgggaggccgaggcaggcggatcacaaggtcaggagtttgagaccagcctaaccaacatggtgaaaccccgtctctactaaaaatacaaaaattaggcaggcgtggtggcacgcgcctgtaatcccagctactcaggaggctgaggcaggagaatcacttgaacccaggaggcagaggttgcagtgagccgagattgcgccactgcactccagcctgggtgacagagcaagactctcaaaaaa

SEQ ID NO: 216250 - DNA, 467 bp, Homo sapiens
gaattgtgctatgagacagcagtgatgcggaagcaagcatggagccggcctttatggtgaccggatttcggtcctgattttgccactagtgacttggatgggttttaagtcacttccaaccttcccagaccttccttgctttacttacaaaagggtgtagcctttatgatctctgaggcaaggtcccatttaatggtttgggtacatacccggtgacaatttaatgtcacgatgcataggtatgcacagactgatgggatgtctcttccatgtcttgattctccaaaactcacagagtaatgaataacaatttcatagtttagaaaactccgacataggaaatgtcctgtggaatgtgtgaaggccagtgtaatggaattgattctcaaagggacattaatgacacaatggattcagacgaacctggttccattcttacgggttacattacacatggttaaataaaa

SEQ ID NO: 216251 - DNA, 517 bp, Homo sapiens
agttgagcatcccctaatctaaaaatccaaaatgccccaaaatctgaaactttttgatcaccagcatgaagccagcagtctttcaatacgtgtgtatgaatggcaaactgctctcctaccgccgggaatttttaaaaccctatttaaatgcttgtgcatgctgtgagtggtacacatggctgaggttatgatctgttaaaatatgtactagtttgaaatgttttagtgtactcatattaataaaattgccttctatagaaaaaatgaactaaaattatagtgcagattgataaaaattcatttgatattagtatttcatctgatttaaatagaattagaacaagtaaggttatgcctttaacattcttcaagaattttttggcaggcaaatcatagctctttcagaactggaaaacatgctgtaagcagaatctaattggtgaggaaacagtgatttcaaaacaaaattttaaaatggaaaagataccacacaccatcatagtttcatctcaaactg

SEQ ID NO: 216252 - DNA, 403 bp, Homo sapiens
cacagtggctcacgtttgtaatcccagcactttgggaggcccaggcaggcggatcccgaggtcaggagtataagaccagcctggccaacacagtgaaaccccgtttctactaaaagtacacaaattagctgggcatggtggcgggcacctgtaatcccagctactcggaaggctgaagcaggagaatcgcttgaaccgggaggtggcagttgcagtgagctgagattgtgccattgcactccagcttgggcaacagagctagactccttctcaaaaacaaacaaacaaacagacaaaaaatattagcttgtatgtagtcacgcattattataaccaatattaatactgggtcttaaacttaattaggccttcagatttgaaaatctcaatatttctttctact

SEQ ID NO: 216253 - DNA, 823 bp, Homo sapiens
aactcaattaatttggctagtgtggaatcattatttgaataaatactccaaatgtatttctatgtaaatgtgttcattttactgagtaaatcaaattcaacataatatatttggtaacgtgtctctaacagataaggattgctttttaatataatcacaagtcacggtcagatctgacaaagtaacagtttcttacattgtctaatatccagactgtgttcatattgtccctatcatctcgaagtgttgtgcatttggagtatttcaatcgggatccaaaaagatccatgcattgctttggttactatgtctcttcattcttttgcaatcttaacacgtctccctttcctccccttttctcttttatgccatttatttgttgaagaagccctggtgttttgtcttgtagaaatctcctacattctggatttgtccagctgctgtcttgtgatgatgtttaatatgttcttatagccaccttatatcctctaaacaagtaattagagctctactgcttgattagattcgattttttttttttttgcagaatatatcatagaggccagatgcaatggctcacacctataatcccagcactttgggaggcccaggcaggtgatcacttgagcccaagagtttgagaccagcctgggcaacatggcaagaccccatctcttaaaaaaaaaaaattagccagacggggtggcagacacctgtggttccactgtcgttccagctacttgggaggctgaggtgggaggatctcttgagcccaggaggtcgaggctgcagtgagccatgttcatgccactgcacttcagcc

SEQ ID NO: 216254 - DNA, 917 bp, Homo sapiens
tgtgtcaccaagttttatatacacttagattcacttttattgctttttttcttaatggtttaattgtattttaattatataacacatttacagtggttccgacatcaaaactataaataaagacagagaagtgtgtccatttctgccctctcctccactctctccccatcccctaggcgtagtcatttctttattagtccttactttatttttcaaagttacgtaataaatgtctatgtttctaagctatctttagatttgtaaaagggctaaaatgttacttttcttacattgtctaatatccagactgtgttcatattgtccctatcatctcgaagtgttgtgcatttggagtatttcaatcgggatccaaaaagatccatgcattgctttggttactatgtctcttcattcttttgcaatcttaacacgtctccctttcctccccttttctcttttatgccatttatttgttgaagaagccctggtgttttgtcttgtagaaatctcctacattctggatttgtccagctgctgtcttgtgatgatgtttaatatgttcttatagccaccttatatcctctaaacaagtaattagagctctactgcttgattagattcgattttttttttttttgcagaatatatcatagaggccagatgcaatggctcacacctataatcccagcactttgggaggcccaggcaggtgatcacttgagcccaagagtttgagaccagcctgggcaacatggcaagaccccatctcttaaaaaaaaaaaattagccagacggggtggcagacacctgtggttccactgtcgttccagctacttgggaggctgaggtgggaggatctcttgagcccaggaggtcgaggctgcagtgagccatgttcatgccactgcacttcagcc

SEQ ID NO: 216255 - DNA, 504 bp, Homo sapiens
cagtcggctcctgtgcatgagcgttttgaaggacttcggcaagaagccaaagtgacatcattgctgctgttatcagatgggatgaagtccacatgtaagggccctggatttgggctgcttgggtttggatgggggaggggcaggaatctcaccaagagtcttttcttgatacctgagtccacctgacaccgagtgcgtgctcagtaaatatttgtggatatgacccactgaccttggaaatcagctgaatttcagaactgtccgttcattctaaagatagctctttgattctttcactgattaatgagtcaggctccgtctttctaccacctcctgaaatgcccacgctcactaagagtctgcgtgctgcactgccagacacacttcatttggcaaaacttaggttatgagctcacaatgtcaattcaggaaacgcaagatgtatttatctaagagatcttttgcttagactctgtgctaacggtgattctcccaccttgggat

SEQ ID NO: 216256 - DNA, 88 bp, Homo sapiens
ggtcaggaatcttacctctgttctgtattcctggttccccatgtaaagtctggtgttctttgtcctccgataatatttttgtgaccct

SEQ ID NO: 216257 - DNA, 353 bp, Homo sapiens
ccttttaaatatttttacaagataggttctaaaacattacgtttagagtgatcctatgtgataaaaggtacatcttgagcctagaagttcaaggccagtctgggcaacatattgagaccctgtctttacaaaaaaaaaatttaaaaattagctgggcatggtggtgtgtgcctaactatttgagaggctgaggcaggaagattgcttgagcttgggatgtcgagctatagtgagctatgatggcgtcacggcactccagcttagacaacagagtaagacagcaagactctgtctctgtctctcaaaaacaaatgaaaaaaattaaaaacaacaaataaagaaaaatatatgtg

SEQ ID NO: 216258 - DNA, 528 bp, Homo sapiens
aaagcgtagcagcatcaacccaatttatattttcagcatacacttctgaatccatgatttctcctctctgctgtaagtcaacaagcactaagctatgcatagtggtgaatgccaagagttttaggacttaggatcctccctttaaggaacttggcatctagagagaagacaggtttgctgtatgccagaaaatgcaggctgtatttgacacaatgccctagaatcacctgggagatagtttaaatgcatatcctggcccatcttccagagatgcagtgggtgcagtatgtaaaactcaaccatctgcatttttgaaaagtgccccaggtgaccccggtgcagataattcatcatcaagcaataatatggagataattctatgcaatatacatctatatacagggataatatcaacacatttaacagccaatatggtatgggctattggtcaatcgcaatggagaccttagtgtgggggttgggaattccagaggctctctgctgatattaacccctagctgctactca

SEQ ID NO: 216259 - DNA, 420 bp, Homo sapiens
ccaagaagtttatccggcaccagtctgaccgatatgtcaaaattaagcgtaaccggcggaaacccagaggtattgacaacagggttcgtggaaggttcaagggttagatcttgatgcccaacattgattatgggagcaacaagaaaacaaagcacatgctgcccagtggcttccggaaattcctggtccacacgtcaaggagctggaagtgctgctgttgtgcaacaaatcttactgtgctgagatcgctcacaatgtttcctccaagaaccgcaaagccatcgtggaaaagagctgcccagctggccgtcagagtcaccaaccccaatcccaggctgcgcagcaaagaaaatgagtagacagctcatgtgtatgttttctgtttaaataaaactgtaaaaactgcaaacaacaacaaca

SEQ ID NO: 216260 - DNA, 541 bp, Homo sapiens
agacaatagagaggcttcactcaactttcaggtgaatatctttttagagatctgatgacattagataaaacagcaccattcagtaactgggctcaggctactgtctttaaagtccttgagtcgtgatagagctttgttgtaaccagtgacataacaatgtctattgtgtgaggaagcagcttcccttaaaagaagaaccaaactcagggcactggaaagtttttgctgagagtgtttggaaggaagactctcaggtaaggatagttgaacactggtaatgactgccttcccaggggctcagctttcttttggtgttggtccaactgacttccacggccaccatcatgatgggtgtgtgtcgtgtgtgtgtgtgtgtgtgtgtgtgtgtatttaagtaggagagcagggcaagcggcactgctttcattttagaatcttcaagtgaagtggggaaaaaatctgtttttcatttggctcagctgagaaaagaagggaatttcacaaaaactatataaaatattaatggagaaaggaagagaac

SEQ ID NO: 216261 - DNA, 259 bp, Homo sapiens
agcagttcatttggtgaaatttatctaggatgtgttttggtggttcagttcttagcctcatatatcctgctgtgtcctacaaaatgcacattgggaatttaaagtctgtttaacattctgcttttagagtacgtgagccacatcacttgaactgtgaatgaccatttggtggtcttttaattcctgaggatacttcgttcctttgaaataagaaacaatctttaagaggataatttctttgagaaatagtagtaagtgc

SEQ ID NO: 216262 - DNA, 466 bp, Homo sapiens
caaacatgctgtttttaatacaaagcttcattgtaacctgctaataatccaatgtatgggtcaatttcattttcttctctttgcaatcatctcttgaccagaagattgcttaaatgacttctcaaggtccctgctagactctgcaaagtcatgacaatcagtgcaggtgatgtcatcaaattttaatttaggacatatatccatcacattatttcctatttaaaaacttaaaatgatttcccattagccaaatttcttactgtgccatcaaagctctccccacccacccttcacctccctcctcctcttatttccttttgccttctttccaccaactcctcccctgccccatggggctgctttatgcctgagtgcatctgttcacactgctgccccctcagcttgtgctggttcctctgcatcctgcttcatatgcttggcaaacgcctactcatattttaagcct

SEQ ID NO: 216263 - DNA, 452 bp, Homo sapiens
tggagatggtgggctaacagaacactcaaatcttacaggagtttctcatctcattttctaggttggatgcctcagcgtgcattcccaggactttatgagatgatccactgaaggatttcagcaagaacattctggagtgtcaactgatacgtttttcagtctcagcttgctcactgtttgagtagtgtcacatgtacatgcgtgttattagaggcgaatgcacgtttttgttactgagagagtggccctagagcagatgccagcgaactgcagcccacagcccgaatctagcctgccgcctcttttcatgtggctcacaagctagtcatagtattatattttaatagtgtgggaaaacatcagaagaagaacaatattttgtggaacatgaaaattatatgtttacattttagcatccataaacgtggtttcattagaacacacttctatgg

SEQ ID NO: 216264 - DNA, 615 bp, Homo sapiens
acatcaatttaatcaatttgataacccagctttcctatataatataaggaaagtcatgtctcagatatgtcatcatccattttatagaaaagatcgcagtggttacagtcaagcactcaattataaataatacacatattctctgtagaataggtttaaaagcttctgaaagtataaatatattttctaatcaggagggcagaggaaaaaaatattaatccttactagaccaatctccaagattatccgtaaatagataatccctaaatagattagtttgagagcacatgagccagcaggattgccaaatagaccttgcacatgtattttatctatcatcagtacaaaagtggaagcatcttatggagaaaggttatactcttctgggatacttttctttgaaaagtcaaaatttattattctctcttaaaaaagtaattatggtggaaagatcctgtaagagcagtattaattgaaataaaaataagcaacttgaatatccagtaataggtgattgagttgatatattcataaattggaatcatgcttccattaatgtattcatattttaaggagtgtggaaaatgttcatagtaaactaagactataaaacta

SEQ ID NO: 216265 - DNA, 580 bp, Homo sapiens
agtgagatttggactttagatgatcctggttgattgatataggaatggtgcttctcctgagacaggtaaccacaaatttacttctcaggataatgttttaaagtgggtgttctgtttagtttttaaaaatgtttttagtttttaaaactaagtgggttttgaacttttagtttttttttttaatgtttttagttttcccaggcaagcattttcagtagtttagatgaaaaagaaatttcttagtgatttcattgtctttttcaattatattgttgtcatgccttttatataagatcttttataatccaccacccatctattgttttggatagtcaagaacttgtctttgctgtgaaaatttttctcattaaaaatggctaaaaaatacatactttctctgtttttcaaaaatacggcatagaggttttgtttagttttttcatctgatactggatatgtcaagatgaatctatgaacttcaagcaaaacttattgaagctttggtatatgtgagtaatttgttttagagaactggagcctatagcgatataaaaaaatagcaaatgcaaacattttatat

SEQ ID NO: 216266 - DNA, 224 bp, Homo sapiens
agtgagatttggactttagatgatcctggttgattgatataggaatggtgcttctcctgagacagaggttttgtttagttttttcatctgatactggatatgtcaagatgaatctatgaacttcaagcaaaacttattgaagctttggtatatgtgagtaatttgttttagagaactggagcctatagcgatataaaaaaatagcaaatgcaaacattttatat

SEQ ID NO: 216267 - DNA, 528 bp, Homo sapiens
ggggagtaacaatctcgagagtccaactccccaaacccttcagaattcaccttcttcttctataaaattgggtgggttaatttacttctttgagttgttacagttttcttccctgctgaagaaaacacaagatcccttcatggtataagaagggtcattttgtatttttctgcaaccaagccaagctgggtcatacaaccagctcttaagaaccctgctgaatcccagatgactgagcccttcctacacagctgagatagatagacacttccaggtgaggggatttgggaccctgctgcttctagagccagtcatttacaaaaacaaaaaaaactggctctccttagcttctatatagtttctctagtttactttcccactggatctttcccactggattttaggtataatatttgacaaataggcccttgctggatgttgaattttccttcttcctcttcctttagtatttctgatgcatggtgcatgagatatgagatcatagattcttctggattcctcaagagg

SEQ ID NO: 216268 - DNA, 141 bp, Homo sapiens
agattttagagaaattactctcttctggtttttatggcttctcacaagaatcctgctgtaattgtttttgttcttccatgtgtaatgtttcttttatcactagctgctttcagtctctcctctcctcctccagcccccttt

SEQ ID NO: 216269 - DNA, 478 bp, Homo sapiens
ggcagtctcagtttgaagaaagtggtttcttgagatggaatctgttcctggtgaagatgctgtgaacattgttgaaatggcagtaaaggatttagaatattacataaacttagtagataaagcagctgcagggtttgagaagatagtgtcccaatttttaaagaagaaaaatttgagtaaatttgggtaaaatttacccaaaattacctattgtgggtaaaatgctatcagacagcatcacatcctactgtgaaatctttcatgaaaggaagaatcaatcagtgcagcaaactacaattgttgtcttattttaagaaattgccatagccaccgtaacctgcaacagccaccaccctgatcagtcagcagccatcaacgtcagggccagaccctccaccagcaaaaagattatgacttgctgaaggctcaggtgatccttagcatttgttagcaataaagtacttttaaataagttatg

SEQ ID NO: 216270 - DNA, 351 bp, Homo sapiens
caaagcctattgtctttttcgaacattgatcttgactttgatattcctaacatatcttatataatcactgtgttttcctttcagtgcaatgcatttttaagacactcacaaccccctacctgaaggcaagctcaggtgaaaatcgggcatgataggcgataatgagcaggatttggaatgtctaggaagctaatcttgtctgacacgcagttacacgtgtgatggcgttttgcttccctctttctcttactgaggccgctccattcctgtggattagcctgatttccagccacattttaatcttcaattcagtttgaagattaaaatgaaactgctgttaggggcaaaaaa

SEQ ID NO: 216271 - DNA, 547 bp, Homo sapiens
gggattagactggaccaagtttggactagacttgaactaagtttacagtgaaaccagtttgagaggcaagcgggacgcgtatggaggcggactaggtgtgcagaggcaattagatttaggatttaagaaacctggatctggagtcagaaacacgtagattcaatcctagctctgcttcttacgagccccgtgatcccaggcaagttcattttactgagccttatcagtaaaatgctaatgctaatagaactttgctcacagaggtacggtgaggattaaatgaggaaacacttgtagtgtccagtaactttttgttgtaataattgtagttatagtcacatccttcctagcatcagccatgattataacatattattatatattataataattattaagttagtgctaggaaggagatgaccatatttttatatcttatttaattatataatgttgtttaattacatgttatataattatgattaaggttggtactaggaaggaaataacttgagcccgtttcccccacgtggcatctgttcaccga

SEQ ID NO: 216272 - DNA, 784 bp, Homo sapiens
gctctccaccaccaagtaatccttttgccgattgcactctggctgagaattcggtcacccagctacagggaattctatctgttctattccttcagtgtaaaaagagttgccatcccgtctcatttcccctttgaagttctatttaaatgcatggcaaattctagcaatatcttaagattgatttgggtctggatgggagatggtgggtgttgagactcagaaaccctgactgaacacttctcttttcactctttctgggtaagtactgtattttctgtgcccttctgcatctggaaaaagcaactctttaggtaactttaattttcattttgcttagaatcaaaaagcctgcatttttgtgcaggcatgcacatattctgtcaaagtaaagaagctctttttttaagcacttagtgatcaattactttggagttggaggggataaaaaataaatagaacttaaacaaactgctttcatgtaaatgctatgtccatacattgaatttattaatgtaattcattaggatgtcatctaagcatggaagaaaaatggaaagatatgtgaaaatactttaaaaataaatgaaactgaaaaacctaagatcactttgtaaaattgccttaacagtttgttgacaattcacctgcaaatagttcacatttttattgtgcttgccaagctgttttctctgtatatttcattttttcttactagacttttaagatttattatatattcctaaaatctggagtaaaggaataaatattagacagtatcattatt

SEQ ID NO: 216273 - DNA, 435 bp, Homo sapiens
acatctccactgagttcaaccgttatggcatctccaatgagaagcctgaggtcaagattggggtttctgtgaagcagcagtttaccgaggaagaaatatacaaagacagggatagccagatcacagccattgagaagacttttgaggatgcccagaaatcaatctcacagcattacagcaaaccccgagtcacaccggtggaggtcatgcctgtcttcccagactttaagatgtggatcaatccatgtgctcaggtgatctttgactcagacccagcccccaaggacacgagtggtgcagctgcgttggagatgatgtctcaggccatgattaggggcatgatggatgaggaagggaaccagtttgtggcctatttcctgcctgtagaagagacgttgaagaaacgaaagcgggaccaggaggaggagatggact

SEQ ID NO: 216274 - DNA, 1397 bp, Homo sapiens
tgaattagagcaggtcctgaatgtaatgactagcgtccttataagaagagtaaaggaaacagacacaccacaaagacaatgtgaagatggaggtaggctgccccaagcgtggggccaccgaagctggaaggggcaaggaaagattcctagagttttgagaacatggccctgctgacagcttgattttggacttctagcctcctgtactataagagaataagtttgttgcttcaagccactgagtttgtggtaatttttaaagatagccctaggatactaagtacagtaggattgtgtgtcgcctagaggcccttgagaagaatctttccgtgggctcttccagcttctataggcaagctgcattccttagctcctggctcttccttcatcttcaaagccagccatagagcatcttaaaatcttgtttgtctgaatagtattctgttgtcatatctcctctgtgtattaaggacttatgtgattatattaggcccgtctggataatcatggttgatcttcacatctcaagatcttaatcacatctgcaaagtctgttcgttccatgtaaagtaagatattcaagattcctgggattatgacatgtacatcctttggttgggggtgaggggcattattgtacctaccacagacagtttttttaaaagctaaaaatatttgtcatacaacctagcaatcccacttccagttatctaccagaaaaaaaactaaggcgtatgtccacacgcagacttttatgcaatattcatagcagcattataatagtcaagatgcacatacagcccaaatatccatcagctggtgaatgaataaacaaaatgtggtataaactataccaaaatagaatactattcagcaataaaaagatcagactgctgacgtgttaaaacagaggtgaacgtcaaaatcatgccacatgaaagaagcctagtgcaaaagatcacttttcttgtgtgcttccatttatattaaatgtctagtaaaggcacatttgtagaaagagaaagtagatttagtggctgtctaggggtaggaaaggggattgattgcggatgcacctaaggaattttgagactgtaatgagaatgttccaaaactgaattgcaatgatagttgcacaactttatagtaaaaaaatcactgaagtgtgcacttaaaacatggcttttatggtatataaattatacctcaagaaggctgcttaaggagaaagaaatgagggggatttaagaaagagggagttcatacacctaaatgtaaaatgtctagagaaaacataaaaatctttgtgatcttgagttaggcatatttcttgaatacaactcagaaataaatccatgaaataaatttgtcaaaatgtaaaactttcccaaaaacaa

SEQ ID NO: 216275 - DNA, 511 bp, Homo sapiens
ggtcatgcagggcatcagcagggcaaggagtctaggctttattcaacatgcaacaggaagccactgtagagttacagacacggaagtgacatggtccagatatttttccgcagtgtgcaggaatctgccacatagtatctgctgagtaactaccttaatggctgtgacgatgagggtggaggtcagtgggttatgctgctgagtgacacaacctgtagtgctgcaggagcctggaggtagggagggagcatagcatggctgtctgggcagatgagtccagtgagatgggtgggttctgacttcatgaggggaaagaggaggctccacaaccctcatgagggacagagagtagatggggtgggtaagcaccgggccaggagtggtagcagacagctctcgtaagcagcccaaggaaaggctaggaacataggaggtctgaagagggaagcccaaactgccaggtgggctgggaggcatcatcccaaaccagtgatggttcctgagaagactg

SEQ ID NO: 216276 - DNA, 471 bp, Homo sapiens
cagagtctgctctgtcctgagatagaaaagaatcaaaaaggggtctcatggtggggaggagggaattcaagcagaacactcctgtttcccagcagcttcggagccccaggaacatgatgccaacagctccaaacagatagcacgggaggtagggaatccctcgacctgctggtaacatttgacatagtgccttttaggcaaagggaaggtgctctatagagaaagtcgggctgtaatccttccggtcctaaggaaatcactgtgtacactctgcccccaagatgccccttccagatacggaaatcagccctgcttcaatagcacaaaaaactcttcataggggaggagcaaaaccctgttcactcgatgctgaaaaaaggagacgggagagtctgaaacgagactgcaaattctcaagacttcaaaccccttcggtctgggtaatacaaaggaagaataaaatcatctcag

SEQ ID NO: 216277 - DNA, 150 bp, Homo sapiens
tttacctgtagatttccagttctattatatgcctacgtgacctgtcacctcccacagtgtccttacacctgatcagtgatatgtttttttgtgtttgtttttgagacagagtctccctctgtcacccaggctggggtgcaatggcacaat

SEQ ID NO: 216278 - DNA, 409 bp, Homo sapiens
caaggagaactctatgtgataacagagtcagaaattaggatgatgtagctccaagccaaggagccccaaagactgatggccaccaccaaaagctagaaaggagatgaggaagagggttggatgcagtggcccatgcctgtgatgctagcactttaggaagccgggacctgagaatcgctagaggttaggaaatcaagaccagcctggacgacaaggcaagaccctgtccatacaaaaaataaaaataataacagtttaactgggcatggtgtcacatgtctgtagtcatagctactaaggaggttgaggtggaaggatcacttgaagccaggaatttgaggctacagtgacctatgatggtgtcactgcattccagtctgggtaagacagagggagactctgtctcaaa

SEQ ID NO: 216279 - DNA, 94 bp, Homo sapiens
aaacttttggaattactctattacctacatctaagttgcaaatccaaaaataaaactaggattttattaacatattctgcccttcattgcttcc

SEQ ID NO: 216280 - DNA, 372 bp, Homo sapiens
cccatgggggcaggagagcaaaacaatggtgtacaaaatcagacaggcttgaaccccacctgccttcctcccccgctgggcagaagcggtgcacccaggctccacctggctgtaatgcactccctcccttgcagagaggtgcctgaaatggctctgtctgtgccaagaggggtgacaagatctccagagtggcacaggactaaggtgaggacaaaggaggaagacttgggagggtcaagtttattccctccgggttttcaccaataataggataacgctacccttaacccggctatcaagtgagcaccacacaaacatcttgatgttttccctttcaatgtttttctgtaaagaaaaaaatatttctaggta

SEQ ID NO: 216281 - DNA, 227 bp, Homo sapiens
  misc_feature (15)..(15): n is a, c, g, or t
  misc_feature (21)..(21): n is a, c, g, or t
  misc_feature (47)..(47): n is a, c, g, or t
  misc_feature (54)..(54): n is a, c, g, or t
  misc_feature (73)..(74): n is a, c, g, or t
  misc_feature (113)..(113): n is a, c, g, or t
gtctggaagatttanggagcnctaatccataatcgtgccacctatcntctaccntgttttaattttttctccnnaaatctcaaaaaaataattaaggatcacaaatgagcatntccttgccaccactgagtaatccagggagaaaactagggaggcctttagtttcatttctgaacatctatgcactgggtagtgtcccatagggtgaaaccagacaaagggaaaca

SEQ ID NO: 216282 - DNA, 261 bp, Homo sapiens
taagattgtcctggggactctcccaggggctattccatgtgcaaaaaccacatgtccctctcaccactggggaagaatggtgatcaggcaggagtggatgcactcaaagggaaaagtctttctctaggacctggaaatgattgctcggaagtgtaaacagcaaaaaagttagagccctatcgcacagcttgctccaagtttcaaaattaccttctgtccctcctggacttgggaccattatttttccttcagatatgccag

SEQ ID NO: 216283 - DNA, 373 bp, Homo sapiens
tcctggggtgcccgcatgttctatttctcagcataacagatgatcacacaatgtgaatggtaagtatatttctgataacacaaacatggaaaaatattgcaagctaggaaatgtctgatcttctgatagtcatcttttcttaaattttttgaagaaaaaataattttctttaaggagattatgacaaaaagttaataaaaactcatccttcttaccaaaaatcttgatagatttgacaacatcacagtggaaaatatcaccaggctcagtggctcatgcctgtaatcccagcactttgggagagtgaggcaggaggatcacttgagcccaggtgtttggaacgagtctggcaatgtagtgagaccctgtctct

SEQ ID NO: 216284 - DNA, 448 bp, Homo sapiens
tcccacgccagcttgtgtggctgcggagcgggcacatccctggactgagagcgccttgaggaaaagggccgccctcctgtttctgcgattaaggatgcctatgaacggaatctgctgtatcaatggacatttttgtgtttaaaaggagaacgcatctttcttgagcgccaactgtgactcaagcactcacaacaaatcttgtgaagtgatgttacaacagattctaggaagtaagaccctcccttaaggcctggaactttctggtgttgccatgcatattgtagatggcatgtgtgtgaaattttgcatacagtttgtgcgtgtgtgtatttcattcacagtttcctgaagcccaggctaaaaaaattttattaacaatcaagtatcattaatagacgatataatagttcttataaaatatacactgatgttgccatgcccgttccaa

SEQ ID NO: 216285 - DNA, 656 bp, Homo sapiens
  misc_feature (490)..(490): n is a, c, g, or t
cctccaaaggcttccccatctgaccagtttacagttaccaagtctccttctccagggaagagccactcagggcaggatggggggcgggggctcttctgcccactcacagaagcctccctggctgcctgactggggtagctcactctgtcctcagaaagcccaaatcactttgcttggacctcagacatcttgttttgcactagggactttacatctaccctgcaataccataagcttttggaaagcctggaccacatggggaggtgtggcttctaagtccctccgggaccctaccttgccttccctctgggagctccctagcagcctctctaagcagccccgactcccagggtttgcctacattctatgccctcaggaggtgttcagtgccccgagctggggcttggggaggaggggttcctaggaacatatatatgagaaggtgtctcactctgtcacccaggctggagtgtagtggcgcgatcacggntcactgcagccttcaccctccaggcccaagcgattctcctactctgtctctacaaaaatacgaaattacatatcctgccaaaaaaatagaaaaccttcctattacccggccgttaatgccgcatgcctgtagtcccagcttactccggaggcttgaggtggcagcc

SEQ ID NO: 216286 - DNA, 829 bp, Homo sapiens
gtcaataacctagtttctccatgagaaaatttataacaactttttagccaatttatgtcaaattctacagctgtcaatgaaatagtcaaagagttaaatgcctactgataacatttaatttatgacttagttccatatgcatatttgatgtcacattattttaaaaatttatttaatggacatactgccctttcttcccatgttctcatttcatgaaacaatttccttcaaatccttcgcatgtatctttagtatcagtatcctttgtatcatgactttgagttactgtgtttctttaaaaatctttatctcaagaataaaaaagtccaaattccgataataaggaaaattatccaaatttacaccattgaaatcaattataaatggaaactagggcctgtttcactaatctcaggtattaacagctttaactctaataaataaaaatcaagttcattaaggaatgcaaaagtctaaatacctgttagattttcacaagtttttttaaaaaaaatctaaaagtgtgcatatactacattattcaaaataaagcaattaagaaaatattaatgagtgatttttataaatttttacaatactgactctgccttatactctggtaagtatgttacgttatgttaacccaattaattctcatcataatctttgtggcaaacaaagctaataagtactcttagtccaagacaacaacaacaacaaaacactgtattttgttttgaggaacacaaacagaaaaagcaatcaaagtcactaaagcagattaatttctttttttttttttttctccttgagatggagtcttgctctg

SEQ ID NO: 216287 - DNA, 531 bp, Homo sapiens
tactggtaatgatagatgggtctgaagtagtatttataagactgtttgggggaaaaagtatttaagagttagaggattattcagctttttattttatattttgagtgacttttgatgttatatttttgtaatatgtattcatttcaataactaaaatttcaaatttattggcataaagttgtttaaaaatacccttgtctttttttttttttttaatgtcagtggcgtctatagggacacctactttttcattcccaacattgacttttattgtgccttctctttttctgtttgaccagggatctcccagtattactggtaacttcaaagaactaacttatggcattattgatgttctcgctcctgtgattgtttcctatttcatcagtttttaatttattatatcttattaatatttaattattatcttgttcctttctcctctcccctttgattttcagctttccttctttcaaatatatgcatttaaatatgtaaattttccttttagttcaactctttttttttatg

SEQ ID NO: 216288 - DNA, 231 bp, Homo sapiens
ggctgccaggccagacacaaaccctttgggtcccagcccacatttgcaaggtaaacgtgccccttcctataccttctcatctccaccataaaacagcccagggggcctctgtttgttgggtgtaattagctgtttctccctcacttgatcacaattagattccggtttagaagaaagcagccaaaggggtctttgtgctggggcctcttaggctgacctggggtaactgag

SEQ ID NO: 216289 - DNA, 718 bp, Homo sapiens
tgcagtggctcatgcctgtaatcccaacactttgggaggccaaggtggctggattgcttgagaccaagagttcaagaccagcctgggcaacatggcgaaagcccatctctactaaaaatacaaaaattagccagatgtttggtggcgggagcctgtaatcccacctactcgggaggctgaggcataagaatcgcttgaacccaggaagcagaggttgcagtgagccaagatcgcaccactgcactccagcctgggtgacagagtgaaacgctgtcgcaaataaaataaaataataaataagtgaatgaaagatgcagtgggaagagactgagctgagaagccagtcagagatgggttaattataggctgtgtggccctgggcaagtcacttaacctttctgagcccaggtcctttgtctgtgaaggggaataaaaataaccacctctccagggtatgggggaagactggaatgatgtatgggaaacattgaatatgaactacttatacacggcaaatgggaagtaaatttgtatcaccgttattaatgattcagactcacactgcagcccatgcatgacctgtaatcacaagtgtcacacaaaatcacacaattcaagtctacagcttgactctgggagctactggttaataaacaacatggcgatagcctctttaaatacaatggttctcctgtctctccatgcaagcagctttagt

SEQ ID NO: 216290 - DNA, 695 bp, Homo sapiens
ttgaactttatttagtaagaattcttagcaaaattccctcccaggcacacctacatggtgcttcattttcagtgaactacaaatctctgaaacccaaaactgcaatctaaaagtacaagatggctggactcgatggctcatgcctgtaatcccagcacttcgggaggccaaggcaggaggattgcttgagcccagaagttcaagaccagcttgggcaacatggtgaaactttgtctctacaaaaaattagccgagcttcacaaacaatcttacaggagtcattcattaattaactcaacaaatatttatagagtacaggagacactagagatccagcaaaggtcaataacatgtgctgtcttagagaaaacttatattctaagaataatcaagtgacaaacaggagctacatcaaataatcacaagtacacttcagagaattaaaaccagatcaacgtagagaaaggcttccttacattcgatagtcaggaaattctctctctaccaggagggaactgagtgacaaggaacagtcaggtgggagaagggcattccagatgaaccagccctgagcggggaactagaaggccagtttgagaaaaggaatggagagaggaggaacagtttgtggtcaggagtttgagaccagcctggctaacatggcgaaaccccgtttccactaaaccaaaaaaaaa

SEQ ID NO: 216291 - DNA, 611 bp, Homo sapiens
aggtcattaaaggcttttgtcattttaattccttctgaccagccagatggaatatgtatggaaattatgaacatttgtctggaattagactcattctagagcgaagattgactctgacattctcagtggactctgcctcaccaagcaaaccagtttcagagccaagatggcatgattgtttcagcattggcatctcgctccttggtcttctttccatgaaagcctgttgtttccccttcctatgcagctactgtattcatctagggctctgttgggaagggtatcagactgagaactgggagacctgagttcttgggccagctctgtcatctctgggtgtgtgatcttgggcaagtgtcatcccttctctatgcctcagtttctgtctctgtaaaatgaagaggtagagttcatagatggtccccaatcctgcctaaccacctgaaatacctggggagctctaaaacatgcagatttctaggcctcagactcatctctccctgccttcacccttttaccccctcgtctctactcccctgcaaattgtggttttgcatagctaggctagaaacccagaacgtgcattttgtaaaacctcttcaggtaaatca

SEQ ID NO: 216292 - DNA, 528 bp, Homo sapiens
gcacatagcaggattggcagcaattaattgtcagaactgcttaagctgtacacattcttataatgtacacaattaattggctgaactgcttatactgtacacgttccaggacccaatcaacaagcctctgtgctcctcctgccaacaattcagaggttcatggtacagaaagggtgcaatacttaaactaagcaggacaggcttcaccctctttaagttgagaaacgggaatatattgatgacattcctttctacttttggaattgcaaaaggtccacaatatctgcctttggattcaatatatgtatatttccaaaagagtgaaaaatgcagactgacaatccaaatgcctttgcagctctgcaggcaggcaagacaaaagcaatttatgatacaatttctctccactttggatgcagagttgcttgacctaccttagtgaaaacagcacaaactagaaactggtgctgctcgccagtcatccctaattagaatgagatctgcagtgcatacttttctcttcccttc

SEQ ID NO: 216293 - DNA, 363 bp, Homo sapiens
ggatttatttatcaaaatgtcaccacaataattgttacagccagccttgctccttcaaaaccatgctgccttgatagactacagttagttaaaattcctttgctttggttgcttttaaaaaaaaatgtgtgtgttactgtatctcacacaccacagctttaggaaatgttagcaaactgcaaataatctctcactcacataattgtcaagatgtttaaagtcatttccttctacaaatatgtccaaactctgttatcctatccctataaagttatatatcattcaagggcttttaaggaaagtacacaaacctgtattaagcaacaaataaatgccacagaccaggctatgtgctattcatta

SEQ ID NO: 216294 - DNA, 260 bp, Homo sapiens
gtctcctatttcttttcctctgtgtgttggccttaaaaatgtattatataatttgtcttaggccaaaaccatagtttgctttggagctggaggcactgactctgctcagggtaaatgcttctactcatggtcctagataggagagagtgtcggggctacttgctgcacacagcctgacgtgccattctcctttccctttccatgcttcctttgccccccaccattttttttcttttcttcttcccttctcctgtctcttc

SEQ ID NO: 216295 - DNA, 408 bp, Homo sapiens
gtcagtcataaatttttttcagtatgtgtcaataataaaaataaggatgataataacagggaagcatcacaatgaaggaaaaaagtactttcttctaccctgtggatgcatgaagtgaggaatctataggcagacccagcactgctcataactagccctatagccatggccttgggcaagtcaattattctttttggaacatgattttttcatagataatgaaaaggtaggagggtggtgggaaaagggaaaggagcagaaaagataactattgggtactgagcttaatacctgggtgatgaaataatatgtacaacaaacccccatgacacgtgtttacctatgtaacaaattttcacatgtacccctaaacgtaaaataaaagtttaagaaaagacaagagaagat

SEQ ID NO: 216296 - DNA, 322 bp, Homo sapiens
agtgttggatgtttgatttttctggcaaaacttctatatgatcagtgccaaggggctttgtggaatttctttaaaggtcttttgcctttctattgtcactgttttgaacactctatttctcagttactgggagtggggaggcagttgtgaggcatgagtacctgtgaaattggaaaaagttctgagttactgctcgcaagtgactaattatgagaaggctggaggacagcacaaacatctctggagtgtgccatgaaacctattgccttatatttcaatcttccatattgcaagtaggttgataaacatcaggaggcaatta

SEQ ID NO: 216297 - DNA, 440 bp, Homo sapiens
ccatctgtgttcccacaaaagccatgagcccattccatttttatggctgcatagtattccacggtgaatatgtaccagatttttaaatccgatctgtcattggtgggcatttaggttgattccattagacctgataattctttggaatagtagcggagaggaggagatggagtgaggcagacaggcttcagggggatgtagaaagtcagatggccagggctttgggtatggattgggttaggactgaggagcaaagtaggtaccaggcatatctagttggatgaaccatgtattagtctgttttcacactgctataaataactatctgagactgggtcatttataaagaaaagagttttaattgactcacagttctgtatggtgagggaggcctcaggaaacttacagtcatggcagaaggcaaaggggaagcaaggcat

SEQ ID NO: 216298 - DNA, 424 bp, Homo sapiens
cattcccaccagcagtgctgaggattccagtttctccacattcttgtcaacacttgttggctatctgtcctttttgatgttagagggtgtgcagtggtttcactttgcatttcctgatggctaaggatatgcatcttttcatgtacgtattgtccatttgaatagctcctttggagaaatgtctgtttggatcatctgtttctacacactgtataacaatgcaagttagacagcaggggctcaggaataaagccagagtttacagtgtgccaagcaagatgccaatgaatgactctgctgcgtcctcctaaacttattcctgatttaggtccatgcttctttatctccctcctccaccacacacaccctttatttaacagtgctgaggccacaccccctcttgcacactgctggctgatgaatt

SEQ ID NO: 216299 - DNA, 514 bp, Homo sapiens
gcggccgccgcagccgccctacgcgctgcgccgtgaggagcgggttgcggtgtacccagcgggccggcgccgagccgagccgccgcgtccaccgtggggcggggggcgcctgcgaggagggggtgggagccgcggcggcccgaccctccccgcccgcggcgctcccgctcggatgaacctctagtcttgctttgaaaaaatcattctgtgtaactcttgactgtgactaagttcctaatacacctgttgggacgatcactgacaccgtataccatttgagaggtacttttcttgacccaatactggtgattagagaagagaggtatcttggtttttggtttttttctttgatcattatgaacattggcttttcacccctgaagtgaaaatgttgaaaactgagtcttcaggtgaacgaaccactctcagaagtgcctctcctcacaggaatgcatatcgaactgagtttcaggcactgaaaagtacctttgacaaacccaagtcagatggggaa

SEQ ID NO: 216300 - DNA, 504 bp, Homo sapiens
agatttgggaggccgaggcgggcggatcacgaggtcaggagatcgagaccatcccggctaaaacggtgaaaccccgtctctactaaaaatacaaaaaattagccaggtgtagtggcgggcgcctgtagtcccagctacttgggaggctgaggcaggagaatcgcttgaatactggaggcagagatagcagtgagccgagatcgcaccattgcactctagcctgggcgacaagagagaaactccatttcaaaaagaaaaaaaaaaaaaaaaaggaagaaaagaaagaaaagaaaagaaaagaaaagaaataacattggaacaactgaagagaggcatatgggaaaaagaacctcaacccctacctcacacagttcacaaatattaacttaaaataggtaatagacctaaccaaaaaataaaaataaaaattataaaacttctgcaagaaaaaaaaaatcggagaaatcggaatgatattgcctagttctagatcgcgagcggccg

SEQ ID NO: 216301 - DNA, 801 bp, Homo sapiens
attttcttgtgattccctgaacttctttaaaaaaattctaaattatctttcaaaaatcttgtagatcttcaattcttctagttcattattggagttgaactggtttcttttagtagtaccatacttcgttggattttcacaatccttgcatctttatgttgatgcctgcacatttgaagagacagttacctcttctagtttttgcaggtgttccttattggtgtcagacctttactttttagtatcagaacttaaacatggcctgttgtttcttcctgttcagtggatgacttatagtaagtactggaactaaaaccctgcactagaactaattcattgccctgtcattgtttcctgttctgggagaagacttatagtgaacattgaagcataaatgctgttgcaggatgaaatcgctgccctgccattgtttcccaatccagggaagacttacagtgagcaccaaagcttaaacactgccacagaactacattgctgctctaccactgtttcccaaactggggaaaactttagtgggcactggaacttaatcatggctgttagttgtttctatccagggaaggttccatgcaagcacctgggctttgtggaaagcctgggactcaggctatcccacagactgtccccctacagctctatggcatcagccagtctcttcaacgtggtttcccaggtgattggagtactgagtagccacaaagatccacacacctgtcactgcaatcactgacccacttttgttcccaatacactccagttggttcagcccttctggcattt

SEQ ID NO: 216302 - DNA, 573 bp, Homo sapiens
ccccatccacggagcggctccttcagaaagtgattccttttgtcttgtggacacctgggcctcaaggcttctggagtctgggttccaccggggcctcaggtcctgctggggtgtggcagcgtctgcagagccgctgtccgccttggtctgtcctttcactcgaggtcactgcagagccgctgtccgccttggtctgtcctttcactcaaggtcactttgttttaggtgtgtttttcgcaataagcacaatccacttaactggattttttggggacgttttgtctgtttgtgtttttactgatttagctctcgtgacttgtggattccgtccttgtttagtctcgggcatattttcttctattagatcgctgacccagttatttagttctctagctgtaggaccccgtgatgctgcagcagctttgatgtcttctctgcctccgtctttactttctcttccactcctttcctctggattcacagtggttttccaaaacccagcctcaatcattggtgcgtttgtggccttgtctgttgtattcttggctgttaacaaaattttttgtgacttta

SEQ ID NO: 216303 - DNA, 370 bp, Homo sapiens
ctttgtgtttgtgtaaactttgaggtttcttaaaactaccaaagcagtgaggagaagatggcagaaagctgtgtgctgatattctttttcctgtttcttgtttttccctcccccaaaagttgtggaattaattttaagtagaaggaaaagggcagcttgagatgtttaaatttgacttaagttttaactgaagtttgtttgcaaaaagatgaaaacgggttaataactttagagaaagttgatttcatactcctaaggtttggaagccaaataaagaaaacaaaactgtgaagttaacatagtagttttggtttcttatttgtagaataaaggtatgatccagccccatggaccaaggcagcaggaggag

SEQ ID NO: 216304 - DNA, 511 bp, Homo sapiens
agtactaagagactacaagtgtgtgtctacatatatttttaatgtattttcttagggttttgtaggctctaagagtggaatttataaattaacctcttgagaagatagctcagccttatttgaagattcccttctatgtatttatatcatgagctggacttcatacttttgaaataattaatggaaggcatatttttataatgaatccatccatgacaggtagaattatgcaaagcatgaatcaatcatgggtttttcatttgagtatcacaaaatgttaatcataaatacattttgcctctatattgtaatttctaaaaattgcaaaataagtttcttaagtagaaaaatcttaagatgcattctgccattttgggctaactgcctccttattttggagcttgctgtaattgagcatgtgttatttaatgagttatacctctgtcatatgtgtgtgtttatatcacaaaataacttatttttataaaaccatattttgagtcatcatttg

SEQ ID NO: 216305 - DNA, 545 bp, Homo sapiens
ggtaagttgctatttaccatataaatagaagtagtcttcctacctgccaaaatgtgccctatattctgttgcttttctgttatatagatggaccttctgtattcctaagggtgataacttctgtttgtgcattgatcccatgctctatcttcaaagatactactctagcaattcttccctgtgttctttgcataatgaatttacccctctgctagataatttacatcagcatgcaaacgtgctttatattcctcttgttaaatctatcatttcttagcataatattgtccttcatcttctgcacataccttaattcttttcagccagatcctttttaaaaggggtacccacagcctggacaacacagcaagaccccatctacaaaaaataaaaaatttagccaggcatggtgatgtggtacacctctgtagtcccagccacttgaggctgaggcaggaagatcacttgagcccaggagtttgaggctatggtgagctacagttgcactccactccagtctggatggtcaaatgactctgtctctt

SEQ ID NO: 216306 - DNA, 616 bp, Homo sapiens
ggggtttttcagatgctccagtctgtcccgttgatgtgtctgttgttcacaggcgagggctgtgctgcttaaattattacagatttctttaagatgtcgatgccagatgggctggtcctcttttgtattattcccccagaattttcctggctctctttgcttatttcattgttcagtgaactgtagaatcgacttatccgtttaacctaaacaattcagttggtgtttttactggaactgcattcgctttatagatatactcgggaacagatgatgtcttcatgatgttgaatcttctcatccaaaaacacagccatcctgccttttgttcacagggcctgttgtggccctcagtacagtgtggggatggtctcttcctacagacccactcggttctccttcatccctacgtatgtcctcttttttgttgctattataagtgaggtgttttctctcattacagcttctacctcattattttcacactggccgtgaccgctgtgtatgacttttgtacccagttttctttctcaattatcttctttgtggttttcttggattttccaggtttacagtgacatcacctgcaaataaacacttcaccttcggcttttca

SEQ ID NO: 216307 - DNA, 342 bp, Homo sapiens
gagttgagagggtagactgagcccaggtattaggctcagctctctcctgaatcttggctaaactgacagtaagatgagcaagacccccagagaatggagctgggaagcagatggaggagtggtcattgacttcgcagatgggaggctactgcatcctcagttctcagtgaattggaggatggccacccaagtgagggaggccatttgctttattcacttcaccaattcccatgtggatctcctctggaaacagcctcacagacacgcccagaaataatgtttagccatgggcatccctcagcccagtcaagttgacataaaattagccttcacaatttcaga

SEQ ID NO: 216308 - DNA, 506 bp, Homo sapiens
gagatattgaagttcctggtactctctgtgcattcacaccttctgtgagattattttgcagtttatcccagtcattttaggattttagaaccaaaaaagagtgtgatgatttcactttgcatttgtttcagacattgtgaaaatgttagcctgagtacattaacaatagaaagctgacttgacccttgggggctgacctttgaaaaacacatagccagcacttgagacacatggccatatagggattaacagctgtgtgctgaagtagattagtgtttctaatttttagtcattcacgtgctagcttcataatttttggccaaattgttcactaacctgctgtttacttaataaatatcttttctttaaattgtctgttatttgcttgatagttgtcttcagaatgttttacttcttagcttcatcccatgtaattatgggtttgctgtgtgttttgtgtgtgtgcgtgagaaagacatacattaaaataaatattacaaaagttt

SEQ ID NO: 216309 - DNA, 324 bp, Homo sapiens
ctgtggagtgcagtgcaggagctatgatgcaggctcccaggagctacctaccctgtccccgccaggcacccaaggctgcactgcaaacaggcactgccaggctggggccctgggagaggccagcagactgaagcgtgctcaggatctgactgaccctatctcatgcgcaagattactttgcagggttcagctctgatatttcccctaaagacaaagtctcctatgggagcaagttgaccctagggaaatgggtgtccctggccatacaccactaaagatgctcccgcacaaaaccctctgagctctgcactggctggagttctg

SEQ ID NO: 216310 - DNA, 466 bp, Homo sapiens
ccttgtctcaaaaagaaagagagaaagagagaagagagagaaagagaaagaaagaaagaatgaatgagttagctgggtgtgctgatgtgtctgtagtcctagctacttggggctgaggtaggagaattgcttgagcccaagagttcagggctgcaatgagctatgtttgtgccactgtactccagcctggatgacagagcagcaagaccctgtctctaaaaacaaaacaaaactaagaattttaggatgacacaactcagtccatagcaagtgatacctctttgactggaacaaataaccttatgcttcaggtgcaatatctcacacagacactatggccttcgttcactttttaaactagcatttattgaagacaaaactatgtgccaagttttatgccagctgcaggggatatcccgtaccctccaccagtagaggagacagagccagtttcagagaagggtgg

SEQ ID NO: 216311 - DNA, 400 bp, Homo sapiens
aaaaaataaaatattgagatatcatcaagaaatttctacagcttcacattcaaactcttcagcactttcagagctattgatatgcatatgtccacctagtaccatcttgtgtgctttcagaattattggtaaggctgcatttcctgagtgctctaccacacttatgtctggattttttttacccagctacagacccacactcctgcaagatttgatacccttctatttggcaaaactcagtttcacttttctttcagtttaatcacaggtccttagaagatcggacctgtgattctattcaaagtcagaaagagatttctcacaaattgatgtcatattaacatgtcaatatgaaaattattgtttggtaaaccagaagtgacctgtctgaagccctcaa

SEQ ID NO: 216312 - DNA, 324 bp, Homo sapiens
gagatcacgccactgcactccaacctgggcaacagcgagactccgtctcaggaaaaaaaaaaaaaaaagacttaagggacctgtaaaccaaatgcaggtatgaatcttgtttggaacttgatttgaacaactgactaactaaaaaaatgcctttttttttaaacaggcaaaaataaaacatactctgtttattacatgttactaaggaattactggtaattttattgagttggtggtattgtgagttttaaaagtccttatctatttagaagcacttattaatgaattaatatgaggcctaagactctttaaaaaatactcctt

SEQ ID NO: 216313 - DNA, 447 bp, Homo sapiens
ctacaaaagtcccaatttttaagcccacacaaaaaggtttcatttgaatctctgctcatttggaaagggaaaagtccctaggattgcccagcatccccaacaaagcagagtttgctaaattcccatcatttgggaagaggaaccttttttttttttttttttttttttttttgggctgaactatcctccagatctcctgggcgggaggaaaaaaaaatggtcatcagatatgtaggcagatgggctgtgatcaccactggaagctcgaagtatttggggaaactgaaactgtctagggataaagctgccctggtttgtgtgtttctggtttcactgattaaaaaaaaaatccatctaccaagagtggataaattttaaaattctgccatgcccagttttcgaagccccaaatgcgatataggaacagctgtggtgtgaattagttgg

SEQ ID NO: 216314 - DNA, 201 bp, Homo sapiens
agaggccagactctgggtccaagtgctactttatgagtgcacactgggaaatccttgaaaggagatgtaatccagtctctggctctccccattccctccacatgggtctgcaaagaccctccaaactgaggtgcccccgtcagtcagggcatgttggggacactccactgtctgcattctcctgataaagttcaggatggt

SEQ ID NO: 216315 - DNA, 464 bp, Homo sapiens
tgccacctggctgtgattcttggcacaaaccagacaaatatgtgaaaacaactgtgtgaagacactggagaaccaatacaggcaaggagaggtgatgatccctctgaaaagtgtaatagttgagtttccacactgatcttggcctttatcatgagggtattttctagactgctataaggtgaaatcgagccaaacagcaagtttccttttttactagtctgatgtgacaagcatcagaccttgatgttgccagagtcagtaaggcccagggagcaaaatactggggaggatcctattccaggccctaacagaaatctcaagacatggaaacaattggtagcacacatgttctctgaccacattctcaaaggcaattaaaataggtagatgagccacacttccttctaaattaactcacaagttaaattaaaaattataaggcaaattagtgaatatttagaacc

SEQ ID NO: 216316 - DNA, 323 bp, Homo sapiens
gagataatgtttgagttaattgatgagggttttaagcagtaatcaatatttcccaaactagcaaacccagcatgttttagggtcattttcaatgattaaaattaaaatttggttgtttcaaaactttggttgaatgctaaccactggaggcctggtgttggatgaacagagcatactgggatgctaaaaaatattaagtgcaaatcccatctttgtctgaaattggtttttgtataattcctgttttaggaaattgtgaaatcatgtaagacagttttcactataaattattttcaaaagtctttgtgctaaatgatcaggca

SEQ ID NO: 216317 - DNA, 158 bp, Homo sapiens
cctgtggatggaaaacagaaggctgtgagcatccatggtcattttcccctttttttcacagttgtagcccagactgtattaggtaaggccaggtaagatcagcaaattgtctcagcatttagctagtggaataaacacttttcagataaacctctcca

SEQ ID NO: 216318 - DNA, 277 bp, Homo sapiens
tttgaaagcagctgtcttttgaaatgagcagagacaaagtagatgacctttctctgtctttgacatttgtcacttcttatagtgtttcagatgaaatgagaaatctgttgaaaatgtgtatttgcagcagagctaaagaatctttcattgctgggttttttgttgtttttgttgttgtttgtttttgagactccgtctcactctgttgcccaggctggaatgcagtggtacgatcttggctcactgcaacctccacctgccgggttcaagtgattct

SEQ ID NO: 216319 - DNA, 312 bp, Homo sapiens
ttctgcgttctcctcggttggtgtcatatcactgcatggacagcaggtgtgtgaaggtttgtgtcatccaccgagtctgccctgactgaactggtcacatccgcggatggccgtggtgacctcttctgagctctgatctgctattgtggatgtctttgtacaagaggaagtgactgtcctgatgggagtggtgagctgctgcaggagtgactgacagtgactgcttgttctccatcccccaggagtgactgacagtgaccgcttgttctgcatcccccaggagtgactgtgactgcttgttctccatccccc

SEQ ID NO: 216320 - DNA, 236 bp, Homo sapiens
caggaagatctcttgagcccaggagtttgagaccagcctgggcaatgtgatgagacctccatctctacaaaaataaaagaaaattagccaggtatggtggcacgtacctcctgtagtcccagctacttgggaggctgagggctgaagtgagaggatcattgcctgggagcaatggctgcagcgagccacgatcacaccagtactttccagcctggaacagagcgagaccctatctc

SEQ ID NO: 216321 - DNA, 479 bp, Homo sapiens
atctttttaatgactcttgtattttaaacctaaaattttgattaagcttcacttaatattaaaaaagatagtataggtcacgatgttatttgatgcaaacgttggaaagacagaatcttcttgatccaagagcttttagaattcaaagtctgattctggttattactctgctcatttaagatagtgaaatgaacatttacattctggcaacctcagaagtacaatgaacaaaggacaccagccaggtagggcaaaggcctgtgcacccccttttgctgttacatgtttatcagatgcgtgctctgtttctgttatattacattacttttctcttcaatgtttactgaggaagaacaagtagctcctcaggcaaatcaactgttaactttgcagtttttatttaatctcccaggaatgtaacccttaactttaaagaatgtagtgaccataaaacttataaagcatgtttcttaaggaaa

SEQ ID NO: 216322 - DNA, 370 bp, Homo sapiens
aagtggtgtgctcaaggccaaactcctaattagaggtgggaccagagctaggtcccaggtcccctaacttgcagcccagggccctctcactgtactggggtgtattcatctcatttcgatatgggaacacagatgtgtcagaatgaggaagttactttccaatgcactgtgcagttatgttagccatgctatttctccatcctagctgaagtcccaccaccatagaccctgacactccactgtccccatgtcctagatcaccacgtagtgtgcttattctgcttcatagtctcatactcagcagtcccagcccaccacatactccttctctccctttacagtttccctggtcactcacttcttgtagtcc

SEQ ID NO: 216323 - DNA, 533 bp, Homo sapiens
tatatttgctgactccctaaaatctatgttcacttgaatcttacactgactttgtacccaggagagtgaaatattttaatcatgctcattttacagataagaacactcaggtttggaaaggaaaagtgagctgcttaaggtcagagtataagcagggcctcagggcacaggtcctactaagggaagaacccaaatcagaactcaaatgagtgcttctttctcctcgggtgatgctatggttggaacatgtacccctaaaagcatgtgttgaaaacttaatcctcaatgcagcagtgttgggaggtggggcctatcgggagatgcttaggtcatgagggctctgcccttacgagttgattaacatcaattagggtttgaggttgcaagttctatctcttgctctctttctctccctctctttgcccttctaccatggcatgatacagcatgaagacctttgccagatgctagtcctcaatcttggacttcccagctccagaatcatgagccattaaatttctgtttattataaa

SEQ ID NO: 216324 - DNA, 318 bp, Homo sapiens
ttatagattagatataatagactatagattagataatagtaaggtttcctgattttgataactgtagcatgcaggccagaactagggcgagacaacagaggctcctagggtacaaagttgaaggaagccctcttgaagggccactcacgctcaggccttgttagcctccatctagttctagccctggtgttgtcgttatgtaggaaaatgtccttgttttcagagctacacactgaagtattgagggtaaagacatgccagtatatgcaattaactctccaagaattcaggaataatcatcatacataggtagagcga

SEQ ID NO: 216325 - DNA, 556 bp, Homo sapiens
aaactatcaatgctgaagacttaaggcctcttaagaataccctttttgcaagaggggatggaaacatctctggccccaactccgacaggaaagcctggttttagcattgaaaagatgaggcctgattgttgatttctttcacgtgtgtgtggaattaacatcttctatccctttcaatgttgaattaacttagtgacgaactcattaaggactccttatcaaggctttccctcctttctataattttatccattgtcagctttgacagaaatcccactgaaggtttgtcaaagagccattgaagagttctaagtggtcttgcttgcagagggcaactgcacttgacctctatttatactttttgtagtactcttgcctggactcagagatgcaactgggattgaaattatatttaccaaacatcaacatattgatgttagaccttaaaagaagaaaacgtaaaacagcatacagtctttttgcagtaaacagtaaactcaggaaatttttattcattgattccttccttcaacaaaattatggttaagaatacctg

SEQ ID NO: 216326 - DNA, 551 bp, Homo sapiens
aatgggaaaaaaaagtttaaacaattgaaatgggtatatttcttctgtggtctagtaaatgaaactttaattttatgtttactccatgaatgttaaaattaactgagtctagagggcccaccaggcagtattccagactaggggctctcaaaatttggcccaccagtcagcagcattggcatcacttgggaacttgttggttcttggaccccattttgcacctattgaatcagaaggtctgaggatggggcgcagcttaacaagtttcccatttgactgatgcatgctaaagtgtgacaagtgctaggtttatctctagtattttgaccttctactagcagtcagcctctactttactttccagagtctagagacatgtgtttatttttgatgcctagagaaatggtgaggagttctctaatgtagaatgtacatacagttacaaatgtctgtggtattcttgcttaaagtcaagtctgttttgcaggcctctgctctgcctcctgaggcaggttttcagagagaaaactttagagaatatatgaaattta

SEQ ID NO: 216327 - DNA, 417 bp, Homo sapiens
cgccaggttacattctaggctccagtctgggtcctggccaatctacagacacctccaggacagggcctttgcttctacctgaagacacagtacaaattttagagcaagaataccacggttcaatgccaggtgcagtggctcataactgtaatcccagcactttgggaggctgaggcaggcagatcacgtgaggccaggagttcaagaccagcctggccaatacgatgaaaccctgtctctactaaaactacaaaaattagccgggcgtggtggcatgcacctgtagtcccagctacttgggggactgaggccagagaattacttgaactcaggaggcagacgttgcagtgagctgagatcacaccactgcactccagcctgggtgacggagagagactccttctcaaaaaacaaaaa

SEQ ID NO: 216328 - DNA, 534 bp, Homo sapiens
taagctttttaaaaatgtcagttttcccaaaaggatgtgatcatttttttccacatagaaaaggagatgtttatacatcctaggtctgaatgtctacactcttcgactgctaatacagataagaaccgaccatttgtagtgtggccatttgaagacatgctccttaattcgaagtagtaaaaaagataaaccacaaagcagtgtgccttcttttccttaaaggaacaacttattggccgggtgcggtggctcaggcctgtaatcctagcactttgggaggtcgagatgggcggattgcctgagctcaggagtttgagaccagcctgggcaacatggtgaaaccccgtctttactaaaatacaaaaaaacaaaacaaaaaaaaaaacggccggatgtggtggcgggcgcctgtaatcccagctacgcgggaggctgaggcgtgagaattgcttgaacccgggagtcggaggttgcagtgagccaagaccatgccactgcactccagcctgggcaagaaagtgaaactctgtcgtc

SEQ ID NO: 216329 - DNA, 667 bp, Homo sapiens
agcattttaagtaaaatttattttcttcacaattagaaaacatgaaaaggcatatacaatgcctttggtgttttgaatttaagaatcaatgtctgagggacttttgtgtgtgaaaataaatattcatatacatttttagttgtttaatgtttgatgtattacactgctttctattaaacaaaactttaaaaactgattttcttgtgtatctaaatctgggttataaatttggttagcttaactcctgtaacaaatataatgtttatttataacttgtatttggttgattcttttggaaaactaggaatacaataacatttagataaaatatttataaatacaatgattacaatatatgttaaccttatatcacatccagttaaaaacgtgctgataacatggatttaatttcttagtcaagtcacaagggctgggtggtctctcatcttgatggctcccggtgagccctggaacatggcggtgtggtccaaggcaatttaaacctgtgccacagattattcagctgagtcctttttgcaatagagttttaagaccctctttcatttaaatttaaatttttgaaacttagtgtccttcctaaaaataaaatgaaatgaagtttcctaaagtgttgtattattagtactatctaagtcatcatcctggt

SEQ ID NO: 216330 - DNA, 863 bp, Homo sapiens
catggccgggcgcggtggttcacgcctgtaatcctagcactttgggaggccggggcgggtggatcacgaggtcaggagatcgagaccatcctggctaacatggtgaaaccccgtctctactaaaaatacaaaaaattagccgggtgtggtggcgggcgcctgtagtcccagctactcgggaggctgaggcaagagaatggcatgaaccagggaggcagagcttgcagtgagccgagatcgtgccactgcactccagcctgggcgacagagccagactctgcttaaaaataaataaataaataaataaataaataaatattcatatacatttttagttgtttaatgtttgatgtattacactgctttctattaaacaaaactttaaaaactgattttcttgtgtatctaaatctgggttataaatttggttagcttaactcctgtaacaaatataatgtttatttataacttgtatttggttgattcttttggaaaactaggaatacaataacatttagataaaatatttataaatacaatgattacaatatatgttaaccttatatcacatccagttaaaaacgtgctgataacatggatttaatttcttagtcaagtcacaagggctgggtggtctctcatcttgatggctcccggtgagccctggaacatggcggtgtggtccaaggcaatttaaacctgtgccacagattattcagctgagtcctttttgcaatagagttttaagaccctctttcatttaaatttaaatttttgaaacttagtgtccttcctaaaaataaaatgaaatgaagtttcctaaagtgttgtattattagtactatctaagtcatcatcctggt

SEQ ID NO: 216331 - DNA, 403 bp, Homo sapiens
tgactattttacattgaaacataaagtaactattgtttgtgcgtgccttcccttcacataaatcaatcctatttataaaccctttcacttatatagcctcatttaacctgattttcatccttctcagagaagttgttgaagaaaagtcacgtgtgtcaaattcaaatcaaaaccacaatcagtcctccttcccaaaattctttgcgtttcccaggttcaaactctttactagtttcttttcatctaacactccagcaagaaaatctgcaagatttgcataagcgttccctggagcagagctctatcctgatagaagactgaagaatttctccctgtcaatctttacataaatctggcaattcacaggaattgtacatgtaatattaaagcaagttttctaaag

SEQ ID NO: 216332 - DNA, 395 bp, Homo sapiens
ggccaccgaacaccagtgcagtagccaggatgggcctgtggctctggctgcagcctccagggacaccagctggagagaaggaagccacgcatggagagcggccaggctcaaaatatcttaaagaaaatggaactcggagtcagtcatctgttctcaacgtggtcatctcaaaaatatgagcacacggaagttttcttccttcttgtcagttttgagtccaatatcaatactgttgtcctgtgaaagattttaagatttaaatgttttttcatgtaatttcctgatgtcttgattgttgcttctattttgttcatcaaaaccaaacagagtggaggttgctctggggctggatggatggccagtcattaaaatcaatgccttattagtctgcctta

SEQ ID NO: 216333 - DNA, 447 bp, Homo sapiens
cccggcaccacgcgcggctaattttttttttgtatttttagtagagacggggtttcactgtgttagccaggatggtctcgatctcctgacctcgtgatctgcctgcctcggcctcccaaagtgctgggattacaggcgtgagccaccgcgcccggcctaatttttgaacattttgtagatctcactaggttgcctaggcttgtctcagattcttggcctcccaaattgctgggattacagatgtgagctaccagccaagccgtaaatttcttttaaactgagatacagcaccccaaaatatttcaatttgtttcatctacatttggtagcatggtgcttagggaggaatatcaactttaatttcccaggtttaaaaaaattgtttaagtgtcagaacatgatgtttgttcaaactcatgtttccatgtatttgtttatttttttcat

SEQ ID NO: 216334 - DNA, 420 bp, Homo sapiens
actcccagtagttaaatctgcacagaccaggtgaacggacccatgcacgagaaggaacagaaagtacgtttctactgcaaattggactgaggataatttcctacttaaaagattctattaaggatccaagagataaccacagcctcaatttcttcctataaatattcctaaaaaggaggtaaggagtaagggaagccccagaaaagtgtgagtctgtgtgggaggacactccgagtaggggtacatttcatcacttgccagaggaacacagtcaatttcaggaagatacaaggaataacaatgtatttcccccaaatcatcattaaccagtattttggccacacttcctacaaaaacctgaaattagctaaaaccaccctgctgttttcattgcactcaacaagccccagagtagttacc

SEQ ID NO: 216335 - DNA, 514 bp, Homo sapiens
ttcattgtcacctcacctgagttaaattgttgccaaaaagactatgccagggttgccagctcgcgctccggccagtggagaaggtggacactgaccgacgtttccatggcaggtcgtctgcagggcctggagacctggcctaggtcctcccggggcctgccggaccacatgttgcacatgggcctggtgtccgttgcaggtctggggggtgatggagctgtggaggtcacggaattaactgtgtgggctccaggccccttggcactgtgggtgtgggtcttgggagatgctgggatttggtcgtctgtgccccccaactacgtggacactctgggccctcagagattgtagctggatcagaaaagaggcagcctggaagtcaggctgttcataagcaagtcagtcaccggggcctggtagatgacaaagacaggagaatccaggggtcaccggggcctggtagatgacagagacgggagaatccaggggtcaccggggcctgctggacgacaga

SEQ ID NO: 216336 - DNA, 381 bp, Homo sapiens
ctgtgcagaggaaccaaagatggataccacatgtggctttggggaggactagtgtaaagtctaccaatgtccaaggcatggccttggtagaaagaggaccactactgctactcactgaccaagtagtcctctggagtggaccaggatcttctagccttcaaaaaccctttataacccccaaacagcaccttcatcctgtcatccaggctcaaggagaaaccacagagcttgcaggaagaagaggccatgtgagtagagagtgagaactcggctgcctatgagcccatacgaagaagcctcaggatgaaagctacctgaccaacaccttgattttggactcttctagaacacgggaaataaatttttgttgttttataagct

SEQ ID NO: 216337 - DNA, 461 bp, Homo sapiens
acaatagagcaatcaactaacaattagtagagcttaacaactgggtgtggtcagggaaaaagatggtcaaatagagaccttcccagaccactgtcatctcagggcgactggggcatatccaaggctgcatcccctaagaagcaacatcagaggccacatgcttaggagaggaagagggtggaatagactatgctaaaataatccatccagaccagctgtggttgttcatgcctgtaatcccagcactttgggaggctgaggaggaggatctgcttaaactcacctgggcaacacagagagaccctgtctctatagaaaaaaaaaaaaaaaaggaaagaaaaaaggttatccaggtgtggtggtgcatgcctatggttccagctacttgggaggctgacttgggaggatcacttgagccagggaggttgaggctgacgtgagctatgattgcaccactgcac

SEQ ID NO: 216338 - DNA, 472 bp, Homo sapiens
caaggtccttttattaaaaatccaaatgtgaaactcctgtccatctatgggtaatgaaaataaaagtttcatgaaataatatttacccttaatatatgtgatatacttttatattgctatcctagtctatgcatatttgatgttttttaatagtggtcgagccctactaaattgataaaatgacttgttcatagatttttaaatcacaagttgaaagaaactgtttagttaacttgacaagctatcttgatgttgtgtatcactaggtaactgtaaacagtgtagattgtatttactgcccctggaaaaaaatgcctggattttatcattacttcctaaaaccagattaactaatttttattttaatcgtatgttattatttaataattaaatacattaggtatcacattatgttattacccaagccaccaatttgtagaaaggaatattaaatttgttttttaaattcaaa

SEQ ID NO: 216339 - DNA, 488 bp, Homo sapiens
cttttattatttttttatcttatagcttatgcattgagtatagggaactaatgaaaactcatttgtggcttaagcacattgagttcttgaagttttcagagttttgaaacaacttggacttcggagttgtaaaacagaaactacaattttgtttataaattctgttttcagactttctttagaaataagatgacagagagttaaatgatttgaagaggatgggagtgggaagaatggagcagaaagaaaagaatttaaatgagtcacttttgtagcttttggataaatcattcaggtttttttttaacggttaatttagtcttgtagtctggaccatttaaaaaaggaaataggtaattatcattttaaagaaatacaattatttgccatctatcttaaaatacatgtagaccgataatttaaaaatattttactcttaaaatgtactcaaatgatgtaagaacaataaagaagaatttgtttaccct

SEQ ID NO: 216340 - DNA, 472 bp, Homo sapiens
taaaaaatttgaattaacctggaggaagaatggtcagagtggtatcattgttgataataaatagccctacttaattaaacatgcaattttaaaaacagctcttttgtgattaaagttccccattctacatgaagtcttctagaaattcttgaagaaatatgagtaatttcttcttgacatcatgcctccaaataagatagctcaggacacaattttctgtcaccattcccttactttcccaaaaattcaggaaatgttttctgagatccctccttgcacaaggcactcagctagcaagacattcttggacttgctcagtgcttgtttagtagttccttgtgtatatttacttcaatgtactctcatattttgaacttctggagaaaatatgtctgccctcattgcacatttcccaccctaaaatcaggctaataaaaataactcaataaatgctcttagcgaaaagcaaact

SEQ ID NO: 216341 - DNA, 472 bp, Homo sapiens
ttgtgaatgcactgtacttgaaatgaaatggcatacatacacacgtcctttatcttagagcccttgttagaaaatgaattggagctccaattctgccaatgtgtttcactctcttctcacacggtactcagttggctgaagacgcagtgttattgtcccgacttaagaatatgcaaaaataggccaggtgcagtggctcatgcctgtaatcccagcactttgggaggccgaggcaggcagattgcctgagctcaggagttcgcaaccagcctgggcaacaaggtgaaaccttgtctctactaaaatacaaaaaaaattagccaggcatggtggcatgtgcctgtagtaccagctacttgggaggctgaggcaagagaactgcttgaacccaggaggcagaagtttcagtgagccaagatcgcaccactgcactccagcctgggggacagagtgagactccgccttaaaaaaa

SEQ ID NO: 216342 - DNA, 384 bp, Homo sapiens
attaagatttttttttattattggcactgtagttgcaaatattaaagttattatttggtatttcatgagtatacccatcacgctgattttctaaatagtaagttttagtatgctagaagctgatgctgcagaattgcctcaggatgactctggggcaatgttttgtattttgaagtacatcacccaccatggggccccaagtctgacttagaacactctgaaattccaagtatttcaatatttttttccactcccttctttccataaatagctgggattgacctaatcctagcccaggaagaagggaaaggagctaatttaatggaatcaaatgtttaatgtaaagttttgctttatacggaacatggtaacaagtattaagaa

SEQ ID NO: 216343 - DNA, 163 bp, Homo sapiens
ctaagaagattctgagataactcttgtaaatagttttgacatcttaacagggtggcatgaaagcattgaccagctggcacataaaaaccagtctgtatctttaatgtcattcctagagaaaaattctacattctttcccaattttcttagcttttcagaaaag

SEQ ID NO: 216344 - DNA, 525 bp, Homo sapiens
ggaagggagggaagtagattctctttttgggagtgtgagtgaagaaatctgccagtctgcagtggagaggaagccacgatacttcactggggccatgaggagccagaggtgagcaggccaaagggaagcaggaacaggagatgcgaggaaagaacagcatgtggacagtggaaccacgttcctacaagttcaagaatcagtaactgatggaaattcccgtggctcactcctgtaatcccagcaatttgggaggctgaggcaggcaattgcttgagcccaggagttcgaggccagcccgggcaacatggagaaactctgtctctacaaaaactacaaaaattagctgggcatggtggcatgtgcctgcagacccagctacttgggaggctgaggtgggaggatcacttgagcccagggaggttgaggctgcagtgagccaagatcacgccactgctctccagcctgggcaacagagtaagaccctgtctcagaaaaataaaagaaaatttgagtttgcagaaacca

SEQ ID NO: 216345 - DNA, 304 bp, Homo sapiens
gggtggacattggtggttggggtcggtgaggaagggttcccaagatgagctttggccaggtgaggtggcttacactgaggcgggaggatcgcttgagcccagaagttcgagaccaacctgggcagcaaaaccctgtctctactaaaaatacaaaaactagctggctgtggtaacaagtgcctgtggcctcagctactctggaggctgaggtaggaagattgcttgggtccaggaggtcgaggttgcagtgagctaagatcacgccactgcactccagatgggcaacagagcaagactctgtctc

SEQ ID NO: 216346 - DNA, 369 bp, Homo sapiens
ttttacttttatagttttctgattttacattttttactttatagatatacagtatcacctgcagtaataataacttattatttctaatattcacacgttgtagttagttatcttgtctaattcattggctagtacttccaggacaatgttaaataatagtattgatattttcctggtatttttctgtaagggtagatgggacaacattttaaagggaggccgggcatggtggctcacacctataatcccagaacttgaagctcaggcaggtggattgaagaatcacttgagcctgggtggtggacgttgcagtgagccaagatcgcaccactgcattctagcttgggctacaaagtgagactccatctc

SEQ ID NO: 216347 - DNA, 512 bp, Homo sapiens
agctgaattctttgccttgtagaggattcaccatgggtttgtttgagcagtgggctcctctgatcatgttagcacatgatttgatttatgaaattttgatcagcatgcaacttttcatctcatttccaaattgagtcacccatatagacaatcaattggtctttcacattagtgacaaatagaaattgatgactttctccttcatctgtcacctagggggggaatatagaaggatttctaggacataaatctctcccctggtaagcaccttagggaggctgtgtctttcttattcatgtctgtatttccagagtctagcactgtgcttggcccacagtagtgggcttagtaaatgtttgctaaatgaattcactgtggcaagatctgaattttgagctgacccgtcagtttgcaaacttctcttcccccaggaattggtcaaggtttaaaaatgccaaccaatgttattgtcagcccataaaatacataattaggagagtaaatattttacc

SEQ ID NO: 216348 - DNA, 401 bp, Homo sapiens
aataagtgcctctgtctttgaaaatataactgttcttttttcctttcaggacatattttctccctttatgacccaatgcagagcgagacgataactaattattgttaaatagatttatgcacgtgtttggagagtcagggaaggagggctgatgagagagagaggctcctaaattctgcaggtgctgtaattccccggttttaattttgctttgctttttaccaataaatcattttgagagcttaaatcgctcctttcgggacatacggtgtttcttgagcaggaagggacgtcaacggttaaagctcttgttgttggtgcaacaatcagccacgatgaggctgcttggcatggaacacagtgtcccatccttagattaaatgcgctctaacaggattatg

SEQ ID NO: 216349 - DNA, 229 bp, Homo sapiens
gagttctgtttgctcagagagcttatttttaatgatgataataagaaggaaaatttcctagcccttactatatgacaggtaccattcgaagcatgttacatgcattgtctcttttaattcacacagcaattctgaggttgttagtttttattactatacccatctaacagataggagatgaagatctagttaaaacaagcaacaaaataaaaatttgcctaaggccgta

SEQ ID NO: 216350 - DNA, 368 bp, Homo sapiens
gtgattttcatgtggctcaggtctggatagcactgcacaatgtcggaatctccacaggtggggctagccagacgtgtgttgaagaggttcctttagtgattctggggcaagtctctgcctgaaaaaccaccggttcagagaaatagttctcagccgagccaccctgtaaatcatctggggcctaaatacaataaacacagaaaacagtgaactataaatgggtagcatgagggattcgaggaggtggctgaaagaagcacgtatcctgatggcatggttgcgggttatatgactccatgctctgcaagtcagaactcatagaactgcacacaaaaatgagcgaatttcactgtaggtaaatttaaaaa

SEQ ID NO: 216351 - DNA, 421 bp, Homo sapiens
caggttcaggagtggcatgttcttgtgtttgtaaagctagttagtggcagagccaggatgggaagccaagggcctctttcttttctctttgttttgagagagagtgttgctctgtcacccaggcttgagtacagtgacacaatcatagctcaatgcagccttgaactcctgggctcaagtgatcctcctgcctcagcctcctgagtagctgggtccacaggtgcatgctactacacctggctcattttatttatttttgtagggactggctttcactatgttgcccaggctggtctcgacctcctggcctcaagtggtccttctaccttggcctcccaaagtgttgggattacaggcatgagccactgcacccagcccatatcactctcctctcctgtctcatctccactctgttattgag

SEQ ID NO: 216352 - DNA, 668 bp, Homo sapiens
atttgcagatgggagtattatggggggtagaggaggtgatagcttgcaagaaaaaaattaggttgccatttcatattcagaaaactagaatcatttatttcatcttaactcagtaaaaatgacccttcattttagtttgaatcaccaaattccagctatgtaagaagttattattcactcagtgaaatacacttaaacttagttgcctgaggcatattaaataatggtttttgttagtactcttaacttttcttaagtttggaagatgaaagtttagtaaaagttccattttcctcatttgatcatataatttgatactttgggaatcatatagtttagtggttaagagcaagggctctggagtgaaacagacctgagctgaacacctggctctgacatcaggtctagctgtggaatgttgtgactctaaacttaagtattcttactggtaaaaataaagatgtgaaaattaaatattatgcacataaagcacatagcacataaatgctcaggagatagcagcagccatcatcaaactcaccattatcaatcctgtaatttcttttattcctagcatattttttaagtttagaaacactgatagtggtccagatgtggtggctcatgcctgtaatccctacactttgggaggccaaggtgcgtggatc

SEQ ID NO: 216353 - DNA, 601 bp, Homo sapiens
gacatcccaaagtgttgggattacaggtatgagccactgcacctggcctacattcaatttttttaatactaatataacacttttaggagaggggtattagaaaatcaaatcaatagcaattcataaataaagagttggaaatcactgaccttaccagaaggactatgctggagacatttccaaagaaggttttgctcttctctgagagaggagatcttcagaaatacacatttagagactagatatacaaattggctgtttgatggtctttatttaaagtgtataaagagaaattaaactcttcaacctaattgagaaataaatgtgcttagaaacgtccaaaacatgaaaatacatggcatgggcaatacatagcaaggatatgtaacaagagaagtgagttgttttcactacttgtatctaccttttatttgttttcatttattatttctgtgtatgtgcttttaaaaaataccttacgtaggccaaagtgctgggattacaggcatgagccactgtgcctagccacttatttgatattgtctattttgctgtggtaacagatatttgagagaacaatttctggttttgttgacctaat

SEQ ID NO: 216354 - DNA, 510 bp, Homo sapiens
tctcctttactcaataaacacgaagggagcaaaaagctcagggcccttgttcactagaagcaaggagccccctgacctcttcttccaaatatactattttatctttatctttattcccacattcgtccctctttgttcagtgcaacagggattggggctgcatcatatctctttaatatactgattgcttttcttttggatatataccagcagtgggattgctggattataaggtaattctatttttagctttttgaggaatctctttactgttctctgtagtaagatacattcctaccaacagtatataagggttcctcattctccacatcttcaccagcatctgttattacctgtctctcagataaaatccagtttaactggggtgagatgatatcttactgtagttttgatttgcatttctctgatgattagtaatgttgaggactttttaatatactggttggtcacttgtatatcttcccttaataaatgtttattcaaacccac

SEQ ID NO: 216355 - DNA, 437 bp, Homo sapiens
tgacatttctaatactttagacgccaacgtttagcccaggagtacaggaagcaacttcagatgcaaatcgcctaccagcagcagtcccaagaagcagagaaggaagagaaacgccgagagtttgaagcaggtgtagcagcaaacaagatgtgtttggacaaggtccaggaggtcctgtccacccatcaagtgctgcctcaaaacattcatcccatgcgcaaggcatgccccagtaagcttccaccgtagttccgtgagcatcaatatatcttttcttggtcttttaatatttttaactacagtatgcttgtatgcttcttttaactcctggataaacttttcttttttccctgagtttgtgtaattaattgaacataattttcttcctttgaataaacctgtgcctattttggagttcacagacttacaaatccaaa

SEQ ID NO: 216356 - DNA, 346 bp, Homo sapiens
actgattggaaaagtcttctccatgtgttcacagaccattgattttgtgtacaagaactcagattaaaatttccctccgaaatgttagttttggctaggtgcggtgactcatgcctgtaatcccaaagctttgggaggccaggagtttgagaccagcctgggcaacatagcgtctctacaaacaattgttaataattaaccaggcatggtagtgcacacctgtaagtcccagctactcaggaggctgagacaggaggattgcttgagcccaggaattcaaggctgcagtgagccatgatcatgccactgccctctagtctgggtgacagagtgagaccttttctca

SEQ ID NO: 216357 - DNA, 446 bp, Homo sapiens
tacctctcaaatgttcctaaggtaatatctcaggttcctaaagcaatatctttgttttagttggaatacttcctaattttaggaaaacatagtgttaaattttcataagccaaattttgtaagccgtatttattctaagaaaataactgcatgtgacacaaagctgtatatatataaggagactgaggaagagtttttcagtggattgtttagctgtgttaaatgcctctgagatgtcagataagtcaataacataatatactgttcttagctacatggaggtacttggtaacctaaggttcctgaattaacaggagttgatgggatatatagcataagtggagggattagtttttgattggagggcacatactcttctgactcaggagggaaatttataacggagggtccatatgaagttgtttcacagtagaggttaatatacc

SEQ ID NO: 216358 - DNA, 450 bp, Homo sapiens
ctgcctgtgattccccagggctcaggaaggatccctctttgtgctgtcgtagtgccttatatcttcccctgtggtaggcatttatcatgctgaattatatggcactctgaggacagagccaaagattcgggagaatgaatgcaaacatggggagttggggaagcaaaactgaagggattgaggcaagagtgaaaattctttgaagtcttgggaatcttctacttcatttcttaatgcggttttgttttcatatgaaatactttacctaatgaataaaattgacattacagcaagctgtaaattttgtttatattgcagcttcatctattttcagtatcttcttcagtctgaggggttgcaattctatagtattttgtgtactttaaatccatctcctgtgttagctatagggggctagcatcaatacatacatattagtctttgcacatt

SEQ ID NO: 216359 - DNA, 509 bp, Homo sapiens
ccagtggaatgtggacgaggcagccatggggaatgggggaaactgaggaccagatgcagttgttaccaaggatgccaagcagcctagcccaaggcagttcttggatttccctcctgcttacttctccccagcatcctctagtatccttagagtcctgctctgactgcagcccctactccttcggaactaagttactactttgtgtctagcagaccctggaaaaggtgccttcagggtctctgctagctatgtcctatcgcttcccacccagtctattacatgggtccttctgccctttgctcccacctgcctgacttgccagccttctctgtaccacacaaggagcctgagggctttgaggttttccatgccagctcccttctgttctggcttcataaaggacttggatcactgccctgagttaccgctacccagcttctccatccccctcttcctcatctgtatttgtgtgccttccctttactaggcagtgtattcacctggaaacc

SEQ ID NO: 216360 - DNA, 415 bp, Homo sapiens
cccagccgccttcccgcccccagctctagctgcccgcctgccgcctccgctgccccttcctcactccccacccggggggccgtctcccttatctccatccgcccacccccccgcccaccccacaggcactctcagaccccaccagcacattcctaacagctccagctttccaggaaagcaaaaaaaaaaaaaaaaaaaaaaaaaaaaaagaccacaacatcacgggcaggtttatttgggtttgtttgtttgcttgttggctcgattaaatactcgtggaaggtgaacgtaccccacacaggagaagtttgatgttgacaaacttctggtggcagcgagactgtgtcagcacaacttccgggataatgagagctgctttgcagggagcgcggcagccgcggcgggaggcggccgc

SEQ ID NO: 216361 - DNA, 486 bp, Homo sapiens
tgtcttccttagtttctgttacccaatacatcatatccagctttcaataaagaactacaagacacactaaagggcagaaacaatctgaagtgaaaaagtaagcaccaatcagatccagactcagataatagcagatattttagaattatcagacttggaacttacaataattatgacaaatatgctaagttctaatagaagaagtggacatgatgcaagacaagatgggtaatacaaggcaaaatggaaaatctaagaagaaatcaaactaacactaaaagtctaaaatattttaatggaaatgaagcatgacattgatgggctcattaatacactgaactcagaggaaaaaaactaattagcttaaagatatgtaaatagaaactttccaaactaacggtaaggagaaaaaagtataaaaatatagaatacattattcaagaactgagcaacaattacaaaaagtataaatatgtacaattggaa

SEQ ID NO: 216362 - DNA, 465 bp, Homo sapiens
ggctcagcatagtggcttatgcctataattctcaacactttgggaggcgaggtgggaggattgcttgaggccaagagttcaagaccagccggggcaacaaagggagaccccccctcccccgccgccatctctgcgaaaaataagaaaagaaaattagttgtatttcaatacactagcaatgccaatctgaaaatgaaattaagaaaacaattctacttttacactgaaagctacaatattgctgaaagaaattaaataagagctaaataaatagataccccatgttcatcaactggaagactttatatttttaagatgacaatactccctaaattgatctacagattcagttgcaatgcctatcaaaaaaaaattgttgttgcaatgagctgagatcacgccactgcactccagcctgagggacagagtgagactctgtctcaaaaacaaacaaacaacaacaac

SEQ ID NO: 216363 - DNA, 495 bp, Homo sapiens
ctctacttcaaaaaagtgcaacagatagattgtttttaacttatgttaacttatgttaaatatgaaaacttagttgttaaagagctgtttcttttcatcttatagatacagccgtctcagtgcttaaatgttgctcagaggcctttcctgaccattctctgaatactgtatgcccttaccacatgtttttttttttttttttaatttcctggcacatattattacgcaacactatattatttttaaaattttcttcctaatagaatgtaaagccagagactgttattttattcattactaatgcaattgagtacttttttcagtgcctattccaatttttttgcccgtttttctattgaattgctcctccctttatttatttatttatttatttatttatttatctatttatttattttactttttattttcgagacagtcccactctgttgcccaggctggagtgcagtggtgtgatcttggctaacttcaacc

SEQ ID NO: 216364 - DNA, 572 bp, Homo sapiens
catgttccagctaaactacggggtaagtgtgaagacgagagctatccaaagactgaacttgggtatgacaacatgtagaggtttgggagatgagggggattcaacaataacaaagggacatggccaatgaaggagaaggagagcccagagaggggtgctgtagaggccaagaaagcagtttttcttcctggagagggacaggagcagtgtggtctaatgctgctgatgtgtgaaatgagatgaaggctgagtgttgcccattggatcagacagtacaagctcatggtgatctcattggtaatcttataaaagtagcttggtggagtgtgagggcagaagcctaatgagaatggattgaaagaatgtggaatgagatcataccacacccagcaggaacttattcttaactcaagaatcacatgagttgtccttactgataggaattggtgaaacagagactctcatatactccgtacaatctttcttgatgaatacatagatagtgatgcaatgagccatgattgtgtgtgattgcatttcatcctgggcaacaaagcaagaccctgtttaaa

SEQ ID NO: 216365 - DNA, 435 bp, Homo sapiens
caacctgagccatttgctttgctggttctctaagcaccgcttccatattttggatttaataaagccgcagtaagacttttgccccaaccacctttttgtgcttaattgttaagctcatatacaatgggaaggaaatagaatccatatgtttctactcatttatacttaaatcatccaaatatggtgttgtaaccccaatttgtcattcacagaaactttggagacttaaatttttggaggcctgtcccaattctccactcttttgtggtcctcaagtaaatacatatatttgaattcaagagtttgagagatttataagaaattccaaaataaaattttcctccctttgttggttttcctccaacctcactgaattgtctcagatttttttttgctggctcttcttcttctactcaaactcttaagttggactgc

SEQ ID NO: 216366 - DNA, 393 bp, Homo sapiens
aaaaacaaaaaacaaacaacaaaaaaaccttgtttgtcattatcaccccacagatctttttagacatttttttcctaatcaccccacatgaaaatttagtaacatagatgtcctgtatatttgcttatatactatatgtatatcagtgttctgctgtgttttttacattaaaagagtaagatttttttcacccctccccctgccacaaaccaatttttgtccttgttgagaatgcatgccgtaaagaataggaaaaccttccaatggaatctcatacagtcttttaagaagaatcaagttccttactcagaagggtgaggcaagaggatcatttgaggccagcagttcgaaaccagcctgggcaatatagtgagaccgcccccccatttctta

SEQ ID NO: 216367 - DNA, 185 bp, Homo sapiens
ctcagggtgtggtcgcttatttatgcagccctccaatcatcacatttattaagctcctactctgtaccagacactgttctcagcactggggcgacaatagtgaataaaacacaaaaatctctgccttcatggaatgtacattctagtggggattaaaaataaacaactaaaacgcatagtgcgtt

SEQ ID NO: 216368 - DNA, 197 bp, Homo sapiens
ccaacccaagtgtgcctgatgtcaactctgatctaagatgtggacgcacatgggcagaatgatgacgtgctcttcccaacctctcatttagccagcatgtgagagggcaaggtgtcttcagcaaccatttcatttgtaaacatacgtgtttttatccttggtctacgcaatagtattaccacacaggtaataccagt

SEQ ID NO: 216369 - DNA, 215 bp, Homo sapiens
tgagcgccagtaggaactgagctccacactcaatctggcacaccccctgtccatttagtctctcaatgttctggggaatgttgcagccttcacttccgccccggcccaattttccaaagtcaccatcaccccaggaaaataccaaacctaggtttaaaaatagggaagggaagggaagggagagaagaaaggaaagataaagaaagcccaacctc

SEQ ID NO: 216370 - DNA, 612 bp, Homo sapiens
agaaatgaaagctcaggtccacacagaaacttgtacacagttattaataaaagctttctttgtaatatcccagaagtcccaactaaaatgtcttagcaataggtgaatggttaaactatggtacctccatatcacgcagtgctgatgagcagtaaaaaacaacttggacatctctcaaaggcattttgctgagtgacaaaagagaatctcaaaaggtcacatactgtatgatctcactttataatattttcaaaataataaaactgtagagatgaacaacatattgatggttaccaggtattagggaaagaagactttaggggagtaggtatgacaatagaggggtagcagggaggagatcattgcagttaaagaatggttctgccttttgattatggtggtgtttaaataaatatgtgtacatatgataaaatggcatagaactatacacacacatcatattaatatcaatttcctggttttgatattggattataggtagataagatgtgaccattgggaggattggataaagggcactgagaaactaatatctttgcaacttcctgtgaatccataattatttcaaaataaagagtttcttaaaaactg

SEQ ID NO: 216371 - DNA, 462 bp, Homo sapiens
agcctggcatttatgatcaacttcatttttgtttcttggtttttttctttctgttattgattgcatattcttcatctctatctgcacaactgagattggtgtgttagtgccactgtgttagtgttagttagtgctagccaagggcaagaagtggagggtggggggaataggcggacgagattgggtgaccaactcttcccagtttcccaggacttttccagcttttaaaactgaaagtcccccattcatggaaactcctcagtcccaggcaaatcaaggatagtcaccctagaggaaggatagcttgggtgggggaagaagggaggataaaggctactgataatgttatttatactaacatccctgctttagtccaggtgcttttttcactcaacattaagtttgtaagatttatttgtattgttacatgtagctgggtgacagagcaagaccgtgtctcaa

SEQ ID NO: 216372 - DNA, 269 bp, Homo sapiens
cagtttagcccttgaatatggccaatgacgtgttgcagcaagctgagcacttctattacatgcaaagactctgactgcaaacatccaagtgggcaagggattatcaagtttagcaatggactaaccaaaaactgcattcgtgtggaactgaccacaagctttacattatgcttttgctcctttcttgctcattacccattgtataacaaaatatgcccagacttgggctttaataaaaaatttcttagctctcaattttttgtggtttg

SEQ ID NO: 216373 - DNA, 208 bp, Homo sapiens
caatgggatcgtggaatggtagggctaaaacatgagccaaagtcaaaactattttttaaagtgaattatatccctactctcttaatattttgaaagaactgtagtcagaatcctagacccatggctataagccatcatcagacctcagaccaatatgaatcttgatgtagtaacacccattttttcttttgaggtatagtttacatat

SEQ ID NO: 216374 - DNA, 502 bp, Homo sapiens
actattaatacctgaacttgcttaccaatatacaaacaaactgggggaaatgccctttagtttcggtttcccataataagctgtatagaaacagttttttttttccttgcgtaatagtagagcatgttgctttgtactttttttttgtatctataagaacaaaaacttagaaaatatttcttgagaaatgagtatatttttaaagattcaaggctaatgagttttaattgaagttaatatgaaattatttaatcacttttattaatgatttctactctgcatttctctgttgtgtcccagaaattgatctttggaattctaaatcatttaaaatcaaaacctagtcttagtcgatgcacaatatggggaaacttcaggtcaaggaagagaagaaatatttttaaatagtatggactatagagtctttcacctatttgtagtactataataaacagataccgtgaacaattaaaacctcagaatcctacaaccctgtatctta

SEQ ID NO: 216375 - DNA, 588 bp, Homo sapiens
gatcccatcaatccagtcccagtcttccattagtgcccagttcacctggtcacaacaccgtctcattggatgctatgatgctttcttccccactggctgaccaggctccacggacctgccctgccatgttatgcccctttgtatctgcttcggtgcctagcacaggctcaacacatgacctcccagtaaaggaatggctgggttttcaaaggcctgggccacaaaaaaggcaaatgctcacctgatgaaaaagaagtcattatgtatcttggttccagaaacatagccatgagccaacctctacatagatacattactacatacttacatgtgtttatgtatacatatatccaggattctcttggtaacacaaaatgttgagaatagtaacaagttgaggttactgaggcctgatactaatcatgttgaggtcttacatgtaaatagaattggagtatagtcagaagggcagaggattttttaatctggttcttttcaattttctatcagaaacctaattcagtggttctcagtcatctgatgattctgtatagcagtggaaactttaataaataactgatgtctgtg

SEQ ID NO: 216376 - DNA, 573 bp, Homo sapiens
tgggcaacatagcaaaaccctgtctctgtaaaaaatagaaaaaattagctaggcatggtggcatgcgcctgtggtcccagctacccggaaggctgaggtgggaggatcgcttgagcccaggaagtcgaggcggcactgagctatgattataccactgtgctccagcctggatgactgagtgagaccctgtctcaaaaaacagaacaaaacaaaaaaaaattgcagttatgccctgagccaaatgttgagcttttctgcccacaaagtgcaaaattgtagtactggcagaggtgcaacccaaggggtcgccagggttctcaccgcccttggccatggggcaggctgatctagacagcagggggatgttttcagggctgaaggttccccctacctagtcgtgaacacatcgggtgctggagcacctgtgttcccatgaggccagcgtgggccatgcatggcttcaaaaggccctcgaggcttgactaagtgcgccagtttcattctgaacatgctgctctaaaacacatccctgctgagccacaggaggatcagatattgtgagcttctggcccg

SEQ ID NO: 216377 - DNA, 530 bp, Homo sapiens
agcctcagtttcctgagaaataaatgggggtaattatagtgtctactttatagtctggttgtgagggttagattatttaatacatataaaatattagaacagagcctgacatattgtaagcatgtgacaaacattaatttttattaatatttaacagctaattgcatccttattttaaagttttccatttttttctattttccatatggtagaggttaaaatttgttgatttgatttaattatgtatagtataatgccaaagggaatctttcttcaaatttttaattatattgtaaagagttactaattgacagttttcttataagttagcttagttataataaaatgtttaaaaagtgaacataatgaatacttattacctgaattaatattacatataatatacatataattatgtatttattatataaaaagtttatttgattatttaaatttgtattcatttatgtaaataaattgttatttttattaaaattgataaattttatataaatataaaactaatataa

SEQ ID NO: 216378 - DNA, 191 bp, Homo sapiens
tccagattaaccatcaactaggagtctccagattaaccatcaactaggagtctccagattagagtaaccatcaactaggagtctccagattagagcaaccatcaactaagagtctccagattaaccatcaactaggagtctccagattagagtaaccatcaactaggagtctccagattagagcaaccatc

SEQ ID NO: 216379 - DNA, 442 bp, Homo sapiens
gaggcggaggttgcagtgagccgagatggggccactgcactccagcctgggtgacagagtgagactccatctcaaaattaaaaaaaaaaaaaaaaaaagaaagaggttaatctagaattgtgctgagaaacacccaatgactcaatggtcccaatgtatctaagacagagttttaacttggttctgtctaagtaaacagaactaaaattaaggcgatcactgtgaccatggattactcattttaaccatctttagcatatttgctcttgggttatgaaagccattactgtcaagagaagagataatggggctgaacttcacagaaattcagaaggatgccttgaatgtcttctgattctcatcctttttttgtaggatgctcaagcatcatggcatcatttccagtggagtcgctgaacttgtaggttgtctacctgacacc

SEQ ID NO: 216380 - DNA, 585 bp, Homo sapiens
agtcccccttatcctcaggggatgcattctaagacctccagtggtgcttgaaaccgtggataatacggaaccctatatatactatgtttttctcctatacatacatacctatgataatgtttaatttataaattaggcagagtaagagattgacaacaattactaataataaaatagaataattatgacaatgaactgatataaaaattttgagaatgtggttactctctctttcacaatactgtaatatttttttggaccacaaatggccttgagtgactgaatccatagaaggagaaactgcagatgagggggtactactatgtgcttcagataggttatattatgaaatatatatcattcatatatatacaaatataattatccaaattatatttcacagcaagtacaaactgaccacaatgctttatagcagagagattgataaccttaccagatgagacagcataatctagctagaacagtcagtcacctacggcattgctctccttcaaatacctttgtcagtatctgaacactggccctttaggtaactatgaataaccaagggcacattttttccct

SEQ ID NO: 216381 - DNA, 462 bp, Homo sapiens
tgggtctccagagagatgaagatgaagcaagattgggagaggggcagaaagggggaggctcctcagacagagtaggggagaggaggagggatttggagccagggcagacagagcagcatggtgctgggacagcaagagggggcagctgatgacaaggagagcagagggagaaccacagcatggggaggcctgggatccgggggggccagagagtggggacaagagagtgtagcagggaagaggaaatttaacagggagaacagagaggaagcagagatagggagggcaagaaacaggcagaatggaaattggggacaatcaaaaattggacacaaagaggaacaaggggtaaaacaaattgccagaatggagcagaacaaatggaagagaaggaatagagggaagagggggagaaacagcaggagaggagaggggcagaaaaataagccaattcttatggga

SEQ ID NO: 216382 - DNA, 551 bp, Homo sapiens
tcagctgagctttgaaatggggagctggaaaaataaagcagcagtttatataggccctgaggcaagagaacctcatgagttatgagaactactgtaggttctatgtagctagagaacagagaatgagagggcactggtaagagctgaggatacagaggccgaaggacatcagattggcaggacattttatgccacactacagaatttgccttaaatgcgccgaggagctattgaaggcctttgaacagaggcattatataagtcaggtttcagctgcaaaaataaaccactgtagttcttttcagcagaaggagttttaatatagaaaataaagtgcttacaaaattggtgggagggctggaggggcaagctttaggctatgcctccaagaacagtgtcagggtagctgctctctctgacaagcaggaagatgaggcgtcaggggctctaggagcatgctgccttgtctgcaatttaggaatgaggaagctgccacagctctaaccatctgttggctagagtatcactatgcctaccagatcctcagtgac

SEQ ID NO: 216383 - DNA, 565 bp, Homo sapiens
aagtagagattgtacagtgtgaaactacaatgtctgaattaatatctgaaacaataagaatatgttaaaagttgtgagagaaaattactatcctcttagaaatttctcaaaaaaaggatgaaatcgtgatagtttattcaaacaaacacaaacttcacttctaagtgtgccatctagcttcataaggtatacttcaggaagaagcacacataaatagacacatatatatttatttatatatatatatatagaccaatataaatatttctgtatgtatgtgtgtgtgtgtatatatatatatataattttgtacggatactatattctcaataaaatgttttttaaaaactacatgttcatagcagaagttttgcagtgttaatggactatggtgctgggagaaaatggcattagagaaaaatagtaaccatatactcaaagatgaaaaagttcccaaaaggaaattaactgtaatcttaaatatgaagtacttgccagacaaggacccatagtacacagaagaaagtgcagagggcctatgactgatggaaaaggataggacccc

SEQ ID NO: 216384 - DNA, 905 bp, Homo sapiens
  misc_feature (650)..(650): n is a, c, g, or t
  misc_feature (896)..(896): n is a, c, g, or t
tttactaggttccagaccctgcggcttcagaggatttttcctgaggtgctggcagagcagctcatcagttacggcagctgccagttccccacactgggctttgtggtggagcggttcaaagccattcaggcttttgtaccagaaatcttccacagaattaaagtaactcatgaccacaaagatggtatcgtagaattcaactggaaaaggcatcgactctttaaccacacggcttgcctagttctctatcagttgtgtgtggaggatcccatggcaactgtggtagaggtcagatctaagcccaagagcaagtggcggcctcaagccttggacactgtggagcttgagaagctggcttctcgaaagttgagaataaatgctaaagaaaccatgaggattgctgagaagctctacactcaagggtacatcagctatccccgaacagaaacaaacatttttcccagagacttaaactaacggtgttggtggaacagcagacccccgatccacgctggggggcctttgcccagagcattctagagcggggtggtcccaccccacgcaatgggaacaagtctgaccaagctcaccctgcgccaaagtgctaggattaacaggcaggagccatcacacctggtctcttcccccanttttaaattgtgttgtctgtctttgttgttgagttgtaggagttcttaatagtttctggatatcagatgcctttgtggttttcacatctctgcaggcaactgtgtgtctcaaaagcaaactgcaggattgggctgcaccatggactgggccaggcatctgagatcagacagacccaggctcagctcccacttcctggcctcttctgccaccctgggtgtgcagcctcatccttggagccccagttncgctcatcc

SEQ ID NO: 216385 - DNA, 727 bp, Homo sapiens
gtcttttaaataaaaaacttgaaatatactgaaggtcatcttaaatggatacagtttatgctaatggatgatattattactttaaaacaatattttacaatcaagctactccaagtggcacactattcatcctagagatctttaaaagtaacaagcctgcctcctatttttcttcattcacagaaaggccagtctagaacgcacgagctgccccttcaatctcactaccccttacatacagcctcacactcagtctccacccacatttatttcgctacgtatcactccaccccactatcatccctcacctcccctctctcactctctactcccccgctccttctcctccctctccctctccctctatcactcgcctctatcccttcccatccaccttcacttcctattctccctcctcctccctccctccctcctccactaccttccacccaccctcttcccttcccctccctactctcacacctccatctcccccctctccacccaccctcccctctctcatccccttccctcttcacgcctacctatctcctccttctctattcaccgttccccatctctcccatctccctcctcactcctcttcctcctacttgctctctcatacactctctcaccaccttctcctcctctctcctctctacctccatactcccatctctcctatcccctactttacgcacttcttcctctctacccctctcct

SEQ ID NO: 216386 - DNA, 1015 bp, Homo sapiens
caaacccggaagcgggtcgcgtggagtgacggtcccaccgcggggatatctcttccaaatgcatgatgaaggagttctcatccacagcgcaaggcaatacagaagtgatccacacagggacattgcaaagacatgaaagtcatcacattagagatttttgcttccaggaaattgagaaagatattcataactttgagtttcagtggcaagaagaggaaaggaatggtcacgaagcacccatgacagaaatcaaagagttgactggtagtacagaccgacatgatcaaaggcatgctggaaacaagcctattaaagatcagcttggatccagctttcattcgcatctgcctgaactccacatatttcagcctgaatggaaaattggtaatcaagttgagaagtctatcatcaatgcctccttaattttgacatcccaaagaatttcttgtagtcccaaaacccgtatttctaataactatgggaataattccctccattcttcattacccatacaaaaattgggaagtacacatgagagaaaaatctttccaatgtaatgagagtggcaaatcctttaattatagctaactcttaaggaaatatcagataatccatttaggatagaaacaatataaatgtgaggtatgtgacaaggtctttaatcagaattgattccttgtatgccataatagatgtcacactggtaagaaaccttacagttgttatgagtgtggcaagaccttcagtcagacgtcatcctttacatgctatcgtagacttcatactggagggaaaccttacaagtgtagtgagcataacaagacctttggttgaaattcagcccttgtaattcataaggcaattcatactggagagaatccttgcaagtgtaatgaatgtggcaaggtttttaatcagaaagcacaccttgcacgtcatcatagacttcatactagagagaagccttacaaatgtgaagaatgtgaaaaagttttcagtcgcaaatcacatcttg

SEQ ID NO: 216387 - DNA, 839 bp, Homo sapiens
ctcgactttgaggatcccctccttgtaatccaagcagtcgcatcaggagctcttcgtagacatttgttcagaaaaagacaatttaagagaagaactaaagaaaagaacagaaactgagaagcagcatatgaacacaattaaacagttagaatcaagaatagaagaacttaataaagaagttaaagcttccagagatcaactaatagctcaagacgttacagctaaaaatgcagttcagcagttacacaaagagatggcccaacggatggaacaggccaacaagaaatgtgaagaggcacgccaagaaaaagaagcaatggtaatgaaatatgtaagaggtgagaaggaatctttagatcttcgaaaggaaaaagagacacttgagaaaaaacttagagatgcaaataaggaacttgagaaaaacactaacaaaattaagcagctttctcaggagaaaggacggttgcaccagctgtatgaaactaaggaaggcgaaacgactagactcatcagagaaatagacaaattaaaggaagacattaactctcacgtcatcaaagtaaagtgggcacaaaacaaattaaaagctgaaatggattcacacaaggaaaccaaagataaactcaaagaaacaacaacaaaattaacacaagcaaaggaagaagcagatcagatacgaaaaaactgtcaggatatgataaaaacatatcaggagtcagaagaaattaaatcaaatgagcttgatgcaaagcttagagtcacaaaaggagaacttgaaaaacaaatgcaagaaaaatctgaccagctagagatgcatcatgccaaaataaaggaactag

SEQ ID NO: 216388 - DNA, 830 bp, Homo sapiens
tatatttaggttaattaaagaaaataagaagcatcaggagctcttcgtagacatttgttcagaaaaagacaatttaagagaagaactaaagaaaagaacagaaactgagaagcagcatatgaacacaattaaacagttagaatcaagaatagaagaacttaataaagaagttaaagcttccagagatcaactaatagctcaagacgttacagctaaaaatgcagttcagcagttacacaaagagatggcccaacggatggaacaggccaacaagaaatgtgaagaggcacgccaagaaaaagaagcaatggtaatgaaatatgtaagaggtgagaaggaatctttagatcttcgaaaggaaaaagagacacttgagaaaaaacttagagatgcaaataaggaacttgagaaaaacactaacaaaattaagcagctttctcaggagaaaggacggttgcaccagctgtatgaaactaaggaaggcgaaacgactagactcatcagagaaatagacaaattaaaggaagacattaactctcacgtcatcaaagtaaagtgggcacaaaacaaattaaaagctgaaatggattcacacaaggaaaccaaagataaactcaaagaaacaacaacaaaattaacacaagcaaaggaagaagcagatcagatacgaaaaaactgtcaggatatgataaaaacatatcaggagtcagaagaaattaaatcaaatgagcttgatgcaaagcttagagtcacaaaaggagaacttgaaaaacaaatgcaagaaaaatctgaccagctagagatgcatcatgccaaaataaaggaactag

SEQ ID NO: 216389 - DNA, 549 bp, Homo sapiens
ccatttacgagcatgaaagctttgataatctgccctgccagtgtaaacccttaggtgtgtggaaaaaacagtagagactagtcacagaaggagtaaagcttagaaacaatggctgtaggccaggtgtggtggctcacgcctgtagtcaagcactttgggaggccaaggcatgggggttgcttgagcccaggagtttaggaccagtctgggcaacatgatgacaccctgttcctacagaaaaaaaagaaaaaattagctaggcattgtagataagatccttgactctgtgtgtggttgcccatacagtaatggaaagcttgtctcctcaaagtcaccatcttactggttaccgccatcactctaccactcttcacgaatatccaggtttcattcttattgagggattgcttatcccaataccaaggtcacgtgtggccatatggcttttcttcattttctctaacatggctgccaacaaatgacatgtagaggttggcctggaggcctgagaatacagcagcactatcagctgacctgagaggaacatcg

SEQ ID NO: 216390 - DNA, 417 bp, Homo sapiens
tgagatggagttttgctcttgtcacccaggctggagtgcagtggcacgagctcagctcactgcagcctctgcctcccaggttcaagcaattcttctgcctcagcctcccaagtagctgggattgcaggcacctaccaccatgcccagctaatttttgtattttttagtaaagagggggtttcactatgttgggcaggctggtctcgaactcctgacctgaggtgatccgcccacctcggcctcccaaagtgctatgattacaggcatgagcagccgtgcccagccttaaccattttttgaataccctttatttatagttggggaatttacagttagagaaaagactgattagggataagtggcatagttgattttgctgtttccaatgtattatgttattaattaagaaccccaaaa

SEQ ID NO: 216391 - DNA, 502 bp, Homo sapiens
tgggccaagtagggttggtagaaaccacacgagcactggcggtgttaagaaggcttgagtctcctagcagtagccaggaagataaacccagttgcctgctgtgtctggaggccagactgcttggccaaagaggcagtggccctttcctcctctgggagtttgaggatggtggaagggaaaattgcaaataacatccagaggaatgacactaaaattctagcattaagtaaaatatgtgttgtttaaactctgatttcctgaacagcttaaacccctaaaagtcagagcatctcatggtttattttaatctctatcaatttccatctgtgtctacttggagacctgctcttgacaagctcttcaaggtggctaactgtgcaatattacctctattaatagtctctctcaaacctggctcctaattgcactaataaggtgggtctgccatgactgtaaggaatccaaacaatactgctttccccaggccaatcacagtgtgttg

SEQ ID NO: 216392 - DNA, 295 bp, Homo sapiens
agttaaaatattcccaggttaaaatttttttaaagtaccaataatagagctaaatacaatgacatttgcttttaaaaggtggatattttatttctgctttttgaaaatacttatttagtattgacttggaagccaatttggtcctttaataagtaaagaaaataatatgtttaaaaatgtaaatgttttacaaatttgaaactttcataattgtattaatcagaaaacaagcacattgccattctttgaaactcatgtttctagacatgacagcagtaataaaaggatgaaaaca

SEQ ID NO: 216393 - DNA, 899 bp, Homo sapiens
  misc_feature (680)..(680): n is a, c, g, or t
  misc_feature (896)..(896): n is a, c, g, or t
  misc_feature (899)..(899): n is a, c, g, or t
gcaccatgaggcgagggccccggagcctgcggggcagggacgcgccagcccccacgccctgcgtcccggccgagtgcttcgacctgctggtccgccactgcgtggcctgcgggctcctgcgcacgccgcggccgaaaccggccggggccagcagccctgcgcccaggacggcgctgcagccgcaggagtcggtgggcgcgggggccggcgaggcggcgctgcccctgcccgggctgctctttggcgcccccgcgctgctgggcctggcactggtcctggcgctggtcctggtgggtctggtgagctggaggcggcgacagcggcggcttcgcggcgcgtcctccgcagaggcccccgacggagacaaggacgccccagagcccctggacaaggtcatcattctgtctccgggaatctctgatgccacagctcctgcctggcctcctcctggggaagacccaggaaccaccccacctggccacagtgtccctgtgccagccacagagctgggctccactgaactggtgaccaccaagacggccggccctgagcaacaatagcagggagccggcaggaggtggcccctgccctccctctggacccccagccaggggcttggaaatcaaattcagctcttcactccagcatgcacatgccctctttctgggaccaggctaacnctgcagaagcacagacactacagaccacagcattcagcccccatggagtttggtgtgcttgcctttggcttcagacctcaccatctttgacagcccttgaaggtggtagcccagctcctgttcctgtgccttcaaaaggctggggcactatgagtaaaagaccgcttttaaaatggggaaggcaccattaagccaaaatgaatctgaaaaaagacnaan

SEQ ID NO: 216394 - DNA, 549 bp, Homo sapiens
ccccccaaagatcattcgctaattaacgaaatgaaatattagttcagggtcttaaagttaataaggatcttgaaaactatatttaatccgattcactgtagagaaacacaattattaatgatactgtgagatgacattttaataattttacccagatagatatggagaataattaagtttacagttatctcaagtaccaaggaacaaacccttttaaacattagaattaaatttacctgaacacacaatatttacattctcataatgttggccaataaaaccagtaatgaaaatttgagagttttcaactaattaggcttttcatgagaacataaccaaagtttgtacataatataaaaaattatgcttagagggagaagacatagctatttttaaaccaaaattttcaaaccagtctgatttgtctcaagatttgccttaattggaactatcataaaatatgcccttaggtaccacatatcagaggagtttttattggccttttttttctgaccaccagttgtcattcaacagagcagccagttctgc

SEQ ID NO: 216395 - DNA, 493 bp, Homo sapiens
atgtcagaggatcccggaagactgacataaagggaggcaaggaaactagtgatgactggtatatggtgtctaagttgttgatttttttacagtgtgcatatatgttacctatttaaaaagctaaagcttaaaaccaaccaatctatgttcaaaatcaaaacaaaaaaattcttctgcctcagcctcccgagtagctgggattacaggcagtgccccacgtgcttggctaatttttgtatttttagtacagatggggttgcactatgttggtcaggcttgtctccaactcctgatgtcaatgatcttcctgccttggcctcccaaggtgctgggatttgggattacaggcatgaaccaccgcacctggcattaaaagcacccttaagtcaacgttgcagtgaatcacctgacgccaagagcatttggtgaggctggtagatgaaaggataagcagttttttgatactctgtcacccaggatggagtgcactggc

SEQ ID NO: 216396 - DNA, 389 bp, Homo sapiens
ccaggctggagtgcaggggtgcgatcttggctcactgcaacctctacgtcctggattcaagtgatccccttgtctcagcctcccgagtagctgggattacaggcagtgccccacgtgcttggctaatttttgtatttttagtacagatggggttgcactatgttggtcaggcttgtctccaactcctgatgtcaatgatcttcctgccttggcctcccaaggtgctgggatttgggattacaggcatgaaccaccgcacctggcattaaaagcacccttaagtcaacgttgcagtgaatcacctgacgccaagagcatttggtgaggctggtagatgaaaggataagcagttttttgatactctgtcacccaggatggagtgcactggc

SEQ ID NO: 216397 - DNA, 261 bp, Homo sapiens
atgtgtgggggcagctggtttggtatgtgtctgggcatctggttggtgaacatgtggatgtctgggctgttgggctggggacctggagggggtatatgtctggatggctggaggagtggaagaggttttggggtgaggtcactcatggtgtctccagcctcccattgtggtttcaggcttcttggctctcagcaccttgctgtctccccaacaagctatacaggtctgtcctgggcaccttctcagtcatgtcaccctctc

SEQ ID NO: 216398 - DNA, 431 bp, Homo sapiens
ccttggttcttctttccgcagtcagttctaatgtaagatatgatacacctttccatctttggaaccccactatatacccttatttctacatgttctgtactttcctgggaaggggaagtagaaaagggaagaggttaatgttctttctggaatgtccatccacaatgtggtgattctattggagaggtaaacaagactcctgtaatcagaagggacagctgatggatctggataagaaattcgaaatctcgaagcttatgaatgtgcaatagatgttatttaatgctcattgtaaattcagattttgggcttctttatacttaaaggaggctttgaattttaaggctaaaatagaatcatgcatcttctttggagtgtttcttaccgaattattttttattttgctggaagcttttattgaagtttaaact

SEQ ID NO: 216399 - DNA, 382 bp, Homo sapiens
gacgtgttggtttaacgcaattgaggtggaatttacaaaaagttcagctataatcagttatatactagaacccctagcccagggtaaagtagcctcctcaattgtgttaagagtcacatcagcagtttggaaagattgtgaaaggtccaaggctttggaatagattcagaaaagatagatgataggtagatagatggtgtgtgaaataaatagttttgaatgtaaatagaagcctagtggtaagtaagttaccctggtcttctgcatttctgaatacaggatacctataacttacaaactatacctctaaagaaagatagcactcattcttgtgcccattttaaggactaggaaaatgtttctctttgttgttcacaccatt

SEQ ID NO: 216400 - DNA, 463 bp, Homo sapiens
gagttcccacaatgtggaagcaacgaggaaggggtttctggtcccggttctgaaggctgtgaccttcagcgcacaatctatacaatgctgatagccccggcacctctctctctcgggtagttctaaggattaaatcagataatgcacacggaaatacgttacaaatggaagtgttgttgttcttccaagtttgcaaggagaggcagcggcagtgttcttgcagtgtgtctgagttccacgtgacttatattggattattatataaatcctgtaattgatctgtcatacttttatgtccattctttatgtcatatttctctctcacatatacatacacagttgtatacatacttaaatctctatgtattagcagtctgcacaacatataccttttaatatttatatttctgttcagttctgttcataccacagaatatgtgttataaactcttttattaagctt

SEQ ID NO: 216401 - DNA, 524 bp, Homo sapiens
gaattttccccctggtgtagcattaggtctaactgcataggggactgacttttaaactctggtgaggggctaccctgtgagggaccatgctggtgacagtcaggactcactgctgcaggcctccaggcaagaagaactttggggaccctattgaagaccagcaagggaacacggaagcagtacagacaagacaggctctcagccaggctatctggggtcccatctcagctcaatctatgacaagttgatggatggctctggaatttggagtaataattatctgcccagtccagccctggagccaattccactggaaccaacatggtctgtctcacctcccaccctaacctatctgattcaccacacctccagactctgggctgggccctgctattccttatccaggcccaaagagcccagagcacacatcggctatgaagtattgtctaaaaacatttatgaaaccttacaaaaattcaaaaaaaaacagcaatgaaaacttacatctccctcatcaagttcaa

SEQ ID NO: 216402 - DNA, 303 bp, Homo sapiens
  misc_feature (170)..(170): n is a, c, g, or t
aatagccggacccgtctcatcatacctaccaggaaggaatgttctcactcccaaattccaggcacagactttgccatcattcctgttcctggggatttaggaaagatagggtttttgttttgttttgttttgctgtatttagaggaaggctctcgctcctgtcacccagngctggacgtgtggatggcacagagcatacgcaccgtggacccccactttcaatgtgatcctcccacttcagcctcctaagtagataggactacaggcatgtgccaccacgcctggttaaagataggttttgtc

SEQ ID NO: 216403 - DNA, 477 bp, Homo sapiens
tcatcaactgtgaagaacatttcatactttatagtattatatttagaaggtgattaatcacaggtgttaagaaagaataatttttattaaaacactagcaatcaatcagtatatccttagtacagtacttgtaatcacattttaagccatgaaagttcttcgactgctctaggaagagccataatttccaagtagaaaaaataaattcttttcactaaacatttgattaagggaatgagccctggaggaccctttgaacatttctccgttcagaaatcaaaaggtattttaagaatgatatttatatttgaccaaggagttggataaagagaattactttttgactccatcacaaagtaaggcacttcgaagcttctttctaaaaaaaaaaggaatgttatttctgctcaaaagtgaaggtataataaatcatcgtgactctcaactcacatgtaaacattaaagctaatttgtctc

SEQ ID NO: 216404 - DNA, 248 bp, Homo sapiens
gcagttcatctttgaccaaaatgttatgcagcaaatgaccgtacttatttatcctctactttttaactttattggttgtttcattaaggtcagttttatcccagctagataatgactgcatagcagcttctgtagcatctacgacagtatagtccagttactatctcatagaatgttttaatgaatcttgattatttaagtgaaaatttaaatttaaataaaaattttaaaaaattttaccaaaatga

SEQ ID NO: 216405 - DNA, 433 bp, Homo sapiens
ttatgtcaaacaacaggaaatttttttcaggagtatagataaaaagtttccagtgaatttttttttccccacagtttttttcttcccacccactactcaaggtagttatgaatgttactgctatttggttacacagagataagttattttgctgtttagttatttcttatatttctgaaatatgcttaagtgaatgttgtattaaaatagctgtctttaaaaactctctatttaaaaatgtcttacaatactacattcttacagacctgtgtctgagccaattattgatgaataatttgtatagtttagaaagttatataaaaggttatttttcattttgttggggagatggttagttaaatatgttttatatttttaaaacatatctttttgtccttgtttatgcaaaggtaatagggaatggtacttactt

SEQ ID NO: 216406 - DNA, 398 bp, Homo sapiens
aaagtagccgtaagtgctatggggaaaatgaaatggataaggcttcttagactgcaagcagagaaggcctttcccagtggcaggaaagagccagccataagaagatcttagggatggcattgcagaccgaggcaccaccaagggcagaggcttctagtgaggcaggagaatagggtctggaggcagggaacctaaggccaattcatgctgactagatgtcagcgccaactcccttttcaacccctcctttttctgtgtggcagttgctgtgtggcggttggaaaatgaaagtacctctgattggtcctctcccacgaccaatcagactggccatgggccactacttcatttgcatcgactgaaccaatgggaaacttctagtgggtatttaaaccccg

SEQ ID NO: 216407 - DNA, 252 bp, Homo sapiens
ctgtatcggcacacaacctcctcacatgctccctcaactcccacagcactgacgggtcccaggtttctagcattttagcattatgagaacgttacatcaatgaaagcacagagcatgcaaccttctgagactggcttttgtcactcggcaaaatgcccttgagatctctcctggctgtcgtgcatcaatagttcattcctttctgcggccgagtttcactccaccacgaggctctgagctaaggcttcctgc

SEQ ID NO: 216408 - DNA, 480 bp, Homo sapiens
gtctcaggatacaaaatcaatgtgcaaaaatcacaagcattcttatacaccaataacagacaaacagagagccaaatcatgagtgaactcccattcacaattgcttcaaagagaataaaatacctaggaatccaacttacaaaggatgtgaaggacctcttcaaggagaactataagccactgtaaccattttttaaagtgatctataaatacatttattgtactttattaggagaaaataacagtcttataccattatgtagagcatgatttcattcttctaaatgtactcatgtaaacacatatatatgcacacatagatctatagatatatctatatctgataatcctaggtaagtcagaagagatatactacatttcataactgaattgagtgtctgtggaactcctatagcagaaatcacacttcatttgaaacttcaaaattcccattaaaattctgcagcaatgaagacgcat

SEQ ID NO: 216409 - DNA, 400 bp, Homo sapiens
ctggcattcgctttaatctttctctattaaaaagaattccacagcactcagagaagagagaggaatttaaatatttctttttccacacaacccaaattcatctgactagcatgctgtttcacaagtttagaatacgcctggagcccacgtgcagttattttaagcccctggcttctctttctttgtaaacaccctgtctgggcccacaattacccaccttcaccataactggggaagtctcaggtggccacagtttaccttttgactttttgttattatagaatcagtcagttttgaaatctgattcatttggaatacacagacgtttgtcaccttgctttctgttaacagatgaacagagtttccaatgaattaatgaaatgaaatagaaatattgaca

SEQ ID NO: 216410 - DNA, 515 bp, Homo sapiens
aacaccctgcctagatcaattgggctgagcaaaaccacaggcagcaatcctcaagcccatttctattcttctggataaaaaagacattttttttttttttcaaaatataggggatgtcatctttttcccagccatcttgtgagggaagaagatagcaagacagaaataactccttataatcttttcaaataccaaagcattccacttcccatgcaatcattttgaacctctaacacgagcaaaaactatagctgttatggagaaaagaactcttagtttgaaaagatcgagtactagcatatagaatcccccaaaccactttaaattaatgagtcatacaatatatctgacatgttaccaaatcctccccagacccaaggctcaacagtttttgaaatctcaacacacattttctgaggaattgcagtttggaatgaaactagggcttctggtggagtgatctgtacagtagtcacaggatggtcctttcactgaataaatactttttgagcaac

SEQ ID NO: 216411 - DNA, 255 bp, Homo sapiens
attttacagatgaggaaactgaggcctagagagtcgagtcacctgcccagggtcacacagcatggccagactgccttgctgttggacctagctggggtgcagcctgttctgtcctgtcctcattccgtctcgcagcatttcacggtcatcattccatcatttcttcttcttcttttttttttttttgagacagtctcaccttgttgcccaggctggaatgcagtggcacaatcttgctcactgcaacctccgcct

SEQ ID NO: 216412 - DNA, 283 bp, Homo sapiens
tgtgagaatcactgcaaaatggccagaatttatgtttgtgggaaaatctgagtaattattgaatgactacccagcattgccaattaaaacaaaacttggatgagaccagtcttccaattctgtctgatgaaacataaacggaaagcctttataatgtaatattactgcctgagtgattattttcagaatacaatgatcagccaaatggcttctaattgatctcaaaatatttactgagcctctcagtgtgataatgttctgctgagttgctgatttaccccca

SEQ ID NO: 216413 - DNA, 551 bp, Homo sapiens
caagaaatgaccctaacatagccatcataacaataattccccaaaatcctctcactcatgatgcactgccatcccgcgtcaatccccagtctggcagccacccttctacctccctgcttccatgctgcttagggggccagtcagggcagctggctgtatccaagactgcccgaaatgctcactctgcaccccgaccatggatgctctgagatgcacatgcacagcttcccaggaccctcaccacaaccgctgtgcgaccttcaccatgacctggaggcccaggtccttcccagcttatctctgtggcttacttcaacgcaaagttcctgacatcccacccaggtcaccaacctttccccactgaacttcaactctatgtgcaccttccctcttgatgacctccttcctcatctccttcctcacatccccactccccttccaaagcctaacctctacacccaagctcccaagcccatccccctcactgtgccaaacccttctggaacaaacaggtcctctaggagcttaaggtctaaagaatttacagacca

SEQ ID NO: 216414 - DNA, 425 bp, Homo sapiens
ggagctgggacattctagggcaacggccattctaccccaagccgtagcaaaacaacaggagatctctgcacccttactcaggggtctcccttcacagtccccttcctggctctttcacccctggccttatgctcatcctctctgcaggcctcggggaccaaataccaagctgaagaccaagggccaggttaagagtgcttgttccccaaggctgtctgctcaggccctgcattgggactgggatgcctggcaggcacattggtgccacagctgatggaggaacgtccagacagggtcttcaggctttccctatcccctcctcctcccacccagctgttgactgcatgactggctgctgcctcaaggggccccagcagggggctgccccacagggggtctggagagagcagggagggtgccttcct

SEQ ID NO: 216415 - DNA, 279 bp, Homo sapiens
ctagtcttcagcatggtgcctatgacgcccgcaagagaatattgccaacatgttcttgccttgctagtgccagtacacaaggtatttgatttctccttcacatttctatgtgtaaaatggggcaggctgatgcggttgatatgaaaaagcataaataaaattatcatacgctttggaaagagatgttctgaataataacaagattttgttatttatgctgagcaatatgttttgtcatttctacagtatattctagtattaaaatttatacttgtgcaa

SEQ ID NO: 216416 - DNA, 543 bp, Homo sapiens
cacacaatgtttttatttatcctaagtgaatacctgagtgagattgctagatcacatggtaagtttttatttaactttataagaaattgccaaactgttgtccagtttctataccatttttcttttccctaccctcacataatctttgatttccaagtgttctaggttcttgctgacagttagtactgtcaggtttttcttaaatccattctcgtgtgaaccagtatctgattgtggttttaatttgcatttctccaataatgaatagtgttgaacatctttctgtatgtttcacatttgtataacttcattgatgaaaaatttgcttgtcttttgtccatttaaaaattatatgtatgccatattattgagacataagagttctttacataatctagatacaagtcctttaacagatatatgctacacacattttttttttcaggctgtggcttgtcttctcatttttttaacagtatattttgaaaagcagaagtttttagttacaatgaagtccaatttatctaatatttattttatggg

SEQ ID NO: 216417 - DNA, 365 bp, Homo sapiens
aaacaaaccaataatctactgaagtcaatatagttggtcttgctctgtcacccggcctggaatgcagtggcacaatcacggctcattccagccttgacctcccatactcaagcgaaactcctgcctctgcctccctagtagctgggactacaggtacatgccaccacattgggcccaaggccaggttttaaaaagttgcatctaagtattatttacataggattgattccttgtctgcaatatattctactccaatacaagtaggtggttgatgagttctaatacaagcttccatgttcactagctgtataaacttaggcaagtttaaattatatgtgccttagtttctttttttgagacagagt

SEQ ID NO: 216418 - DNA, 452 bp, Homo sapiens
gcctcccaaagtgctgggattaggattagaggcgtgagccaccgtgcctggccacaagtaatttttaaatggtgtgtgtgtgtatttagtttgctttttaaatgaacaatgatttggaaaaatcttaatccagtggcatgttactggcagtattttggattttcaaacaattttcaggtatttctagtaacaaagtagaggaatggttaacaaataacaaaagataatttcaggccactggcatctggctatggagtatgtgtttgtacttatttggatatgggtgtgcctgtttttctcaatattatttcaagtcaagaaatgaagtcattggccgggtgccatggctcacgcctgtaattccaacactgtgggaggccgaggcaggaggatcgcttgagcccaagagttcgagaccagcctgggcaacatagggagaacctatctctacc

SEQ ID NO: 216419 - DNA, 431 bp, Homo sapiens
ctagagggacaggaagcaaatatagcctacaattggtttagcttactatttagagaaattcttcaagctagatagtaggtagggttatttccctaatttgagaagaaggaattaggagtccaggtaggctgtggcagctggagatcacagggtaaaataccagagaagataagctacatagagaaagaactctagagatctgcacagagtcccccatgagtattcatccaagtactagtaagtgcatacatgtgatgaaagtacccaaggtcatgaaaagaaccacctaaaaagttatagatggaactatccatggtgtccatacatttcctggaatagtgcttgttctcaagagccatagtggaaaatctcataactcattggacattaagttgaatacatagatgaggtttacctcagtcacagggaaa

SEQ ID NO: 216420 - DNA, 1097 bp, Homo sapiens
tgtgggcagatggagacacccaggagaaagaagagggcgaattggaagaggccacccagaaaggacggtgtgtgacactagggagccaagcatggagagccgaggactaacgcttggaaggaaatgtggaccagaaggttccggatgagggaaggactggcggctacactctgccttccgagacaacgaggaataatctcacttcagtcagttcaacccttgtaaaacagctactgtgtgcaagacacggagggaaagctgaagtagagaaaccacagacgctgtcttcaaagggtttaatctaatattagtgatgagaaaaatagggtgcagagcttaaggcatcctggaaaaacgtatgtagcgccacatcgcgaaaatctctcttctgggacccctctcccaaaaacgtttcttcgccctcttctcccccttctgcctccactctttctggacttcagatatctttgagaagcctggacatcaatctgctttagaagactagaaactctgcctttatgtctttaagggaacaatagtccttaactttgatactgtggctctttagctctttttttccctatattttttatatagttttttggtattatttagacctccttaaccccacggtcataaaggtattctcccatcatttttttctatccattagcttcatagttttacttttttacattcagttatctaatccatctggagttctccttcccatatggtgtgagatagggatctaactatatttttctccatggggtgagcaaattttccaacaacccatgtcaaacaatccattctttccaaattggtttggggaagtttccaaatagacatgagtatgttctgagctctctggtttgttcatgtgtcagtaccacaaggttttgtcactgtgggtttttagttagtcatcatgcttgaagggcaagttccccattccaaattcttctgtgttaagattgctttgtctatccacgggcctttatcctcccttataatgtttagagtaagtttgtcaagtttatgagaactgtgttgggttgatgaataaatgcaaggaaaactggcaactgtgcagt

SEQ ID NO: 216421 - DNA, 533 bp, Homo sapiens
gtcaggatctcttgtactagaaatgggtcagaggtggggggatagaagttgattggatgaacaggggctgtctaagctcccagtggtcaggggatggccaatgcaggagaaaggtcagggtcaggactgcttggaagtacccgatatagccaaggaattagtccaggagatgtgagcctgggcaaatcagttttacttttcagtttaacctttcatgtccctggctctgagctaggcaccgaagtgggaagaggcaatgcaggagcggtggtaggaggctgcccctacaagatgtgtgcaagatgggaggtgacccaggcctgagtggggctgagggtagactactctgttagggattctggaattgatccttaattgaatccccaagaagtcctccactgctggcaaggtcaccaagtttgcagcaaaagccagcaagaaatgaagcccaccctcctctctgcagtgtcctcagctcctccttcccccccaataactaaacattcaatgaatgtatgtatttcctaaataaa

SEQ ID NO: 216422 - DNA, 272 bp, Homo sapiens
ggaggagatgctaagtttatcagggatgagggtaaagaggaggtcttagcagaaggcaccagaggtccatgggtgtgtctggggtctatatgggggctgatgtggaacacctaggccaatgtgggggtacctgagctgatgagagtcctggactgatgggtggctgtttctggaagatgaagagggcctgggatgatgtgaaggggactgaggtctacatggctggtgaggaggatctgggcccccccatgggcaatgctgtggtggccctg

SEQ ID NO: 216423 - DNA, 599 bp, Homo sapiens
tgcagaaaagtttgggacctttggctcaaacattctgaaatttccattcaggtagaaatggtgatctacactgttatcaaaaatgtgtttattttggctctgaagtctcttatgtcaaagctaaggaatttagaatgagagaactactttcataagaaaagactaggaaactcacctatttcaaaatctacctaagccctggctcagatttcatctggccaattatccacagggcactaaaaatgcagacagaggattttattttctttgctaagattgatatattcttgataaaactgatatattgttgaatgtatttgataatcaattcatataaggaagcctcatttcttttagtcctgtaggaggtattgaaaatatttgaagctttaagggacagcaaagaataaacatacagaaatttcaacagccatagttgtataaataccggcaaactgaaattctacaaattggagaattgtactcatccacagattaaaaatgagttggcaagtatagttcagttgtcaaaagaggataatatcccaatactcaatatgaataaaacatgtagggtgcatgtagccagaggcaagcat

SEQ ID NO: 216424 - DNA, 476 bp, Homo sapiens
gacttcattttctctgaatatagaactttaggttggcaagtttttttcctatctgtattttgaagatgttattccgttgttgcctggattgaatactttctggcaagatgtcagtagtcatgtttatatataatgtttcctttatataaagtgacctttttctctgggtgcttttaaattttctctttatcattcattttcaacaagttaattatgccttggtgtggagtttgtgtattattgtttaattggggttttcatgaagtttttaaataggtgggtttgtagtttttatcagtttaggaaattctagtcattattcacatttctttttctgttttgttctcttttttggtgttcctccttggtactccaattatacgtggttgattacatgatactttcccagggagacttagtttatttcattattatttatttcattttatgtagattctgatgctgtgtcttaaagt

SEQ ID NO: 216425 - DNA, 604 bp, Homo sapiens
aatgtaattcttgttaaatggaaaatcttgtttttaaaatatgaaggtttagagttttgtttacttttgtcatgtaactggttctgtatttctatgcatgccaattatacacatctctatctgcatttttttttctattttaaccgctgaaggaatatgattatacaatgccatactcaatggtggcagcatttaatttaagtaatggagaagaattaaacattgtagctggatctgtttctgtagtcgaggacaactgtgatgtaactttgaattaaacaaacaaaacaaaacagaagaagactatatatatattttttctttttttagagacagtctcactttgctcccaggctggaatgcagtggctattcagaggcttaatcattgggcactgcagccttgaactctgggcttttttttttttttgagatggagtctcagctctgtcgtccaggctggagtgcagtgactcatgtctcggctcactgtagcctccacctcccccaatcaagcgattgtcctgtctcagcctccagagtagctgggattttaggtgtgcaccaccatgcctggctaatttttgtatttttagtagagacgg

SEQ ID NO: 216426 - DNA, 396 bp, Homo sapiens
atataaatttatatttactcagaaattacaaatttactgagtaaatttatataatacaatataatagtcattaagatatttgaagaagttgccatgtaatacactttttgacacacctttcacagcacacatagcacatgtaataacttttatttgtgttttagagagagggtcttgctctgtagcccaagtggagtgtggtgatgtaatcatagctccatccttgaactcctgtgcccaagcagtcttcccacctcaccctcagagcagccagtattacaggtgcaccaagatgcccaattaattttttaaacagttttcgtagagacaaggtcttgctatgttgcccaggctggtctcaaactcctggcctcaagtaagcctcccaccttggcc

SEQ ID NO: 216427 - DNA, 407 bp, Homo sapiens
caattctcctatattcatatacagttttaacaaaatttgcattaaaataccagcaatgttttctgtagataagattattcgaaaatttataagaaaggtcacaaaaactaaactagcctaagcaattctaaaaaagaagaataaatggacaagaaccagtctactcaaggctaaggctttctacttagcaacagtgatcaagacagtgtgatattggcagaggattagacacacagatcagtggaacagacaaagaatccaaaaagagacccagaaaaatatggccaaatgatttttgatgaagatccaaaatggataaagaatgggcttttcaacaaatagtgcttgagtaactagggaagtgtgggcttacagaaaaaggtactttgtacctaacacattataaa

SEQ ID NO: 216428 - DNA, 505 bp, Homo sapiens
cctacctcatacccaaaaaaattcaaaatggattacagacataatataaaagttaaaaccacaaaacttgtccaggcatggtgtctcatgtatgtaatcttagcactttgggaggcctaggcacgtggatcccttgagctcaggagttgaaggccagcctgagcaacatggtgaaaccttgtcatgaggttttgagacccagtcacaaaaaaacttacaaaacttctagaagacaggaaaaaatatttatgaccaggcagtaggcaattttgttaggtcacagaaaccaagaaccatttttgttaaattagatttcatttgctcattgaaaaaaataaaaaataggcaaggcagactgggagaagatattcgtaacatatctgacaatttgtatccagaacaaataaataaattctgtaacatttaaaaagcaggcaacccaatttttaagacagacaaaagtcttagacactttgtgaaagtagttatacacacggctaattaa

SEQ ID NO: 216429 - DNA, 406 bp, Homo sapiens
tgagccaagatcgtgccactgcactgcagcctggctgacagagtgagattctgtctttaaaaaaaaaattgaccatctgaaccatttctaagtgtatagtcgtgttaagcacattcacgatgttgtgcggcaaatctccaggacgttttcatcttgcaaactaagcctcaatactcattaaacttagcttgacttttgatatgtaattttttatatgttttgtttcctttctgttttattaacatgaagtttctggagcagcagagctgaaggaacccaaacttggactgaagtgactctactaaggtaatgcctccttttgacatcctatctgggccagtggcagacccctctccctgacagtgctgggtccagggctccaggcagccaggggaagatgaagaca

SEQ ID NO: 216430 - DNA, 724 bp, Homo sapiens
cttttctttgctgggaaacttttcatgacaacctccgtttcattacttgttgtctgttcaggttttgggtaccaaaaataatggcaacaacaacttttcaagacatggagagcaaaataacacatgaattgaaacaagaaaatggcaaaatgtggaggaatgaagttaaaatatagcattttcattatattacactttgcttgttagtttgtttacacaatgtctgttgtcttcagtgtaaaataatgcattataagatatgataaccccaaatccaaaagcattcaacagatacataaaaataaaaagcaagaaattaaaacagaccaccagagaaaatcaccttcacttaaaggaagacaggaagaaaagaaagaaggaagaggaggccacaaaacaaccataaaagacataacaaaatggcaggagtaagtctttatttatcagtaataacattgaatatcagtagactaaactctctaaacaaaatacatagagtggctgaatagatattaataaaacaagacccaacaatctgttgcttacaagaaacattcttcacctgtaaagacacaaatagacttaaaataagagatggaaaattatattctttgtaaatggaaacctaaaaagagaaggagtacctatacttatataacacaggtatatttcaacacaaaaactaataaaagagacaccgattgtctctacataatgataaagg

SEQ ID NO: 216431 - DNA, 321 bp, Homo sapiens
cacggtggcgagcgccttaatcccagctacttgggaggcggaggcatgagaatctcttgaacctgggaggagacgtttgcagtgagccaatattgcattaatgaactccaacctggatgatagactgagattccatctcaataaataagtaaatacataaaataaagagaaaaaaagaaagatgaaagaaagaaaaagaaagaaagaaagaagaaagaaagaaagagaaagaaagaaagagaaagaaagagaaagaaagggagaaagaaagaaaaagagagaagtaatgtgctaagttgccctaacatcgatagtaagaac

SEQ ID NO: 216432 - DNA, 778 bp, Homo sapiens
agcattccaaaaaggaggctctgttaattcggtttcgatcaacaagtatttgctgagtgtctattgtgtccggtcagtgctaaggcctgagaatttagaagtgaaacagacccggtttccacccatgccacagaccactccacacctggtctggagtgacactggagggccaggcaggcacaggacagtaacttcgatataaggcagcaagttccacggtggaaggaggtggaaggtgcagatgcacgtacacacaggggttcagggaggcctccctggaagaaatgaagcctgcgaggccctgaaggatcagtaaacagagaggcataaggggcaggagagtaagatgattatgctacatgtaccttattgtgaacccaggaggatttggcctctgtcataaaaggcccccctgtgggttcataaacctcaatttacaaattgtgctttatatatcagttccttataagtttggttagcgtaaattggtttcttagaacttgatcatccctgagtgaactcacaaattcaagtttcagaatgtgcaaacctaagaaacaaacctcatgcttgtggttgagacatcgcactgtcaacatcacaaattctcagcacctgaatgcctggtatactatcaacatatattgttttaaatatgtaaataatagctttctagttatagagagtttgtccctacatttttccacttaatttttacaatcccattcccctgatgaaacaaccccagcctgggcaacatggcaaaatcctgcctcta

SEQ ID NO: 216433 - DNA, 431 bp, Homo sapiens
gcgtggtcgcggccgaggtactctgaaatgtagacatggttgtaaatatgttcaagatgaagaagctgagacatagaaaggaatgtaatttactaagctcacacagctaatacatgtgtgagtttttctcccaaagtatcctctttttgaaatctgtgagttttcataatattaacctggttttcattttctaaaattaataatccaatccctatgccattatacatgtgtgctatttgctctactataaaatacatttctatgatattgtataatttactttttgttctgtgtgtatattttgcctttccatgaatttgaaagcagcttaggacttaaaatccttagtatttctttttatggaagccccattgctactagtgatattacaggcctgattctaaacaagtgtttgctgatgataatgtcaa

SEQ ID NO: 216434 - DNA, 515 bp, Homo sapiens
agtgatgtgtgtcctgaagagctagcagtgaagtctgtgcttcatgcaggaactgacagttcatagaccatggtgaatgaaatctgaaccttgcccttgcggggactgcatctacttaactaaactgactaaagggtcatgattgaaattcaaacatattggaagcccaatatgtttgcagtatgtttcccatattggcaaaggaagaactatctgcttctcggtactgaatcttgcacaactataacaaggaaatgatagcacattttaaagacgacgacatggattttattttgtcaagttgtttttttccattgtgtaaactagcagggtgtggccacagcaagcactattgtttaatcattcagttgaaaactcagcccacacatctctcctcacccagtggacctgctcttttaggataattccatctagctcacaaagccgtactgaagatatttcctgtcttcatgcaaaacacttccatcatctccctgcccaggggaggaaatgga

SEQ ID NO: 216435 - DNA, 453 bp, Homo sapiens
agaactgtcctttgatggggcacgaataggagaggcatttctgggtacctctgaccttataccttggagaggtggtcccctgcccacttccttgttaaacttcttctaaactggtgtttctaatgttcaaacttcagaatttcacatggcccagtaggagttaaagtgatcggccaggcatggtggcttacgcctgtaatcccagcactttgggaggccgaggtggctggatcacgaggtcaggagatcgagaccatcctggctaacatggtgaaaacccatctctactaaaaatagaaaaaaattagccaggtgtggtgatgggcacctgtagtcccagctacttgggaggctgaggcaggagaatggcaggaacctgggaggtggagcttgcagtgagccgagatcacgccactgcactccaacctgggcgacagagcgagactccatctc

SEQ ID NO: 216436 - DNA, 392 bp, Homo sapiens
cctcgaacttctgacttcaggtgatccacccacctcatactcccaaagtgctgggattacaggcatgagccactgtgcccagcctacatgagtatttcttgattaatgaattccaaaagaaaaaatatacttgtaaagagtggcaacatgaaactcaggggatctgaattacagttctgtcactaatggggcatgtgacccattattagctattaatttctttttatttttagagacagaatctcaccctgttgcctaggcaggacggaatgcagtgaagtcatcatagtttactgtaacactgaactcctgggctcaagtgatcctcccacctcagcctcctaagtagctaggactacaggcactcaccaccatgtgtggctaattaaaaa

SEQ ID NO: 216437 - DNA, 459 bp, Homo sapiens
gcttttttccatcaatattataagcaatttttcatgttattaaaacaatccttataatcaccattaaaagattttttctgattataagaatatacaattgctatagaaaatttggaaatctggagaattattaatatgaggtagaaacaattctttggcccagaagcaatactgttaatattttattcactgattcaacaactatttgagggtctgcttttgggtagagaaagaatgttttgggggtgtttgttttagaggtggggtcttgctctgttgccgaggatggagtacaggagctattcacaggtgcaatcatagcacactacagccttgaactcctgaggcgggagaatggtgtgagcccaggaggtggagcttgcagtgggccgagatcgcgccactgcactccagcctgggcgacagagcgggactctgtctcaaaataaaaaaaaaaag

SEQ ID NO: 216438 - DNA, 522 bp, Homo sapiens
tgggaataggccaggcacagtgatcatgcctgtaatcctagcagtttgggaggctgaggcaggagggccacttgatcacttgaggccaagagtttgaacatgcagtgagctatgattatgccactgcactcttgcctaggcaacagagcaaaatcttgtctcaaaaaataataataataataataaaggaataatatcactgaacacataggatagttgtgaagattaattcatacttgtaaagtgtttggaacagtacagcacctaacatgtaacagtcagatattataaagtaaaataatcacagtgattcagtgatttacacatctacgctgaagattatagtgaagttaatagaagatacaaatgctgaactaaaatttatttacagatgtcagatattcaaaccattcgtggaaatgtaaggaaaatcaaaagaagtcttttgtacaacagataccacattacaaaatttgttggcctttataatccccaattagtgaaatgccatatatttgcaat

SEQ ID NO: 216439 - DNA, 691 bp, Homo sapiens
agccatcaccaccctctaattttaaaacattttcaccagcctgataaactgtatacctattagcagtcactcctcattcccctttaactactcagccttaaatacttaaatactcattctgtaatttcgttttcaaatatttggagattttccagcaacagtagtttactttctatctctatagatttgcctattcagtacatttaagataaatggaatcatacaatatgtggagttttgtgactggtgttttgttttttttacttaaaataatattttcaaggttcgtctgtgtagcgtgtatcagtgtcttcaagtgatagtatgcctatacatagtgtaagaaccttaaggtagtctgcttttcttctctttgtgttattgttacaaattttacttctgtatacgttataaaccccacagtgtattgaatttatttttgtctaaaaaaatcagttaaagatacttaaataataaggaaaaaaaaatttttaaattgacccatgtagttaccgtttttggtactcttcattatttatgtatggattcatattactatgtggtatcatttttgtttgcctgaaggatgttaacatttcttgaaatgcaggtgtactggtaataatcagcttttgtatgtctgaaaaaaatgtttattttgcctttatttttgaaagatattttctctggg

SEQ ID NO: 216440 - DNA, 350 bp, Homo sapiens
ttagatggctgattaactccatggataatctccctatggactgattgtccagccatctttgatgttctctctggaaaacattttctcatttttttgcaatatgaatagaatgatagattttccaaatcttcaagttctggttccactttaacagttttttttttcattttcttcctttctttctttctctttctttctttctcttttctttctccttccttccttcctctctttctttctctctttttctttcttctaaattgagacagcatcttggtttgtcacccaagctggagtacagtggctcagctcactgcaatctcgatcttctgggctcaagtgatccttct

SEQ ID NO: 216441 - DNA, 421 bp, Homo sapiens
ttagatggctgattaactccatggataatctccctatggactgattgtccagccatctttgatgttctctctggaaaacattttctcatttttttgcaatatgaatagaatgatagattttccaaatcttcaagttctggttccactttaacagttttttttttcattttcttcctttctttctttctctttctttctttctcttttctttctccttccttccttcctctctttctttctctctctttccttccttccttcctctctctctttctttctctctctctttccttccttccttctttctatctctctttttctttcttctaaattgagacagcatcttggtttgtcacccaagctggagtacagtggctcagctcactgcaatctcgatcttctgggctcaagtgatccttct

SEQ ID NO: 216442 - DNA, 601 bp, Homo sapiens
cacacaaacacaccccaaatacatacacacacccaaaacacacacacatccaaaatatacacacatacacacatccagaatacacacacatccaaaatacacacactcacacgtatcaagatgattacttagcattctgcaacctgctttttcagtccacaatatatgtgggaaaaaatattctaatgtcaatgaattataatatatactatgctccttgcggacttcataaatttccactatttaagcagtttccagttctcagttttaaacaataccctgatgataccctcatataccatctgcacagctctctaattacctccggaaaataagcagtgattactaaagtatatgaacatttaattttgacacagattaccaaaatgcaccccagaaaaaatttttaccaatttatcctcctatcagcaacccatgagaataagcaatccccaacatcaccatcaaccctgggaactgccagctttttcatttgtgctaagcaacaaacaatgaatatctcgttacttggcacttctttttttttttttttttttttttttttttgggaaacggggtttggttttttcccccaagcggg

SEQ ID NO: 216443 - DNA, 508 bp, Homo sapiens
tggagatgaggtctcactgggttgcccaggctggagcatggtggctgttcataggcgtgatcctagtgcactacagcttaaaactcccaggctcagatgatccgtctgcttcagtctctcatgtagctgggactataggcatgtgccaccacacctaactctggcctcatatttcattgagaaaacagatgcaggcagaacctaggcagggaacctccatcagcctcagtcatcacatccatctgcctacctgtatgtgcgcctggttcttgttatgcacaaattgtccctgctgctgttgaagcttggaccctagatcccatctcccttcagttactcagccttcactccagcagttcctttctctctcttgcttcatcagattttccatctcatatggcctttttttttttaacagcctatataatgccattacttttcccatcatgggaatgaacaaaaggaactctcttgatctaattccccctgccagcttctcccccacatc

SEQ ID NO: 216444 - DNA, 735 bp, Homo sapiens
ttagattcatggggacatgtacagtttgttaagtaggtatattgtgtgatgctaaggtttgagatatgaatgatcccatcacccaggtagtgagcacagtacccaacaggtagtttttcagcatcttgtctcttccacatgagctggtccacagatacaacagggcacaggtctaagctgaaaggagaggaagcgtgagccgtgctccaggagtgaatcctagcctaacagtcaccgacatgcctttccttctaccgaccgctcctccgaggcaacgtgttcatgcgctgttaactgttcacctcctaccattgatgtccctggtgctctcaagcacgtttgactcatcaaaaggagtttcacaaagctggttgctgtctttgcaggcctgtttgtgctccaacagggagctgagtttgtcatgagcagtgcctggctgtgtctgccatgctccctgtgtgtgtcccagctccttccctcttattccctgttgatccagccctctgcagaagtcaacaggggcccctcctgctttgtctttccttttcgcaagggaaatgttaggtaggagcaaggcggaaccggactgggagtgtcccggtggcatgtgctgtgggtggtcagcactcgtatgtggttttgaatttccctccagtctgacaaacctgttggagctgccttggcaacaaccccagaaggagaagtttccccctcctggccccacccacagaaaca

SEQ ID NO: 216445 - DNA, 826 bp, Homo sapiens
ttcaccatgcttcggtatctaaagtttttattggggtttcattatatatgtataattgattgaatcactggccaagtgattgaactaaatctccaccctaccccttactctgggtgtcaggctgactcaaagcaccagctatgtaatcacatggttgttctcgctggtaactggcctccatcttgggtcatctcatcttccagcccaaattcaggtgtgatccaagaggctcatgaaaaacaaagatatccctgttacttagggaattctaattattttgagtctgcctcctaggaaccagagacaaaagccagtcaaattctttactataaaacagaaagcatgtgaaaacatactgtgcacgctatgtcacacaacaaacacaagtctattgaacttgccaatggtggagtgttggttggtaggagaggtctgagggcatcattctttgcaaagtgtattctttctgtaccattttcttgaccaattttcaccttttctggggattattcctgttttgcactcaaactactcttaaaaataaagttacagtgcaggaaaacttctttagggcacaataaaggctaaactcgtggaaatggtactcattcatctgcacagaatgaagtctctcaagatgtttccttttattcctactcagttggtgcatgtacccaaaataaacattttgagttcatccaaacacaattcacttttgttctatgtgatggtctctgttttgttgtgtaaactggtgtctctttgcctgaagttgtagtgttgaaagatgagttctcatagtcatttatttagagtgttttagagc

SEQ ID NO: 216446 - DNA, 216 bp, Homo sapiens
agttttttgtgagtagagataaggtcttgctatgttgcccaggctggtcttgaactcctggtctcaagtgatcctcccacctcagcgttccaaattgttgggatgacagatgtgagccaccacgcccagcccataccctggtgttcttgatctcttgtttttcagtagcaaggcagctgcctcgcttctgtgctttctcccccttctctcaacccc

SEQ ID NO: 216447 - DNA, 230 bp, Homo sapiens
atgccgtcttcatgaagacggcatggggctgggggctcctctttcaaaggagcaagtgggcagtgagtgtgccacggactggcctgggctgtggcctccgggtaacccccatcccgactgtcccctctacctctttgtggcttcctctggggccctctttgaggatctttctgtttgtctttgttgctctccccatctgtttccctgtctgtttctggtctctttcctgc

SEQ ID NO: 216448 - DNA, 555 bp, Homo sapiens
atctgcatgctcttatttgtagacaactggtctgagtctttcttcctgggaaatgattaccttaatcataaagaaaccctgctggatgggcaatcttatttatataccttttctcctctgtttccatgggaatctcacctgtctctcatctccagaaatccccaaacagtattagaagccaattgagttcctccaactctgattattcctcctaagggcgtctgaaccaactattctttgctttgaatcccacatcttgcctttggcaaagtcttgtttgtgagagtagatttatttcttctgcatctttgactccgctttctctactgactcttttatctcttcatatgaacatattcattttatttttttctccagcttaaaataaaaaaacttttatattaacttatgcttatatttacttcattcatctcaaaatcatgctacagagatcaaagattttcttctcatactcatatttttagcacacattcaatcaccaatttactttaagttagctgttactgttctcttggttttgaaattttacataac

SEQ ID NO: 216449 - DNA, 139 bp, Homo sapiens
gggaggtccaggaggtagttaggttgttgtaaggagaggaagagcagattcaggtggcatttagggactggaatcagtgggatttggtgccagtgggggtgtggggtgtgagggacaaggatgtcaggcttgtctcgtc

SEQ ID NO: 216450 - DNA, 501 bp, Homo sapiens
tgtttcttatgtaaaattaaggactttgactaaatcagtgacattcatacgtttaagtaaatctcttttttttttaagaatggaacttttttaaattgcataaaaccacattatagaaaacagaagtagtgctgcctgactaaaggaaggatcagtgctctgaagctgtgactttcttatcccttaatccttcagcatcctctgtggaaccttagatttctgtgggacatagcttgaaaaggatcatttcttgaattattacttttataaggcctggatggtaatgctgttgtcatgttacctactctataaagcctatctataatgtttttgtcacagaaatgttatggaaaggagtctcaaaatattggtaaacctgttagtaaaaaaaaaaattgacttgacacctaaaatttctaaaggcattagatatcattatctttatcaccacaaactatctcagaccccgttctaggcatttagtgagagaatacctattct

SEQ ID NO: 216451 - DNA, 530 bp, Homo sapiens
acatttatttatttatttatttgcaatgagacctcataatatccaccaggctggtctcgaactcctgggctcaagagatcctcttgtcttagcctcccaaatagctgggcctacaggtgccagccattctgcctagctagttgatcacttttagggaaggcaacacccacaagatttgttggacctgaacttcttatggtgtgtctgattttaaatgaaatgaattttgctaaagtctcacaaatggttaactcttctgcctttattacatgttttaaatagttgatttatctcttagtttcttgcagcataattggtatattgcttctcttgctaacatgtcattttactgtaggtggttaactgaatgtattctctctgtaaatttcaacaagttgctcataaaattttcccagcagaaactttttgtttcgtatttaaaaactgaatacactgtcctttatttagagagtgtatgtttggaaaatcatcctgtttatttgtaaataaagatgaaccagccagtcaca

SEQ ID NO: 216452 - DNA, 533 bp, Homo sapiens
acatttatttatttatttatttgcaatgagacctcataatatccaccaggctggtctcgaactcctgggctcaagagatcctcttgtcttagcctcccaaatagctgggcctacaggtgccagccattctgcctagctagttgatcacttttagggaaggcaacacccacaagatttgttggacctgaacttcttatggtgtgtctgattttaaatgaaatgaattttgctaaagtctcacaaatggttaactcttctgcctttattacatgttttaaatagttgatttatctcttagtttcttgcagcataattggtatattgcttctcttgctaacatgtcattttactgtaggtggttaactgaatgcaacaatgtggctacaagttgatatgggatccactgacttaagcaacttagttcatctgatctgacatatacttacgatctcttagtctttcattttcaaacagaccgtgagataattcaaacctaaaagcaataaagtgcatatgaagtgtttgttcataaa

SEQ ID NO: 216453 - DNA, 390 bp, Homo sapiens
cgctcagaggcaggtgcccaatatatatttagtgaatgaatgaaagaaagaaagaataaatgcatgaatcaagcaatggccagagctgctgacaactcacaggggagagtgcaggggattagtgaaaactccccacctgagaagatgtcaactcccgaaatgctttggtacacggatgaggtcggtgagccacttctgcattctcttcacaaatccagcgtagtgttacttccttggctcactctccttcattacattaagaagcagcatgtgttgctggtgtctgttggatttccctaatacgaaaaacaggttgccacttgggtctgcagagacatttggatgcattgtatttaaattttgttttcattgaaaatttatagctgccac

SEQ ID NO: 216454 - DNA, 864 bp, Homo sapiens
gctctggaactgcccaggcactgggagggtgagcagatcgggggtacctgtggcatccctccaaactttctccctttgctgccagttaatgaacatggagggccctagtcaggtttgaagatctgagcctcttgtccagccatgctccccaggaagaggaagctccccagcagggagctccaggcttgttcagagctgcctgggctgctgctctcgtgtgctggccagtctggtggcttctaccaggaggcgactggtgtgcactgggccatcttttatccattgcgagaggacatgaggggccatctgattcttctgggaggcagctgcagactggaggacaaatgtccctggattactccgtataatcaatcacctggggctcagcccagtcccaggagttcctgagccttcctatactcagtgggctgtggctaaccaagcaagctgttttgtttccactcaaaaaccacactcagccacttcagaggtggccatgtccagtagaggaaaggccaagcttggagttgggagtcctgaattccagtcctgccacttgttagccgtgtcgcacgtgccattttcagagtctcagatcctcacctgccctgcccgtcccacagacacaattgagaatgtgaatctcaattgctctgaagatgtttcaaaaagggtcccaccatggaaacataaatgcctcatttagagaccccttgcctaaaatgtttggttagaactgttgccgagagccaggagtggtggtggcacatgcctatattcccagctacttgggaggctgaggtggaggatcacttgatcccaggagttcaagaccagcctggacaacatagtgagaccctgtct

SEQ ID NO: 216455 - DNA, 357 bp, Homo sapiens
gcaacagagtgagactccatctcaaaacaaaacaaaacaaaatatggtaaagggtcaagaccgaggtatgtaggctgggcacagtggctcacacctgcaatcccagcactttgggaggctgaagcaggaggattgtttgagccaggagttcaaggccaccctgggcaacatggcaaaatcccatctctacaaaaaatacaacaattagctgggcctggtggcatgtgactgtctgtagtcctggcttcgtggcaggctgagccaagaggctctcttgagctaggaggttgaagccgcagtaagctgtgatcataccactgtactccagcctgcacaacagaacaagacccttgtctt

SEQ ID NO: 216456 - DNA, 264 bp, Homo sapiens
ttcctcagagaccctttccctgaccccaaaactagggaaggtcccttagttatttgctctcacagaccacgcatttacctcagagcatattcactcattcagctgttacttaccaagcacctactgggagctatacactgttctatgtgctagggatacctctgtcagtgaacaacacagacacaaagatccctgcccttgtggagctgaaatctgaatagaggaggtgaaatatacaaaaattataataaataagtaaactag

SEQ ID NO: 216457 - DNA, 670 bp, Homo sapiens
gtgagactctgtcttaagaaaaaaaattatcttgcagaaccttctattccagctgaatgggttcgcacgtaaattttcatcaatttttattgagtgtctatgacgcaaggtttaggactacgcagtgcaaggcttagttaggactaggcagtggagacatgatatgactcagacaaccaggtcccctgccttctgggagaggagatgctaaatgaccaagatcacaattcaccactgaattacaactgtggtaagagttacaaaggagagtgcgctaagaacctgaccttttctgggagacacaggaaaagttctttgagcaagtaatgtttggacacgaaggataagtagaagttaaccagtggaggaaagaacattgtgcgaagatattttgtgttttcccttctctgtgcttttgtgtattcagttccatctgcttatacagcatgcctgtttcaagtatccaaatcctaactcaagatttggctcctggcctggcgcggtggctcacatctgtaatcccagcactttgggtggtggaggcaggtggatcacttgaaatcaggagttcgaggccaggctgagcaacatggtgaaaccccgtctctacaaaaatataaaaattagctggacaggtgcctgtaatcccagctactcagggggctaaggc

SEQ ID NO: 216458 - DNA, 538 bp, Homo sapiens
gggtcttcaaggcccctggagaagcgtgagacatttggcccccaaggaacaattgtctggaggacaaccagggctgcttcaaccaggatggagcctctggggcctcccatgtggatcaagagaaggctgctcacacccccggggtaggcagacactatgtttggaacagagagcacacagacagggatccttctttttatacttaacattgcaaggataatgtaagtacaccaaatgttggccaggcatggtggctcatgcctgaaatcccagcactttggaggccaaggcggacgaatcacctgaggtcaggagttcgagaccagcctggccaacatggtgaaaccccgtggctactggaaatacaaaaattagccaggcttggtggcacatgcctgcaatcccgctactggggaggctgaggcaggagaatcatttgaaccagggaggcggaggttgcagtgagttgaggtcgcaccactgcactccacactccagcctgggtgacagagtgagactccgtctccgaaaaaaaaaa

SEQ ID NO: 216459 - DNA, 409 bp, Homo sapiens
caaaaataatagctatacaaaaagaaatacattaaatttactctatagtagtagttattctttctgagaggtttacacagtattttcctgttcttttgtatgtatgtatttttaaaagaacgtaggcctggcgcagtggctcacgcctataatcccagcactttgggaggccgaggtgggcggatcacgtggtcaggagatcgagaccatcctggctaacacggtaaaaccccgtctctactaaaaacacaaaaacaaaattagccaggcgtggtggcgggcgcctgtagtcccagctaatcaggaggctgaggcaggagaatggcgtgaacccgggaggcgaagcttgcagtgagccgagatcatgccactgcactccagcctgggcgacagagcgagactccgtctc

SEQ ID NO: 216460 - DNA, 454 bp, Homo sapiens
atctcggctcactgcaagctccgcctcccgggttcacgccattctcctgcctcagcctcccgagtagctgggactacaggtgcccgccaccacgccaggctaattttttgtatttttagtagagacggggtttcaccgtgtaagccaggatggtctcgatctcctgacctcgtgatccacccatctcggcctcccaaagtgctgggattacaggcgtgagccaccacgccctgcccagctttcttcttcttaacctttatctggtatgtctttaagaaaaattttttttcaatagctttaggggtacaggtggctttttgttatgtggatgaattatgtagcgatgaattctgagattttagtgcgcctgtcaaaggaggagtgtacattgtacctaatgttcagttttttacccttagcctccctcccacccttccccttctgtcgtcttctc

SEQ ID NO: 216461 - DNA, 295 bp, Homo sapiens
tagtagaatctcagtgagcttttgtggaattgaataatctgttacataaaatcctccttcccaaaaatcaatctgtatcccctgaataaaaattgtaccattttaacaacagaagattactgcagccaagttatatcctgaacatttcactttagtttattagctttttaaatgttaataagaaaatgtcattaaatatatatgtacatacatacataatgccttctaaggtgctggaatcactgcccctatattattcttatgccatctctgaagggtcagaaatgacatttat

SEQ ID NO: 216462 - DNA, 579 bp, Homo sapiens
aaagcaagactcctcctcaaaataaataaataaataaaaaagacaaaagtagcatcttttaatcaatggactattcaataaattatgcttggaaacaacattttaggaagcaagtaaagctacagccctacttcattctttatgccaaaagacctttcagatacaacaaaggttaaaaaggaaattttatgataaaatactagaaaaaggctggataaacgcatttacaaccctagaccagggaatattttaagaaggacacaaaatccagagatcataaaggaaaaagactgataatctgactggctataggaaaactaaaaacttctgtagggccaaaaaataccaaataattaaaaagcaaatgacaaactggagggaaaaaatttatgaatataacaaaaagaactaatgtccaaataaacaaagaatgtgtccaatatgaaaagtaaacataacaacagtccagtagggaaaatggcagttgatgaacaggcaattaagagaaatgagttcatatataaatgaactcataaacagatttacaggcaaagatactgatccctactcaaaatgaaa

SEQ ID NO: 216463 - DNA, 413 bp, Homo sapiens
agcttctcctaggaagtactattgacctgaaccacattaaatggtcatgtgtcatcctcactgtagccccaccatgcaacatcactgggtagctttgttctggctgccagttgttatatgtaatattcgtagccatgagtcgtggcttcctggggccttggttaagctatatgaaactcttatgtaatcagcattccttcttccctagagaaaggattcaagtttttcagggtttgttcattgctcaggacctgacctttaagttgagttgaggtgtgaaagtcccaaagtggtcaagtttgaaagtcccaaagtggtcaagtgtagaggaggggcccaacacagtggctcacgcctataatccagcactttgggaggccaaggcaggcagatcacttgaggcgaggagtttg

SEQ ID NO: 216464 - DNA, 450 bp, Homo sapiens
attcccgtccagcaatgtggctatttttttaaattaattcagttctccctttgtttttcaggtaagaatttatctgtaaagaacaattttggcttttcccaagaatccagtgcaacactgaatagtagccggagggataacatcactattataaaacctacgattggtgctcaaggtattttcagacccctccctggatggatcagctgctcccacccagactgatggtcttgtggcttccactcaggaactgactcagcacaagaggacagctttgactccccattcctgggggaccagtcagcactccccactacctgccccccatccatgagattatccttaaaaaccccagtctccgaattttcagggagactgatctgagcaataataaaacggcagtctcctgtacaaccagctgtgtgaattaaactctttctctgttacaat

SEQ ID NO: 216465 - DNA, 478 bp, Homo sapiens
agcgaacaaaaacattaagacaattgtttttagaatatgcctatgtttatatactttgggtttctggttaccaagtataccaaagataaacattctacctgaagtcagatgatgcgtagtttacatgtggttagacagccttattcttttggtttatgtagttaaatgaatgtttgctgaaaatattctctcggcatttatttataagggaatctaaatttcttttttggtctaaaattttaaaatatcacctttttatttctggctgactgtgagtgaaccaattccttgataatctgctttttcagaaatttttaaataacttttaaaccataaaccaaactattaattgaaatttattgaatcaaatttgttttcttttgtgagttaaactttaaacccattttctccgaaagtatgcttttttttttttttttgctatgtaaaataggcacatagtttgggtttacttttaatt

SEQ ID NO: 216466 - DNA, 347 bp, Homo sapiens
tggctgtcgctcacctccctttcctgggatgagtgttccaagcacttgctttgatgatcaaacagtctcctttttgaaacacattcactctaggctttgacgacaacactgcatttcaaaaagtggtggcatcattaggaaagaaggatcctggctttgtgaccagcataggacatgacacctatttccaccaaatttcattgtgtttttttttttttttaatttttattttttttattgatcattcttgggtgtttctcgcagagggggatttgacagggtcataggacaatagtggagggaaggtcggcagataaacaagtgaacaaaggtctctggttttccta

SEQ ID NO: 216467 - DNA, 513 bp, Homo sapiens
ctacctgcaacattaattttaggggagacccaatagaaccatgagaaggatcaatttctaggcagttctgaccctactaggatttgcatcccacaaacccctgaaacaagagtggatttccattaaggatggtatactctaacatcttagcccctttcccaaaagtgagggcaaaactgtatgctgttccatgaccagccgggtgtagtccatggagcagtgcttggccacagccacctcccaggggagcgggtaacctgctgagtctgcatgggatgctgagcaaaggaacaagtgtccactttggacttggaataggatgtaacccttcttgtaaacagggaagtaaaaatgcccctcccagagccccagacaccaggcggggcacagtcccacatccaaatgcttgggttggagagaaacagagagctgagcagcatgcaaccccttttgctaccaagcaacacagccagccagcattttgcagtccacattgtggggaggtagtactac

SEQ ID NO: 216468 - DNA, 565 bp, Homo sapiens
tactctctctcgccttgttgagccaactcctctgaaaaggtggggccgcgcggaggagaagtagtggggcagagcaggggtgaagcgcagcctacagtcctaggggagccaacaaaggccgagatttgaggtcaccagctctaggcccaggctgagcctaatgttgtttagagtcacagactacgcagaagaaaaccaaggccggggaggggccgtcacttgcccagcgtcgtgctagatctcgggcctccgcctctggctgtgtagtgctccccactaagcccctcgtccccggagtgccacctgcatccacgctaactaggatgctggctgcaactcgtgtttcccgcggccggtgtcgcgggctacctcctccttggaactcgaaaagtgaaagtgtccggaacaaacagacgccgagagggaaacgaaaaaatctggagaaagtcatctctcagtgttaaactgtaaaaaaatataaactgtgtgtagcataccctttgacccagtaatcatatttcggggaaagaaccccttagaaattaaagcatcaattcatgaggat

SEQ ID NO: 216469 - DNA, 426 bp, Homo sapiens
cacaaggatggaacactgcggttgcagggaaaatgtgggaatgtcactctaattgaagacatttagggccccaaattggcattgctgaaaagactgtttgatgtcagctgtgtgagcctgcactgctttctcatcttcgatagaatgcatcttcacagtatgtgtgaagtggcattaaagtaaccagattggtgccagaggccacttagaaattagttccggtgctttggaatcacactttattatttgtttatgatttggggattttattttttgttaaagatacatttctttgattctttcgtagttcgtaagctggattattgagtattcacacacgtgtgtgagatgtgccacccttgaaccttgttacaacgtgggcacattattcacttgacatggattaaaaataaagatgtttcttta

SEQ ID NO: 216470 - DNA, 1058 bp, Homo sapiens
  misc_feature (747)..(747): n is a, c, g, or t
gtgtggtggctcacacctataatcccagcactttgggaggccaaggtaggtggatcacctgaggtcaggagtttgagaccagcctggccaacatgatgaaactccatctctacttaaagaaaaaaaaaaaaaaaaagaaagaaattagctgggtatggtggtgcacgccgtcatctcagctacttgggaggttgaggcaggagaatcagttgaacctgggaggcggaggttgccgtgggccaagactgcaccattgcactccagcctgggcaacaaaagcgaaattccatctcaaaacaaacaaacaaacaaacaaaaaaaccattttataactagttgtttttcaatgaaacaaagattctaatcattttactctatgaataagccctttctagttcagagatttgaaaaagtaatggagagttatcaataaatcaattaaatcagaaacattaaatgattagaatttcctctccttgttagtagtcaccaagtcatgctgattgttactttctacatcaagagaagataaattaatgtacattgaataactcccaccaagtgtcactatctcactctggactcacaactctggtaaaggattttttatatccagttataggccgggcacggtaactcacacctgtaatcccagtactttgtggggccgagatgggtggatctcttgaggccaggagtttgagaccagcctggccaacacagcgaaacccgttttctaaaatcaantatacttgacctggggcacaaattcatggctgaataccccatgcctcacctcggaaaaaaagaccttgttaaaaataaataaattaaattatccgggtaaatggggccggaatcaataaagggcattccctaacaataaccaaccggtttccaagggtttttccaaaaaaaaaccaatgcaaacccctaggggggtaaaaacaggcccgttaaaagggtggaaacacctgtcctcttgtgaaaccctttaatgggtgaagaccccactgtctctcaagtcgctctggcgagatatgccctctctactcgct

SEQ ID NO: 216471 - DNA, 1001 bp, Homo sapiens
gtgtggtggctcacacctataatcccagcactttgggaggccaaggtaggtggatcacctgaggtcaggagtttgagaccagcctggccaacatgatgaaactccatctctacttaaagaaaaaaaaagggaggttgaggcaggagaatcagttgaacctgggaggcggaggttgccgtgggccaagactgcaccattgcactccagcctgggcaacaaaagcgaaattccatctcaaaacaaacaaacaaacaaacaaaaaaaccattttataactagttgtttttcaatgaaacaaagattctaatcattttactctatgaataagccctttctagttcagagatttgaaaaagtaatggagagttatcaataaatcaattaaatcagaaacattaaatgattagaatttcctctccttgttagtagtcaccaagtcatgctgattgttactttctacatcaagagaagataaattaatgtacattgaataactcccaccaagtgtcactatctcactctggactcacaactctggtaaaggattttttatatccagttataggccgggcacggtaactcacacctgtaatcccagtactttgtggggccgagatgggtggatctcttgaggccaggagtttgagaccagcctggccaacacagcgaaaccccgtctctactaaaaatacaaaaattagctgggtgtggtggtgcacgcctgtaaccccagctactactcaggcgcctgaggcacaagaattgcttgaacctggggggcagaagttgcagtgagctgagatcacgccactgccctccagcctgggtgacagagagagactctgtcttaaaaaaataaaaataaaaataaaaataaatccagtgttaaatgaggagacagaaaatcaaattaaattgtccatttccctataactaagttaacaaaaccaggatttacacaaaggtctatatgaccaaaaaaaaaaaaaaaaaaaaaaaaa

SEQ ID NO: 216472 - DNA, 459 bp, Homo sapiens
ttaggcatttcgaaacatataaccattgagggtatatatgatcctgacattaaaataaatttattacaattttattattattacttagtagtattgaacatttactgagctcttcctatttgccaaacactgttctaagtccattaggtgtataatctcatttgtcttcacaaagactatgggttaaggtaaatggtagaagagcaataatctcctagacagattaaatactttatgcaaaggaagccctgtggtaaagagagagttagtatgaataaacatggaaacaagtccaaaaaagctggagtaagaagtgtcttggtggaaatggataaaagtgggaattaaaaggtgtgcaggggccagatcttttaaatgctctggttcaaccttacctttagaaacattctgttatacccattgagcaaaataaagcatcctttcttctttgtttcttga

SEQ ID NO: 216473 - DNA, 371 bp, Homo sapiens
agcgcaggttctgtacttatgaacaagctcatcataaggcattttgagcagtaatgtcctgactgtgcttggagactaacaagaggataaacatttgcagtttgatttgggtccttccatatctccttttctatccttcaaggatctgggaccctgtgttaaaacctttagctatcaaaactccacaaaataataccctccaaaacaacacaaacctcctgagctgcatggatcaatgttgccctttcctacaagcccctagtgaaactcccatctttcgtttcccagatctcatcctgagactatgaagaaattttcctctaaatgtaatgtatactaagtcaaagataaatgacagtggccttttctaa

SEQ ID NO: 216474 - DNA, 368 bp, Homo sapiens
atactgctaccaggctcagagccttcccttgcgctgaggcaaggcaaggatgaacaaggaaggggcaggactcaccacgtggtcaactgcgtgacccagaaatgcctctttgtgttccattttaaattctcatccagtggaaataaggaatctaaaagtctttgaaacgaacgctaggaactctgtctgtagattcccaggaggatgcagttctggtgggagaaagatctggccgtagggccccaggatccacctttgcatctctgcagcctcctggcccagtggccacgccctcattcttttcttagcttgtcgccagcctccatgctctgccccatggttccctccaccaggagcaccctcctctc

SEQ ID NO: 216475 - DNA, 495 bp, Homo sapiens
accagttcagactaaagccagaaagcgctggaagagctttctctgagatggaactgaaagcacactgatgtgtttgaactgagtaagaaaagaaatagacagttggaaaagagttgagaaatggagtactgacgagtgtattttaattaagaatgttttaaaaataaacctaactattaatcccagggaaaaccaaaagctgaggatgaaaaattattgtattatggataagccatgtctcaaaaatgtaaataataactattcatctaacatttgttataactacagtgtacggagaagacagggtatggagtagtatataccaataaatgtgggacgttagagaaaacaaaaagtaggggaaagagtgtaactttgatcttcctcctactccttccaagagtaggaggttagtggctgatacctaaccctgaaaaaaaaaaatcacattacaagcatttaggtcagagatctgttagagatggagattagccg

SEQ ID NO: 216476 - DNA, 411 bp, Homo sapiens
aatggcaggatcttgaggggctaaggaaagctgcagcactgaacagcagtgactgtccttggggatagaagaggggagggggagaatcatttggcaagcatggattacaaatagagaaagtatagatacccatatattttgccacattctttcctacagaagagttatcactgagctcttccctatggttcttcccaatctagaggggccccgagtggaggccacttgagtaatagcatctatgcccatataaacatataaacatacttgcttcaaatcccttttctgccacctgctgcagaaaaggtgtatatcaccaacttccacactcaaggcacatatttgaaatatgcttatagttaatttactatatcttccaaacagattgtctccatatgttttcagttacta

SEQ ID NO: 216477 - DNA, 553 bp, Homo sapiens
ggtaatccggaagagctattcatttgagatcatcctggggtctcttgcccaggatccttatcaaaacactaaaataagtactctttgatttcatgacttcacaatcactattttatcctgtcttcaacatgaaaccatcagtgtttacaccatcagtgtaaaaatgatcagtgaaagactataaaaaagatcaagcctctgtgtttaaaaacgtagctaaaaacatgtatatgacattcaagtaactgagaccaataaagatgttataaattagtctgggtacagtggctcatgcctgtaatcccagcactttgggaggccaaggtgggagattcagttgagaccaggagtcgagaccggcctgagctgaacgtagtgacatcctgtctctacataaaagaaatttaaaaattagcctggtgtggtggtgcacacctgtagtcctaaatacttgggaggctgaggtgggaggatggctggagcccaggagtttaagatgacagcgagctatgatcatgccactgcactccagcctgggagcaataactggtct

SEQ ID NO: 216478 - DNA, 578 bp, Homo sapiens
gttcctatttactactgtacagacctaagttaatgatgagctctaaggaagttcgttcttctctgaccccataatagcgatagcctctttcttcctatgccacttagtacctacagtcaggggtgatgttgaatgcttagccctagatgttatttggggcagaacataaaagttttcccttgttactcatgaagatcagtatggtgtaggttgctttgggccacactaaataagttgtccttgcctagaggagtctggttttgctgttaacaacttcttttccattttcataagtgttcatcatagcacaccataggtgtttactatttagcttttttctggttcttacataccttagttttctgaggttttgtttgattcttcattatccttcactccagctcctgcatctcttgatttggagacatttccttctttggctccgctttctggacattcaggcttaactcaagctaaacttttggtttatggcagtaaatatgtaaaggatttaattgatttgaatttaattgcatttaaccaaagcaattacattttacatgtaaatacatagggaa

SEQ ID NO: 216479 - DNA, 344 bp, Homo sapiens
ctcccacgtctaagctgtgcgtcggaatcatgcaggaggtgtttatttcttggctagttctgaagacatcaagagttgggcaggtgacgatgtgtgtgttaagaaagcactctgggtccgggcatggtggctcacgcctgtaatcccagcactttgggaggccgaggcaggtggatcacttgaggtcaggagttcgagatcaacctggccaccatggtgaaagcccgtctctactaaaagtagaataattagcctgatgcagcaaaaaagggagttgtcaaggctgaaaaaagcaagaaaaagaaggaagaggaggaagatgaggaagatgaagaggatgagga

SEQ ID NO: 216480 - DNA, 166 bp, Homo sapiens
cttatgaaaagaaggctgcgaagctgaaggaaaaatacgaaaaggatattgctgcatatcgagctaaaggaaagcctgatgcagcaaaaaagggagttgtcaaggctgaaaaaagcaagaaaaagaaggaagaggaggaagatgaggaagatgaagaggatgagga

SEQ ID NO: 216481 - DNA, 656 bp, Homo sapiens
tcttgtgccacgcataaaatatactaacaatagttgatgagctaaaaaaaaattgcaaaaaaaactcaatgttttaagaaagtttatgaatttgtgttgggctgcattcaaagccatcctgggctgcatgtgggctgcgggttggacaagcttgctttagcagatggtcccgaagccagagatacagtgatgaatcagctcccacaaggctccctttgggcattatttctattttattttatttttcatcctatccttacttttattctttacaataagccttaatgattcctacattgattgatttttgaatgttaaaccaaccttacatcctaagaataaatcccacttggctatgatatattatctttttatatatcattggatttgacttattaatatttcgtgtaggggttttgtgtgtaggtttatgaagaagattggctggcagatttcctttcttgcaacagctttgtcagatgctgatacctaggttatgctagaagtggtccctctttttctatccccttgaagagtgagtgtaagattgatgtgatttctttcttaaatatttgggagaatttactggagaaattttctgtgcattaagttgaaaggtgttaaattatgtgttcaattaaaaactttttaattca

SEQ ID NO: 216482 - DNA, 270 bp, Homo sapiens
tttacctcttctttgatgtgtaaagcactgaagcagaaagagcttcctccctgtctgagaattattcacctaagagggtggcctgttgtccatgctggtgactaatacttggttcttagcctatcctttggtttcattttctctagtgattggaaaatagcaaagcataagacaagcaaaagatgggcggtgggtaagggaggttgtctgtttgtatgtgtgtgtactttaccttattttcagaataaattatctcccagtttagttgca

SEQ ID NO: 216483 - DNA, 344 bp, Homo sapiens
agcaaagtcatccctctgctccctgagataaatgcagatctgattgcctcctttggagaggttcatcagaaactcaaaacaatgcaaccatttgtctcttatctacccctgaccggaagctccctgcctgcttccagtcttcccgcctttgcttccggttgtcccacctttccggaccaaaccaatgctcatcttgcatatattgattgatgtctcatgtctccctaaaatgtataaaaccaagctgtgctaggaccaccctgagtacctgtggtcaggacctcctgaggctgtgtcatgggtgcacgtccttaactgtggcaaaataaacttcctaaattcac

SEQ ID NO: 216484 - DNA, 176 bp, Homo sapiens
cagtggagtttcaccaaagataatgcttaccttactttcaaagtattgccattccctctgaacatcatccaaacaggtaacttaatagaaagagaatattgccctttgatttcagccttattaaggataatacctcaatttcttatttatatacaaatgggaagaataattacttt

SEQ ID NO: 216485 - DNA, 263 bp, Homo sapiens
ccaggagcagctcggaccgcgctcagaacactcgggacgaggccgccgctccgcaggccttgcgggctggggtcccacgaaacaaaggcggcagccagtggccaggacgggcagcgtggttcacggggccgtggctccctcgggggtcgcgagctcggcgcaaacgagcccctctaccaaggtcgcctagagtcgcgaccccgacatgcggagccgccccaggggggtttctcccgggtccctcctgtcccgaggcggccgct

SEQ ID NO: 216486 - DNA, 397 bp, Homo sapiens
gcagcatgcaatttaaattaactgagagtccagtaatattcaatcttcaagttttgaaaaagccaattacttttatatctaaatagcagaaggtaagactgtatcctcaaggctttctcgagagcttttctttaagtgttcttgacagataatgggatccagcccagtggtaagcttcagatgcagggtgtttccttcaagctttttgttttgtatattgtttagataactgtcataaattggagagaaaagaggctgaacacagatgccgtaattgaagagaacagttttcatgcttacaatccatgatcaaataaaatctctggctatagtgaatttcaatggaacaaaaaagaaattgtggtttagaaagctattaagttcttgctaaagaagc

SEQ ID NO: 216487 - DNA, 417 bp, Homo sapiens
aaatcactgattctcctccatacctgtgcatccttcgacgtccagctctggacctcctcttgcttgaagccttccaggcttactttaatccatattgcttgtcatttattcagcagtcctgggaccatgcaacagcaaaggcagaactgttttgccttcctaccgaggtagaaaacccctgcaaccatgggcctaacacctgtagtctctttggaaatgttagtaaattggtagcccattctgcctaggcaaaatccgcctggcagttgtccaaaaactaagctatctctgacgaaggcggggcatgggaaagtatggattgtaaagcctaactgggaacatcatttactccagcaaacaaagatacggatgtcagaggatcacttgttctgctaaatgtagggagctggagtgaaa

SEQ ID NO: 216488 - DNA, 217 bp, Homo sapiens
ctaacttccacatttctggacccagctgaaccctggaaaacaagcatacctaagaatagaaagaaaaggtacaggcaagcaaggacccccaaagcttgaagtataattagagctggtggagaattaacaggagaggaaagaagagggaacacgaatgccccagtgtcatttctacaactacctgtgtgggtgtttgatgaacagtgtcatacagcaa

SEQ ID NO: 216489 - DNA, 452 bp, Homo sapiens
cttttcaggaatgcaggaagatggacacacggctggggaagtacaatgaaaggccaagtaggcagcctgttctcctcagatcagtcccccacgaacactcattcccgaggactcatccaatactaataagagaatgctcttgtttttgaagaattttctgaaagccatcctgacaaattaagtagagtatgctgaagatagtcagactttgtttttaagaattgaatattctggaagaggctcttcagtccaatctttagttctctccacagagcaaacgaagtgaagtgctgaaggcctggagcccgagctgttcccacacggactccaggacagttaaggcagggttgccttaactaaatctctgacaactgtttcttctgtctttctcctaaaaatggaatgcaggccatctattctagggaaataaaggattctagttatgtgaatcc

SEQ ID NO: 216490 - DNA, 635 bp, Homo sapiens
agcggtggctcacgcctgtaatcccaacacttcaggaggccgaggcgggcggatcacgacggcaggagactgagaccatcttggctaacacggtgaaaccccgtctctactaaaaatacaaaaaaattagccgggcgtggtggcgggcacctgtagtcccagctactcgggaggctgaggcaggagaatggcgtgaacccaggaggtggagcttgcagtgagccgagattgcaccactgcactcccacctgggccacagagcgagactccgtctcaaaaaaaaaaaaaaaaccatattattaactgattatttgatatcaccaaagatatcttattttctgttcaatctcaagacccatgtataagatcctagttaataagcaaaagtatatacaacttactctttaaaccacatacagttattttccttagatatcttatggtggcttaaagattttattatattatttcaggccagtaaaagatggaaatgctggtccataactgcaaaagtcaaatcagaatattttaacataataaacagttatgagtacacatgttctgaatctatggccagccagcccagtaagaatgaaaataatgagtcaattcctatgtgctgtcttttacactgt

SEQ ID NO: 216491 - DNA, 309 bp, Homo sapiens
cgcctataggacagaattgtcaaaggtgaaattctgggtaaagcaaaactccactcaacactaaccagcaactgctgagcttccccaacgccaactaactgggaggaaactgtctttgtgacattgccatttcgaatttatcatttgtctttttattagttgttgttttttgtttgtttgtttgtttttttgacaggttcttggtctgtcacgcaggctggagtgcagtggtgtgatgtcagctcactgcaacctccacctcccggcttcaaacaattctcctacctcggcctcccaggtagctgggac

SEQ ID NO: 216492 - DNA, 715 bp, Homo sapiens
tgtggccgggcttggtggctcacgcctgtaatccagtactttgggaggccaagatgggaaaatctcttagcctaggagtttgagatcagcttaagcaacatagtgacatcttgtatctattaaaaataaaataaagttagacaggcatagtggcatgcaactgcagtcccagctactcagaaagctcaggtggatcgcataagcccaggcagttgaggctccagtgagttgtgatcgtgccactgcactccaacctgggtgactgagtgaaacggtctcaataaaacaaaacaaaataaataaaatgatgatgaagaaacaccataagggcaggtgtggtggctcgtgtctgtaatcccagcactttgggaggctgaggcaggtggatcacccgaggtcaggggtttgagaccagcctggccaacatggtgaaaccccgtctctactaaaaatacaaaaattagctgggcatggtggcagacacctgtattcccagctattcgggaggctgaggcaggagaatcacttgagccagggaggcggagattgcagtgagggacagggtctcattctgccacccaggcttgagtgcagtggcgaaatcttggctcactgcagcctcagatttcccaggttcaagagatcctcctacctcagcctccctggtatcagggaccacaggcacacgccaccacacccagttaactttttgtat

SEQ ID NO: 216493 - DNA, 635 bp, Homo sapiens
tgtggccgggcttggtggctcacgcctgtaatccagtactttgggaggccaagatgggaaaatctcttagcctaggagtttgagatcagcttaagcaacatagtgacatcttgtatctattaaaaataaaataaagttagacaggcatagtggcatgcaactgcagtcccagctactcagaaagctcaggtggatcgcataagcccaggcagttgaggctccagtgagttgtgatcgtgccactgcactccaacctgggtgactgagtgaaacggtctcaataaaacaaaacaaaataaataaaatgatgatgaagaaacaccataagggcaggtgtggtggctcgtgtctgtaatcccagcactttgggaggctgaggcaggtggatcacccgaggtcaggggtttgagaccagcctggccaacatggtgaaaccccgtctctactaaaaatacaaaaattagctgggcatggtggcagacacctgtattcccagctattcgggaggctgaggcaggagaatcacttgagccagggaggcggagattgcagtgagctgagattgtgccactacactccagcctgggcaacagagtaggactccacctcaaaaaaaaaaaaaaaaagaaatgcca

SEQ ID NO: 216494 - DNA, 393 bp, Homo sapiens
ccgggcgccatggctcacgcctgtaatcccagcactttgggaggccgaggcaggcggatcatgaggtcaggagtttgagaccagcctggccaacatagtgaaaccccgtctctactacaaatacaaaaaatagctgagcattgtagtccctgcctgtaatcccagccactcaggaggctgaggcaggagaaccgtttgaaccagggaggcggaggttgcagggagccgagatcgcgccactgcactccagcctgggcaacagagggagactccgtctcaaaaaaaaacaacaaaaaaagagactgaggtggaggattgctggagcccaggagttggactatgaactatgactatgccactgcacttcagcctgagtgacagtgaaaccatgtc

SEQ ID NO: 216495 - DNA, 402 bp, Homo sapiens
cactcaaattctaatgttgattgagcccccactgtgtgtgagacactgagtcctgggaaaagaggggtggacaaaaccctgttctgacctttccaagatgaaatagaagctgttctgccaagcacggtggctcacacctataatcccagcactttgggaggccaaggcaggcagatcgcctgagttcaggagttcaccaccaacctgagcaacatggcaaaaccctatctctacaaaaaaaaaaaaaaaaaaaaaatttaccgggttgtggtggcgtgccctctttgttccccagtctaacgggggaggctgaggcaaatttgtcttgaccccaggaggcaaaggttgcagtgacccaagaccgtgcccatgcaccccagcccgggcaacagagcaaaaccc

SEQ ID NO: 216496 - DNA, 418 bp, Homo sapiens
cttgggtggtggctcatgcctgtaattgcagcactttgggagactgaggcagtcagactgctcgagcttaggaggtcacaggcagcctgcgcaacatggcaaaaccctgtctctacaaaaagttagctgggtatggtgccacacgcctgtggtcccagctactcaggagactgaagtgggaggatcacttgaacccatgaggtcaaggttacagtgagccatgatagcgtaacactgcacttcagcctggacaacagagcgagaccctttctcaaaaataaataaataaagatgatcacaaaaaaatacctatcaagtactatgcttattacctgcatgacaaaataatctgtatgctgacccccaggacacaagtttaccttttacttaatataacaaacctggcacatgtacccat

SEQ ID NO: 216497 - DNA, 561 bp, Homo sapiens
tcttatcaatgttaatttgatatatctataccgactaagcagtcatcaatatcatcttgatattgattattatattttggttctgtaggagaatatccttgtttgtaggaattacacacctgaacacttagggtaaagaagtatcatgttagaacctattcagagatgattctgggggaaatgctctgtaaatttgaaattatttcaaaaaatttttttaataaatgttctttcaggcacattcaccactagagaaattactttctttgagaactacaaagacacaacttttgatataaacctacagcagaataatgtgttttcttattgggattttgagatctattagatacaaaaataagcatgcagaggtttcttaagagatagctttttaaaaacacatttaacacacactgaagatacatacacacacagatatggtaaagaattttaaagtggctggtgtagttgtgcatctactgagatttataggattgtgacctaaaaacagttgggcatttttcaggatttaaaagcaacatcctgaaatttaaaaaaaaa

SEQ ID NO: 216498 - DNA, 458 bp, Homo sapiens
tgagtgcttatagaacaaatgaatgaaggagaggatgcataaataaaatttacgacttttgtctttactctcagagcatgctttatttctcctcttgtagaagaataagaatcaatgttgtaatatctgcctcgacttcaggccctccttcctacagatataccttcaccatatccatatttatctttttttaacccatacttatgaaaaagtatttatctttagctaatattagtagatccaactggggtttagatttcctctttctgcctctcctccatctgcaccctctcttttcctcagcaaacacactgaagtctctcccatctatgtacacatacacatttttatatccccaaacaactttccaattgattaactgtttctcaatttatcttcaaagccaagtacctagaaaaacatcatctaacataagtatctcaccttctcatctccca

SEQ ID NO: 216499 - DNA, 769 bp, Homo sapiens
tcaagttaagatggatccaccaattaactttattatagtaattattttactatgtatatgtatatcaaaagcatgctgtatatcttatttatacaattttcatccatcaaatatacgtcaataaagaaaagatggaaagaaaaagatgaaaatcacactggacagggttaggccctaaatccaatgactggtgatatgagagagctttggagacacacagactcacagaaagaagtctattaaagaagaaacagagattgtagttaagctgccacaaaccaagaaacttgctagcaaccaccagaagatagagggagcaagaaatgattctttttggagccatcggagaaagcctgacactatcgacaccttcagtttggacttctagcctccagaattgtgaaagaataaatgtttgttgtttgaagccacccagtttgtggttatttattatggcagccttaggaaattaacacactcctcatagatttaactttaatttgggtaaggagagtagttgaggtaacggtgggatgctgtagtgttgagttcttgaatataaagaaggcagaataagaattctgttcacctgagagatggaaatttaggacaaagaggaagaaggaaagtgtctagaaaatacatacatatgcatatacacacacgcgcgtatatgtttgtgtgtgtgtatttgccctgactgaacttaaaatcatcttaaataatgctgtcacatgataatattgttgaatgcactggtctcctcccc

SEQ ID NO: 216500 - DNA, 458 bp, Homo sapiens
gagccccctccagtcactggcaccatgcccacatctctttaaccccaaggggaaccctggcagcctgtgctctctcctcccttggggcagctcgagccaaagattaggtcaccaggagatccacagcacactggaggcctgctgatcctctgtgcttgggagtcagagctaattgtgcagtagacctacagatggtttgttgatgcagtaggtcaggggtgtgagatctccaggcagggcggtgttgccgtgggtgtatagctgatgtggcacccatagcctagggttttctgcccagcagacagctgtggggacttcccagttctttttgccttgagtggatctcaataagctattttaaagaagtgacaacttatcttagatcacaaagtaaagaatagaaacaaagaaaaaattttaaaaaaattctctatgctttaactccatccccaccacat

SEQ ID NO: 216501 - DNA, 592 bp, Homo sapiens
agcagaactggacaggaggaggggggctgacagacacgcaggaggagaaaggggaggacagatgaagcagagaagacaagggtggcagccaggaggaaattctgagactatgaaaagggagtctcaagaaaatgagacaaaaaggacagaagttgtcagcaggttcagacaagaaacggagagggagaaggggcctggctagcaaccctccctagatggcggcaacttctggggcatgggaggcacaggtgtgaaggaggcaggggtacctcttttggaagcagaatttcctaggggagagaccttaatgctggaaggccaagagctgaaataagataatggatgcccagtgctttgtaagctataaagcactatacaaattattgtcgttgttatctggttgtgatatcatttacaaagatactgcagaagtacatttagtgacatggaaagatggccaggatgaactatggagtgaaaagagcaggttacagataatataaatgatgccattttttacatttccatgtacaaattcagaaaaaatatctggaagcataaatatgcatctgggtgatgagttgtggatgat

SEQ ID NO: 216502 - DNA, 353 bp, Homo sapiens
gcttctggctattactttctcctaaattgctcataggataaatttcctaccccattataatataagccttggggccgggcacagtggctcacacctgtaatcccagcactttgggaggccgaggtgggtggatctcttgaggtcagaagttcaaaaccagcctggccaacatggtgaaaccttgtttctactaaaaatataaaatagctgggcgtggtggcacgcacctgtaatcccagctactcaggaggctgaggcaggagaatcacctgaacccgggaggcagaggttgtaatgagccaagattgtaccagtgcactccagcctgagcgacagagtgagattctccctca

SEQ ID NO: 216503 - DNA, 370 bp, Homo sapiens
acacttgcattaatattcttataaaagttcacttcccataaatatttttagaattaacatttattataaacatgacatagatgcaagttctaaatctaggaaatttccgtccctttgtctcctaagtccagcttagtgcctgtgctcagctgaggctccgtcaagaggtggcgggggtgagagatggatgggagtgcagttcactagcttcaaggatcccagctctggttggtgggacccagaataggcagaagaaatgagtggctcccagattggaggccccctctcagcagacagggagtagtagagtaaatgcttaggaaaagcaatctgttaattatttatccaagttctcctcttaaaagctatg

SEQ ID NO: 216504 - DNA, 414 bp, Homo sapiens
tgttttacctgaggatttccctcatggacctctttttatctggcaccaaagttgacttttaaattgttctaaagccactcaagcaaaaaagttgataaaacactctgctttcctttacaacccccaacataaaaaaattatttgttggaaaaaaatgttttcttacatgagatgaaacaatattgtctgggcgcggtggctcacacctataatcccagcactttgggagcctgaggcgggtggatcacttgagctcaggagatcaagaccagcctggtcaacatggtgaaaccctgactctgctaaagaaaaatccaaaagttagccgggcatggtggcaggcacctgtagtcctagctactcaggagggtgaggcaggagaatcactgaacctgggaggtggaggctgcagtg

SEQ ID NO: 216505 - DNA, 423 bp, Homo sapiens
gattatgccagggcaatccactgcagtgcctgggcacttatttgtaacctaccattccacaccttggattcattcactgtggtagtaccaacccactggtagttttctatgtgcgccttgttatttcccgattaagaggttttgacagagtgattttgacaaccttgttgtgaatctgaggacattttgattcctttttctgattaaacattaaaagatgaaattcatgcatcctcaagtcaaaatcccaagtccaaaatgatcacagcctaaacaatgatattaaaacatctaatttacattattctatgctctggttacttgattgtagtctgaatactttgtctgcttagaacttgtattccttcttccccattttcctgcctttcctggcttatgtccacttattgttcaagatatctc

SEQ ID NO: 216506 - DNA, 227 bp, Homo sapiens
tggggtgcaggcttgggaaacaggctgcaataatacctgtccaatgaatgaatggaagatgatgaaatctatcctgtcaccagaatgtagttggcactcagagctggtggaatgagtgaactctgagacttctcagcttagaattccctgactctcctttctacaggatagagacagaactttctcatatcaccttcaaggtcttcctgggcccctttcatgtcact

SEQ ID NO: 216507 - DNA, 699 bp, Homo sapiens
cacagtggctcatgcctgtaatcccagcagtttgggaggccgaagtggacggatcacctgaggtcaggagtttgagaccagcctgaccaacatggagaaaccccgtctctactacaaatacaaaaattagccaggtgtggtggcgggcacctgtaatccctgctactcaggaggctgagacaggagaatcacttgaacccgggaggcagaggtgcagtgagccaagatcactccattgcactccagcctgggcaacaagagcaaaactctgtctcaaagaaacgaaacaaaacaagaaaacacatttgataccaactcataaccaagtctggattacttctgtagctcattatcactgataaccaagagttgattaatcaaagtagactacctgtcagtctatgtacagaactaaagataatccttattcttggttgtcgagtacagttttaggaaatggatcatcttaaaatagggtaatacggcctggtgcagtggctcacgcctataatccccagcactttgggaggccgaagcgggtggatcacctgaggtcaggagttcgagaccagcctgaccaacatggagaaaccccatctctactaaaaatacaaaattagccaggcgtcgtgtcacatgtctgtaatcctagctactggggaggctgaggcaggagaatcgcttgaacctgggagttgg

SEQ ID NO: 216508 - DNA, 343 bp, Homo sapiens
atgatgcattttccagcaactcaatggagttctaccttaaagtatttaccattgatccaaaattggaggaactaccttagattcttttaataacctagaaaggattggagcttgtattatttcctaaaccataggcaggcagtctagcttccctgctggatcataagaccaggacagcagagattgggtttgtattgatcagtagtagggaagtattgattgtctaacatctagtaagttgtctttatcagtatagacatagacaaaatacatgttttatgaatgaataaataataagaaccttaagagctgtttttttcccatttaagaaaacaaaaaggaa

SEQ ID NO: 216509 - DNA, 546 bp, Homo sapiens
ggaggcaaatttctacctcttgtacttgatttcttggtgcgggaaagtgttgggggatttagccaaaagaggagtgcaactttccatccttagatgttatgctaaagtgactcggtgattgtacaatgcataacagtaaaacttttctttttagctaaaatgttaagggaattttaatggtttcttctgttgaatttgagacaatccatgccattccctaggtggctaacaaaatgcttgattctgagcaggtaagactggacagaagggtggcagagttaagataaaacaaatcctgaatcaaataacagatattttatattactcttttttaaaattaaatgtttcatgtcactatttctttctaacttagaattacatgatatggacagtggagagctttttggtgcattgctacttgtagtgctaaataaatgggccaaattatgattctaactggataataaacagttgctggtttttctccaaagctatactagggttttaatataagcctgatcttttttcatatgctgggtaagatga

SEQ ID NO: 216510 - DNA, 633 bp, Homo sapiens
ttactgaaatagttaaaaaacctaactaagcccctggtgcaatggtaacataaggaatttgcctttttatgtttggataaactcaattttaaaaaaaaaaaaaaaaaaaaaaaaaaaaaaaaaaaaaaaaaaaaaaaaaaaaaaaaaaaaaaaaaaaaaaaaaaaaaaaaaaaaaaaaaaaaaaaaaaaaaaaaaaaaaaaaaaaaaacaaaaaaaaaaaaaaaaaaaaaaaaaagccccaattttgctactaattggaaaaaatcccctaattggggggcttttcaaaattataggggcgctttttataaaaccgattgctgtaaaaaaatctgggttacccaaaattaatcctctttacaaaaaaacccttctttctaatttcgtaaaatacaaaagacaccccacaaatttctttttcaaaaaaagtgcacccctctaatacccacaacaaaacttcgaggcccaatatttttcaaaaactccgataaatatttctttaaacaacattctttttctaaccaaatggcgcaattctgaaaaacctctttaaataaaaaataatccccctcaataagccctggcctcctccccatctacacgatcctctttctagggcgctccccccttggc

SEQ ID NO: 216511 - DNA, 287 bp, Homo sapiens
tgccatttgaccctttggatttctctgtgataggctgaatgaggcagactgcctgtcagaaaggattgcttgagtatcttgtcagaaatttcttttcattctttctcatccaaagtaagtcacctactaactgttcctgaactgttctcattggctttctgggagtaactccctagacagggagtctcaaaactgagaaccatgttcagaactctttggcttcctcagaccctgggaagggtccaccagctcttccttcccagctctttgcttggtccgctcgttcc

SEQ ID NO: 216512 - DNA, 464 bp, Homo sapiens
gctgtaggtatggctgatgccctgaagagttgaagttggcagggaaggtgcccagaaaattttggattgaagatttcatggcaagtctctggccagtggcctagcccgggtaagccatgctatgctcacctccccacagccccctctcgcctttttttttttttttttttttaccttgactggaagcacaagcagaaactgggacatgagcaccaggagaccagatttccatggtcccgttgggggcatggggttggggagaggttgcagaggagggctctggaggggagcaactgtcacagctgtgagaggtgggggtgagcaggcagtcagggctgttccctccagaatcctggggtgtcctctgcacttctgcgccaagctggagtgctagtgtgatggacaaggtggtaagagagctgaaagagcacgagcataacaagaaagacagaggcagaagcaaa

SEQ ID NO: 216513 - DNA, 261 bp, Homo sapiens
caatgccatcagtcaaagtacagcaaatgaaatgaaagacattcgtgagcaaagttgaagcgctagaaagataaaaagaagcttaagagccttaaagtggtgttaattgaaaatgtttatttcgtaggagacaagttgtattatgatgatttcttttatccttcagcttctttaactacatgctgggcaatattatattccccttatgtttcaaaataacaataatatgcctgtggactgaaataaaaacatttagactat

SEQ ID NO: 216514 - DNA, 252 bp, Homo sapiens
tgcttctctgaactcatgcctgcaccttttctgctggaagcctgaacaatgatgcagagatactgttttctttgttgtagaaaacagcagaaggtctgtgctcacgagggcaatattaggtcctcatcagctgtggcttgttatctccagcacatcaatgaatggagaaaataagatttaaacaaagatcagtgtctccattctctaacattttactcaaaatattggttaggttagactccacacccacca

SEQ ID NO: 216515 - DNA, 451 bp, Homo sapiens
tgtcaataacattatttcctaaactctcagaaggaaggatgagtttatacttcttacgtatgagagaagtgaataggaaaaccaccaccctgcctaaatgacaaaattacatacaacacttcagtgtgcccttgaactacagtaagtactcaagaacatgtttcttccatggaacttagctctaagagtggctacaaagatgtatgtaaatacctgtaaaacaaagttggaaattctcttgatctgcattatctattactgtatatggctgttaagcactgaaatgtagctagttcaaattcagatgtgctattaaagtgtaaaatacattttgaaggcacagtacaaattttaaaaaggatataaaatgtctcattattagtttttatattgattatgttgaaataatactatttggggtatgctgggttaaataaattatactattaac

SEQ ID NO: 216516 - DNA, 174 bp, Homo sapiens
tgtcaataacattatttcctaaactctcagaaggaaggatgagtttatacttcttacgtatgagagaagtgaataggaaaaccaccaccctgcctcccaggttcaagcaattcttatgcctcagcctcccaactagctgaaattacaggcatgcactaccacgcgctaattctt

SEQ ID NO: 216517 - DNA, 1179 bp, Homo sapiens
tctcctcttctgtatcacatcagttctatcaccaagtcttctaagtactctctccaaaatttacccccaatatattgaattcctctccatttctacagctcctgtgaggaataactaacagtggatatagttggattgcttggttcttgaaagttcacttgttccctcccatccctagggctgaattattgtaaccaaggaagtgagaattcagaaaggtaagtatcagggtagacttagagattgtaatactgaaatgcttactcccagagttgtatccccatgactctctaccctactcatcagtagagatacaaaagctaggtgatgctaggctgtagccccttgttcctgcagtgttcctttgtagctgatgtgcctggtctccctggggagtatgaattcagaggggaacatctgcatttcctgtctggagtgtagtcactataagagaaaagtaacaaaccgaacaacatggagcaggtaaagcaaaattattggaatagtcagaataaaatttagctataagcatattaaatattctcgaaaaaatagagcatgctagaaacatgaagcgagaaggagaaaccataaagaacaacaaacaggagctagttggggatagaggacacaatcattagagaactcaggaaatggagtggatagtatgtggatacaactgaagaacgtgtaggcaagctagaatgtccactcagatctcccacaagttatcacgaaaggatagaagcagaaaatagacaagaaaaagcaataaagtggatagagaagtgttaatatatgtgtaataaggatctcggagagaaaaaagtgataaattaagaccaagattttcttagaaatggagaaggagttgagagttgagattgagagggcttttaatgccaagggaatataactgaataagtgtatacataagcagttatattgagacctttagaatgtatttaaaatcataagttccaggaacaatgttacctgccagaaataaaaaaaagctagaaaggtttaagatgaaagaatggaaaaagatggccaggtacagtggctcatgcctgtaataccagcattttgggaggcagaggccagaggatcgtttgagcctgggagcttgagaccagcctggacaacaaagtgagaccctgtccctttaaaaaaaaa

SEQ ID NO: 216518 - DNA, 1361 bp, Homo sapiens
gctatttgaaaggtaagactttggttagtttggggccattctgatgtcttcatgagtgggaagaaaacttttgctatgacctaatcatatgtgatccagaagaattaccattaactttatttcagaatttagacttccaaatcaggttaatcctccaattaaaagaaagattcagagtgaattttttaaaaggcaaggcagttatatgttgcttacaagaaactaaacataaaggcacagataagttggaagtaagagggaaaaagacatgcgaatactaagtataagagatctagagcagctactgtgaatatcagacaaaatagacttcggaacaggaagtagaaccagagatgaagaacctttcattatgataaaggagtcagttcgtcaggaagatagaataatcaaatgttctcaatcaataaagagacctttagagtgtacatgaagcgaaacctgacagaaatgagaaaaaatgtcacaagtagagttggaaatgttaacagtccccctcagtaatatcagtaataggaaaatctggaaaattcccaaatatttggtagcatatctaaataaggcttccatcaaagaagaaattataaggaaaattaggaactattttcaatggagtgaatatgcaatatatcccacaattatttgtgggatacattatgatatgtatattgtgggatatattgtgcagttaaagcaccacttacaggaattatgtacagttggcccttgaacaatgtgggggttaggagtgctgactctcccctgagcaaaaattcacatataactatggagtctccaaaagcttaactgcccatatcctactattaactggaagccttaccaataatagtcagttaacacagatcttgtatgttatgtgtattatatactgtactgttagaataaagtaggctataaagacaaatgaaaatgttactaagaaaatcataaggaagagaaaatatttttactactcactaagtggaagtggatcatcacaagggttttcatccgcatcatcttcctgttgtctaggcagagcaggaggaagaggggtcagtcttgctgtgtcaggggcggcagatgtggaagaaaaccctgtacgagtgggcctgtgcagctcaaactcatgttgctcaagggtcaactgtactttttaatgcttatagcagaagcgaagaaaggtatgaaatcagtgatctaatcttttaagaagctataaattggcccagtgagggggctcatgctggtaatcccagcacttggcgggcaaagacaggaggatcgcttgaggccaggagttagagaccagcctgggaacatacaagactcccctctctaca

SEQ ID NO: 216519 - DNA, 571 bp, Homo sapiens
atcacctagacaggtaaaagatgagcaatttgagctaccactgcaatctagcgctatccccaaacagactactgtcctctcagcaaattaagtactcagaagtacttaacaggaagtacttaatagaaatgtgaaactaccagtcaagttaaaagaaaaaaattaaggcacccagctcaggtaagtgcatttttcaagtagttttcaacctagccagtgttccagaaacaatttcaacactctcctgaggatactcacctgaaacagcctcaagtttagcatccttctaagagcttcagtaaataacgtccttgcaagggatctatataacatgtttttcttacatagaaggaaaacaagatcacacagataaactttgtaacaccaaaaataattaaagctctgtggatatttatctgcattagtatcctcctcaaagacacactacaaatgaactatcatggtctcatctctgaaaaatgataagtcttaaattctgctcatatatttcaaagccactccttaaaacctagacaggccggcgtggtggctcacgcctgtaatcccagca

SEQ ID NO: 216520 - DNA, 867 bp, Homo sapiens
  misc_feature (549)..(549): n is a, c, g, or t
  misc_feature (610)..(610): n is a, c, g, or t
  misc_feature (629)..(629): n is a, c, g, or t
  misc_feature (681)..(681): n is a, c, g, or t
  misc_feature (779)..(779): n is a, c, g, or t
  misc_feature (804)..(804): n is a, c, g, or t
gtggggcctttgtatctcactcccgccacagcttgggatcggtctctgctgttttacgtcctccacctcgggagcccccggtgactgtcacagcctcttgccctgtgatctgcaggttctgggagacgcacagctaagatgccaggacatcctggaagctgggaaaagatggagtttcactcttgttgcccaggctggagtgcattatcccaatctcggcttactacaacctccgcctcccaggttctgacaacaaaggagattgtgacatattgctgggcctaacactaaggtgatgttagttatatgctttggctgtgcccttggaaggcattgagacatactgctgtgcccagcaccaagatgatgtaacgtgactcttctgcttcaggcctgccaaaagaaaagattgtgacagatcactggacccagcacctaggtaggattgtgacatatatctggccaagcgcacagatgtaatgatgactgtcataccttgaagaagccaatagcaagagagaatgttgctctcaggcttaggaaaatgangaagtctttctgtacaaaagtcataaagaattactactctctcacatatattacgccctantgtgttacagagaatgtcntaacagggcccagcacacaaagtgaagattggggtttgtcctatgcacactncaccaaaccttttacagttgtcaaccctggaccaattgacaagagtctgctaagtggaagggtcctgaaattacaatgtggaacacaagtcccgcaantttgggaatttgtgacctggtcaanatggtgaaacatcctgggctaacaagtttgggaatgggggactccattttcctaaatccaagc

SEQ ID NO: 216521 - DNA, 309 bp, Homo sapiens
gtggggcctttgtatctcactcccgccacagcttgggatcggtctctgctgttttacgtcctccacctcgggagcccccggtgactgtcacagcctcttgccctgtgatctgcaggttctgggagacgcacagctaagatgccaggacatcctggaagctgggaaaagatggagtttcactcttgttgcccaggctggagtgcattatcccaatctcggcttactacaacctccgcctcccaggttcaagtgattctcctacctcagcctcctgagtagctgggattacaagcacctgccaccacaccc

SEQ ID NO: 216522 - DNA, 441 bp, Homo sapiens
agctctgccaaggcactggacaaagaagggatgaaattaaagttagttctgggctgggcatggtggctcagctgcaatcccagccctttgggaggctaaggcaggaggactgcttgagcccaagaatttgagaccagcttatgcaacatagagagaccccatctttttttttttttttaagtaaaaattagttcctctacctgatactaatgacctataagacacgtgtaaggtttatacaggatgctatgagggaacgagacaattttatcaaattaatactgggaagttctatcttaggcctaacttaaatccttcatgttacagtttaagcccagtcccacttgggttaatacatgtttgtaaaaagctttcactccttacaatgaaaggtactagagcaaagccaagtattactaagctgagaaccagggctcacag

SEQ ID NO: 216523 - DNA, 600 bp, Homo sapiens
ccagacctctcctgcccacgtgtttctcccatcagaactgagagagatgttcaggcagttcccagacagcccacaagaaacacgcctttaagccaggggtgctcaaacttgttcccaagacgatggtgacatgctggggtggggagaaaccactgctatgccttcttcctgaccgaccagttgttttcatttatcaatctgagaatccatcgaaggtgatatcagggtgacataaatgaggcacttcctgtgacaaacttaaggcgacacttgctcccattgttgtacaaggctgaccttgcatttacatgggcttgagagcgcaccaccttgaattttgtgtcccaggtatatctcttgccctgtcccagtccaggccatggaacacatgtacagaagaaaccacagagtgatgtacccagcaatcaggggcctgccacctgagtccctccttcaggggtggaccaccccaaccctgactgaccctagccagggttttccgtgaagcttgccccaaacacttctcatccacttattcctgaggctaaaataaaaatcgtagccagaagcagttgtttcagctgtgatagcaagcagtgg

SEQ ID NO: 216524 - DNA, 752 bp, Homo sapiens
ctgggcatggtggtgcatgcctgtagtcccacctaccagggaggccaagatgggaggattacttgagcccaggaggtcgagggtgcagtgagccatgttcgcaccattgtactccaccctgggtgacagaatgagatcctgtctctaactaaccaactaaatcaagcaaacattgccaaaacatgatactgagagcacatacaccagtttttttatttagaaatgaatataaggatctgatcctcaaagtcctgtgtatattattggtatgtatatttggtatatattaataaacaattgtgcatgaacacacctcttactataaaatgaggtatacacctgggttgttatttgattttggtgatatgtattttaaataacaatgtctcttgaaggacactgtgtataggaaacccgtaaagtcatgtttgcattaatctttcttggaaataattaaattaatattacaaattaaatgccaattaaggcactttttttcttcaaacaaaagggaaataatttatatagactcaaatatttttaatattttgataatacttttcattttatatgtttcacatttcctttttggagaattttacatgcatcaaattgttttgactaagttcattaatatgaaaatgaatacgaaatgtatattaacataggaaacatttaaaacaaaacttgggtacttaacattttcataactctcagaaattttaagtattttatgtatttttaagtggtgt

SEQ ID NO: 216525 - DNA, 425 bp, Homo sapiens
ctggaaaatttagtgttattggaatcaaaggagaaaataatttcaagaaggaaaaggtggatctataacatttattgctatagagaagtaaaggagaatgtagattagggagcagttttaaaacaactgatggccacgttttacatattcttgatgtatatgttgaattacatgtcaaggatatgtaatgtaatttcattttttaaatatttttatgcagtatattttcacatttttgtgttttatgtcagatttagaaacttcaaggagatattaaaatgatacacagataaattttcatttttcaagaaacttattgtgaactgcttagttttttattcttctttccccacatcttaagtgcatgcatttgtttgattgtttttaattaaaacttgacatatatttttattatgtaattgaat

SEQ ID NO: 216526 - DNA, 696 bp, Homo sapiens
tacaaaaataaatgtaaaagcccctgctcttcagtctggagagggaaatagacgtgcacaaataatacaagtcaaagagggaaaagtactgcaaattcattgaacatagaaaagctggtctttagccttttttaaaaaggggctgataaaatatagtcccccatgtagtttatccataatacatagcgtgccacttacaagctaaaaagccctatgaaaaatgaggcgttttaactaccaccaccaccaacaacaaaaagcatcgtgagggaaatactggtaaattgggccttggtttgtgagaaacttcagcgcaggcctagatcctgggggaggggagaagaggaacgccttcagtgagtgtcaataatttttaagtttatacttaactactcattaagttctttttgatataagttctttttgatacttgttagtgtttcactttttttttttttttttgagacggagtctcgctctgtcccccaggctggagtgcagtggcgcggagtctcgctctgtcccccaggctggagtgcagtggcgcgatctcggctcactgcaagctccgccttccaggttcacaccattctcctgtctcagcctccctagtagctgggactacaggtggccgccaccacgcccggctaattcttttgtattttttagtagagatgaggtttcaccaggttagcc

SEQ ID NO: 216527 - DNA, 296 bp, Homo sapiens
tactatttgcgctgatttgtcatcccctaggcatagtcagaaataatatgaatgtccggccaccttgaaagcccttgcagtgtttagaaaatctgtactctccaatatgacagccacaagccacatgcgcctattgagcacttgaaaagtggctccttgagatatgctgtatgtgtacactctggattccaagacttagtatggaaaaaaaaatgtaaatatctcattaacaatttttattgattacgtattgaaatactaatattttcatatattggctaaaataaaatgtatta

SEQ ID NO: 216528 - DNA, 559 bp, Homo sapiens
agttaataatatatcatatagtttcaaatatcgaatgttcccaacacaaagaaatgataaacgtttgagagaatggatatgctgcatgctattatgtgaccactatacatttaatgtagcacaacatcactatgtaccccataaatatgtacaattctgatgtgttaatttaacaaatgctgttacaaagataaagccctgcattatgcataccaggcagacattggtgctactggaattccatcagtccaggcattggatcccagagaggattcaattctgctgttcccctttcttatctgggcccacggagcccttgcccttcaggagaaaagtctctccttgtcccagacttcaaagccacaggcacagaccagagcctgaggcaggagggtgtgtgtgcagcccagtggtgcaagggcagacagggctctgagactctgcctgctcctcagtgatcactccctcatctttgtcatcctccaattgggtctaaaggcaacacactttggatacctaaaaactgacaacaaccaataaatgtctttatgagaagtga

SEQ ID NO: 216529 - DNA, 340 bp, Homo sapiens
aatgtaagacctgctactagaagaaaatattggggaaacactcacagacattggtctacacaaagacttttttatataagaccataaaagcacaggcaacaaaagcaagactccaccaaaaaactgttagaactgaaaaatgaattcagtcagacaactgagattacatcaaaataaagtttctgtgcagcaaaggaaacaataacatgaagagaccacccacaagacgggagaaaatatttgcaaacaacccatctgacaggggattagtattctcttatataattatatatatgagaatatataagaacatataaggagctcagacaactcaatagca

SEQ ID NO: 216530 - DNA, 701 bp, Homo sapiens
ccaaatgttttctagagtagcataaataactgattcaccatactttttacacactacactgtcaattctagtataaactaaggacaaatcagataaactaaagtattactcaacatcaaacgaaaatgtcaccgtgaatggcactgttaacttacagcaaaggaaataaacctgaatcactgatcaaggatatcaaatctggatgatgcaaagtaaaaatcaattataaaatctcaggccactgcttcctaaatggccaagacccaaatccaattcaacactttcattaaatccagttctaccagcttcctgatgcatgatcctacagggatatgctcttggttcctttgtctgatatcacttggaataatgccttggcactcagacctaatgaaggaaggtataccatatccttgtccatttggtttcaattcaaatgcacccacatttacattttcccccaccatacccacatttcttagtgaataattactggggccggatgcggtggctcacacctataatcccagcactttgggaggccaaggcgggaggactgcttgaggccaggagttcgagtccagcctgggtaacatggcgaaaccttgtctctacaaaaattacaaaaaatagctgggtgtggtggcacgtgcctgtggtcccacctactatggaggctgaggttggaggatcacttgagc

SEQ ID NO: 216531 - DNA, 249 bp, Homo sapiens
aactgacgtcagagaattgatagatataggtaaaaagtcacacatctggtgttagaagtgaagtgttctgcaaatgtagagaaaaaggaactgtttttttcttctttactagtccaggatacttctgtgtattgcagacatgattcacagcaggcgctggtcaagtcagcataggtaaaacttagaaataaggttacactctgatataacattaaaggaaataatctctgggtgtggtggctcatgtct

SEQ ID NO: 216532 - DNA, 541 bp, Homo sapiens
aattggtcaaaaagcaaaggcatcgggtagattattatttctttctccaatgctgtaatggaaataatttccttaatgtcataaacccatttatttgtttaattaatttaaaaaatttaaaacttatagcacaaaaatcaaactgatagctttaaagaattcagcctttttctctataaacaggaaaacttctgccagccatttctcctattgaacaagcatatcattcacttagggagaggtatttgggtttgcttttctgttcttttgtgttgatgaattgcaggtttttcagaccccatactttcatcacataattttctgacctcaattatgcttctcagaatacaacaggtaatgagtaacggaattgttcatagtgcttttaaagttgcttttaaataatgagataaaaatatattatagaattttctaccagaacatcttgcattcatcaaggttggatatcaattggaatttcttaaatctatgccttaaaccttaacctttgaattgcttttacgctattactgaaaaaaaa

SEQ ID NO: 216533 - DNA, 789 bp, Homo sapiens
taattttttttgtatttttagtagagatggggtttcaccatgttggtcaggctggtctcgaactcctgacctcaagtgatctacctgcctcagcctcccaaagtgctgggattataggcatgagcctgtaataaatagcacctggcctattattttgagacagtttcattctgctgcccagtctggagtgcagtggcatgatcttggttcactgcaacctccgccttctgagtttgagtgattcccgtgcctcagccttccaagtagctgggattacaggcatatgccactgcgcccagctaatttttgtatttttagtagagacaaggttttaccatgttggccaggctggtctcgaactcctgacctcaagtgatccgcccaccttggcctcccaaagtgctgggattacaggcgtgagccaccatacctggcctatattatcaatttaaatgattttatgccaaattaaaaacaagtggtcaccctaccaataaatatacgtatatatctttttcttgaactttccctaaggagatgtttatataatttccaagttatgtaatgtgaccaactctacccttcagttttctcatcagtaaaacaaagataattgaagtagaactattccaaaactgggattaacaaattctatagttctacagctagttccatagaatgttaactaatagtccaacaatatgatatgtttgggaattgctgggttaaccaaaatcttaaaaactttttgtgggtaagactcttcagtattcctatcctaatatttgt

SEQ ID NO: 216534 - DNA, 273 bp, Homo sapiens
tgtatctgggcaggggcagagggagaagtggaggccattgttggcatcctgggaatgactcactgtagctcagagattttcccaccccaagaggaaccgatcagtagttaggagacttccttctgcaactcgggaatttataaccagaggagaatgagttttctctgctccttagaccataaagcaaataagcccatttactctccttcaaaatcagaacagctgctgcttttacttccttttccagctttgccttctcttccagctgccttc

SEQ ID NO: 216535 - DNA, 398 bp, Homo sapiens
gcctcccaaaattctgggattacaggcgtgagccaccacacccggccgtgtctgacactatgttcttattgcagggacactggtgccttcccacaatgcagcaaccaatatacctggtgggggtgaactttgcctctcattaaaaacatccagcccaggttctgaaaggaaattgcagagcaggataagtccaaccacctgatgtgtcctcacagacaattatgcctgactccctccacctgcacctcccaggctgctggtgggtgcaaatctgacaggcaggatgtctgctgtgtccacactgcagagagaacagagccagggaaggcagggggatatcaccagtcccctcaccctgaccccactgcaagcccagcccttggtgtctttcctcgagc

SEQ ID NO: 216536 - DNA, 245 bp, Homo sapiens
caacttggggcctggtatacactttgagtccagggtccacctggggactgacgtctgcctggaggactgacgtcctcctgagtgaggtgggaggatctctggagctcaagaggttgagaccacagtgagctgtgattgtgccactgccctccagtctgggtgacagagtgagaccctgtctcaaacaaataaacaaaaaagccacacaaattatatagctatacaaaaatattttgtttcttttt

SEQ ID NO: 216537 - DNA, 568 bp, Homo sapiens
tgaagatcttcacaacataaatcatatttacttggatccaaaaataatcataggttatcacagtaaagtgtacatcttatgggaagtccttgagtggtattaacttttaaatattatatttaggatatgagtatatattttctttcacacctgtacgtaagtaaactttggaataatttttagtaaaagcttatattgtaaaaattgtttatgttttgcctatttcatttattacattaggactcaatttttaagttaatacctacttttacatttttttatgttccttcatacattcctgaggtatgtaataggaaaggacatatgtaataggaaaggatatattttaattcatatgtattaaatgctgctaactagaaaccaggataatctagggcagcccattaaaccctgtatcagtcggttatcaatttttaaaaaaattaatgtgataagggccagtcaattgagatgcattaaataagaacatgacagctattcctggaataaagctggaataattatttaaaatacttttaaattacattatttaatttaaaattcaaat

SEQ ID NO: 216538 - DNA, 484 bp, Homo sapiens
tgcaacttccgcctaccggattcaagtgattctcttgcctcagcctctcctgcagctccactaccactcccggctaagttttgtatttttagtagagacggggtttcgccatactcttgaattcctgacctcaggtgatccacccgcctcggcctcccaaagtgctgggcttacaggcatgaaccaccactcccggcgagaacttttgaggtctgtctgtacaaaggcttcaatatcgttttccctaaaatgaggaaacagttggacacattacatcatggaattattcattgatggttattgatttccctgactttattagtaacacgtgaattttttaagattccacaaaaacaaaagaacaaaataaaagtcccaccatccagaagtagctactttatactttggtatttccttccagtcttttttatttttccctctgttatgtgtatgcataagaaatgttatcatactttattctgtc

SEQ ID NO: 216539 - DNA, 193 bp, Homo sapiens
cagagtggagtaatagacactggagactcagaagggtgggagagtgggagagggtgagggataagaaattacttaatggctacaatgtccattattcaagtaatggttataataaaagcccagacttcaccactacaaaataagtttacataacaaaactgcatttgcactccttaacattattacaaataca

SEQ ID NO: 216540 - DNA, 336 bp, Homo sapiens
cagactcaggcatgtccttcaggatgcattccagaagaaagccttgttatcctaggagatgacacctccatgcatgttattgtccctgaagaccttccagtgggaccaggtgtggaggtggaagaaagtgatattgcttatcctaaccctacgtaggactgggctaatgtgtgtgtgtttgtgtcttcatttttaacaaaaagtttacaaactaaaaaataaagaaaaagaaattttacatagaaaaaagcttatagaataaggatataagaaaatgttatgtacagctttagaatgtttgggttttaagctaaatattataaaagagtcaaaagg

SEQ ID NO: 216541 - DNA, 941 bp, Homo sapiens
tagaacataaaccaaaatgtgggcagtttgtagttggaggctgtccttcgtatgtgcaggtaaataccacttcaggtatcttcatgcatttaatcaaaactctgcagttcgtagactctgcacacatagcacaatgccttgcatacagcagttatccaataaaatctgatgaatgagtaaatgagtaatgatatgcatagttgccaaggagatgaggttccctgacatttattcacactgaattacctgtgcacaaagaatggcaactttataaacattgcctttcatcgaattaaagataatcatctgaaatgaatttgtagtgaaataatcacttgtctttttatttaatgaaaccaaaacttatgtatgtttaactaaaatataaaggtttgaaaatgtgatgaagaaaattttgtactgcaaaattatccggtaatgaaatcttagttagaatttagatttaaacaaatggaaaaaagaggcataagggaattatttagaattccattatgttgttcatgaggtgaaatgttagttagttaaacacagtcaccaagcactgcttacttaaattctaagaatagcctgtttccatcaaaagtgatttgttgtttatatctagcaggaaccattgaatcagcaactaattatttcaaggatctttaacatttttccatttaattccaagcttttcatggcaaatttctggacaggactattttttggtaaatgtttgacattttctttgcccactaaaacatttatttagttcagattgtaaaaataattgcatatgccttatgcctcttgatacatttattttttccaaaggccatcaatataactctggagaaaagatcccagccaagtctgtaaagttctaaatgtcagataaattgcactttttatttccctcctagaactttgtgaaagagact

SEQ ID NO: 216542 - DNA, 402 bp, Homo sapiens
agctaggactacatgtgtgcaccaccatgcccagctaactgttttcctatttttttgtagagatggtgtcttgctatattgcccatgctggtcacttaactcctggcctcaagtgatcctcctgccttggcctcccaaagtgctgagactacaggtatgagccactgtgcatggcctactacaaaccttttttacattaatatacaattcagcaacataaaaagggacttcaataaaaagaatgtgtaaaaataagaaactggtaacatcttagatagacagatagatagatagacaatctctctataaacatatcctctctctaacagaaaatgaaaacgaaattagaaatgttggggagagaataagcaaatgaaaatgaaaggccaaacataaaaacaa

SEQ ID NO: 216543 - DNA, 213 bp, Homo sapiens
gcctattccaatttcattttgctgttcaggcgtttgtttaaattatggcaggagcacatgacctcgggcatgggggcgccaagcatgccagagtatctagacacaaagcagggctggctgcatctccaaccccgccccaccgtctggactgctttctttacatggatctacacactgtgtgtacatacgaaataaaatatacagttttttcta

SEQ ID NO: 216544 - DNA, 567 bp, Homo sapiens
agtttaatgttgctaaaaaggtttaggactatctggataaaggtaatattagcaaaagtttgggcaatagccataattcaattatattcagcttgattatattaacatttttgcttagcacttactgtgtgcaaagcaatatactaggggatacaaaggttaaaaatgtcataaaaatacagttctgaccttcagggatgttacatagtttgaaaaatatatcaacagaaacatcatacaaaaaaaatcaacaaaaagcacaaaaatatccaagtggttagtaggagatttaaagaagttataaatgatatataattcagattctaaattgcctcactaaagaggtgccttgaagtatgcagcttgaaagattttgataaatgtcaatgtagcagtggtattttgtaagcaaagagatagaaactgaaaaaaaactgcatatgaaaagtatgataattattgtgaacaaatcattagagaatttcaacaacatatttgagctagcagcaggaaaaaaaattagtgaattttaatatagatcaagtagaaagtatgcaatctgaggag

SEQ ID NO: 216545 - DNA, 318 bp, Homo sapiens
attccagtgactgagcccagtgttgggggctagggtagaggaagagtcccttgtggacacggtgggagggagggaggcatgaggggacaagcaggatgccctgacagattttaacccagaagcatgaatccaggtctgaggtcagcaaacgttttctgtaaagggccagatagtaaataatttgtactctttgtgggccatccagtctctgtctacttgactctgccatcgtagggcaaaaacaaccacagacaataaataaacgaacgggcgtgtcttgtgttccaataaaagatggtttacaaacacaggcggcta

SEQ ID NO: 216546 - DNA, 458 bp, Homo sapiens
agctggctgactgcccacaccaccaacttgggcctctcctgcccactgctgggtaatgcaccatgggaaaaaggctggctttgtgacagtctaagtgccagagatgacaggcctgcctgctacccactcacaccctaccagtgaggtttgtcacctcttccacacagctcccactgcccccaagaggttaagccctgtcattttgtgtcattgccagatttcttatccatgtctctttttttgtagcaaagaattcagtgtcattaataacccctggtgatggccaagggcaggccccatgctatttgttatctgttggacacgcgttttttgatccccttctgatagacagaaaatacccatcttctctcttactaattggcagtatgtgccaggcttgggagttggcaacagccattgcttttcatcctttcagattacgtgttggactcctcatc

SEQ ID NO: 216547 - DNA, 754 bp, Homo sapiens
gaattaacactccctcagcacccacagcactccatgccccacgctaggaatcaaaagactccagagctctacttctagagggaaacaggatttttgcttgtttttgagacagggttttcgctctgtcacccaagctagcgtgcagtggtgcaatcatggctcactgcagcctccaaatcctgggctcaagcgatcctcccatctcaccttcctgggtagctgggactacagataggccaccacacccggctaattttttcattttttgtagagacaggggtcttacgatattgcccaggctggtctcaaactcctgggttccaaacgatcctcccaccttagcctcccaaagtgctggaattacaggcatgagctaccatgcctggcctggatgtttcttaaagttaatgcaataaactgtgacaggtgctggaagagaagtctatttggggcacaaaaaaagggtgtaatcaatcctagttggagacagtgggtacatcagggaaggccacagagaagggggcatttgaaatcctgatctgtgttcccagcctgatgaagaggggaggatttctaagcaatcacaaatgttctggcaattctgtgagctggggctctctgggcaatcacagctctcaaaatagccacccacacgtggaaaaacagtggaatcaagagaaagtcacaaacttaaagttttgtaaattgccatcttgaactatccactgactcaatctcacaatgccatcagttt

SEQ ID NO: 216548 - DNA, 442 bp, Homo sapiens
ctcctgttactgaaacagtcttcggatttgtctgctgccttcactttctattgtctacgctgtcgctgctgtgatccttctacaacacacatctgagattgccactctcctaattctaaatccttcagttgttttccactgctttcaaaatgcaatgcaatgggctgggcgcagaggctcactcctgtaatcccaacactttgggaggaggccgaggagggcaaatcacctgaggtcaggaatttgagagcagcttggccaagatggcgaaaccctgtctctgccaaaaacacaaaattagccaggcatggtggttggctgtaatccctgctacttgggaggctgaggcaggagaattgcttgaacctgggagtggaggctgcagtgagacaagattgcgccactgcactccagcctgggcaataaagctagattccatctc

SEQ ID NO: 216549 - DNA, 530 bp, Homo sapiens
actttcagtagagacggggcttcaccgcgctagtcaggatggtctcgatctcctgaccccgtgatccgcccacctcagcctcccaagtgccgggaccacaggcatgagccaccgtgaccagcctatttcttggattgttttaaagggtttgggtttgtttgtttgttttttagacagagtctccctcttttttgcccaggctggagtgcaatggcgcgataccggcgcagtgcaacctcagcctcctgggctcaagcgatccttccacctcagcctcccgagtagctgggactatagcatgtgccaccatgcttggctaattttgtttatttttgtagagatgggggtctcactatgttacccaggctggtctcaaactcctgtcctcaagtgatgctcctgtcttggcctcctaaagtgctaggattacaggcatgagccggctactccacttggccttcaaatagtattttttatacttcttgtatacttttttttttccagcacaaaatcattaggaaaaatgcaac

SEQ ID NO: 216550 - DNA, 262 bp, Homo sapiens
tttgggggttgaatgagtcacttcaaagggctcaaatgactggtgaatcttccagataaaaggagagaacacagactttcctgcgcattttaaagtgactgaggtgctccacactctgatttatcctttattaccctgtggcagcattagcatacccctgctaccacatgcatcttgcaagcagtgatgtgtcatcaatatatgcaccgtggcaatcacagaatgctcaaatatttattgaataaaaagagcaagccatacc

SEQ ID NO: 216551 - DNA, 170 bp, Homo sapiens
acttggttcatcttataaagtactacatctccaagacaggtcagctgtctgagacaacacattctagaaacaggtcaaggaaaaagacatgtgagtgggcaacaacttcacatgttgtgctttcctgatgagccttcatttcctcaaaaatctttccttgttggttctct

SEQ ID NO: 216552 - DNA, 468 bp, Homo sapiens
gaatagaaactgttgctaatttgttcaccaggccttttccctgagaaatataaactgttgtcactttatgtccttattcatcacttcaaattgtttgttttcctgaacatttaccactaatatggaatttcaaaactgttgggttgaaagatcaatagaagagtatttgaaatgtattttgtgaaatcaaatgttggtacgtgatggacggacatatgcttattttaatagtttttaaaataatcaagtatttactaagtgccaggcacaagcctaggtgctatgaatacctgttggtgttcaggaactacatggtccttggtcctctccctcatgaaacttatactcaagtaggaagtagacaagataatgtgaaatagtaacaaatgctgtgaatctaacacagtaataaaatagaatgtgtctagaactgggttctcttaggtaaggatggtcagaggggttatt

SEQ ID NO: 216553 - DNA, 595 bp, Homo sapiens
atagatcaggaaactgaggcacagagcagtcgagcaatgttttcatgttgtccaaaccatgctggccagtgatggctgaccccactgcccttgttcttacttactactctgtactggctcccaaggacctggaaggaggacgggcccttcactaaggtggagaaagcttgaagaagaagaggatttggaagagggcagtttcaagtccctccagtggagcatcctctgtgggagtccattattcacccagtaactgtccattaaaccagcaaaggccaagtgcaggcacagtcaacgagctcaggctccttgagggcctgtactctaagacaccctcacagggcggagactggaggaacgtggtgctggagagggaatagggccagaggagacatcttagaaggaaaccttcctctgttacaaagtcgaatgctggacagagcacagaaagcacaaactggagcctcagaagctggttctcaccacagtaaccaatattcacaataacatgaattcacttatttactgacttccactctgtgtcttttcagtaaaagcactcactgtcttctgaatatcgatctatactctccca

SEQ ID NO: 216554 - DNA, 444 bp, Homo sapiens
agaccctgtctaaacaataataatattaataaaaataaaataaatttatttatttcattagcccagagattggaaacgagaacagaaggtatatgcccaagataataattaatgtatagtgagataaccacaactcaagaaagaaatatggccaggcatggtggctcacatctgtaatcccagcactttggaaggccaaggcgggcagattacttgaggccaggagtttgagaccagcctggcaaacatggcaaaatcctgtctgtacaaaacatacaaaaattagctgggcatgatggcacatgcctataaccccagctactccggaggcttaggcaagagaatcgcttgaacgcaggaggcagaggttgcagtgagccgagattgcatcactgcactccagcctggtcaacagagcgagactctgtctcaaaaaaaagagaa

SEQ ID NO: 216555 - DNA, 352 bp, Homo sapiens
tgggaaaaacacttgttttattttacacatatctcactttgtgagtaaaaaaaaaaaaagattggaggccagattcagtggctcatgcctgtaatcccagcactttgagaggtcacagtaggcagatcacctgaggtcaagagtttgaaaccagcctggtcaacatggtaaaaccctgtctctactaaaaatacaaaaattagctgggcatggtggcaggcgcctgtaatcccagctatttgggaggctgaggcaggagaattgcttgaacccaggagatggaggttgcagtgagccaagaccacaccattgcgctccagcctgggcaacaagagcgaaaatctgtctcaaa

SEQ ID NO: 216556 - DNA, 332 bp, Homo sapiens
cactcgctgtgggatgagcttgcctgtcaagccatgtgtgacagaaatcacgtcagggtgtctcctgcatggatgcagacaggccacagctttgcagaatgttggaggctggactgtgagggttggttctatgccaaagacaccagagcttggaagccttgaggtgatcatattttaaaaatagttcatagtagcagtagcaacaatagtagtaataggaccaatagttagtattagtcatggtaatctgcggcccacctcattttattgtgcttccatgatactgtgttttttatgcattaaaggtttatggcaacctgtcttgagcaagt

SEQ ID NO: 216557 - DNA, 180 bp, Homo sapiens
aatttataaatataatatgtatattttaaaatacagtttatattatagagttatgttcctctgtaataatttctctttacactgaatcatgttcagtttttattatgcagataatttaatcttacagctttgatcttttttaaaaaataaaacagccatttggagtctaaattcagccat

SEQ ID NO: 216558 - DNA, 552 bp, Homo sapiens
tagaaggaatttttggtagtgcatgaatttctttgtatttttattggctacttacaatatcttaaaaaaaaagattctaaatcctttttcaattaccctatcagttcatatatttagcataatttaccaacatttccaaacttagcatggaaaagccatcaacatggcactaggtcatgggtcctgaatgaagccgtcagcaaggattaataaactgtgacagctgcccaaaagctttcattcttttttacttaaacatcagattgcaagctgaaactcagcataatccttgttgaaactagcccagctaacatggaagaagtcagaactgagaacagatgacagtaatagttattgcaaattcagtctatagaaataaattctagaatttaaatttacataaatagcaattcctataaaattttaagagtagtacacgaactgctactatctgtttcaacaattgttgttgtttttcctttttttagagacagagtctctcactttgttgcataggatggactcgaatttctaggcttgagtgatcctccc

SEQ ID NO: 216559 - DNA, 531 bp, Homo sapiens
ggatggggaagcaaaagtgaccattgttaactctaggtggttggtaagtgggtgttccttgttttattctttcacctgtaatgtatgtttatgttttttaaaagttaataagttggaggatgatagaagcattaaaaagtaggccgggtatggtggctcatgcctgtaataccaacactttgggaaactgaggcagtaagctcccttggggccaggagtttgagaccagcacaggaaacatggcaagacctcctttctcaaaaatttttaaaaaagaaaattagccagtgtggtggcttgtgcctgtagtcccaactacttgggaggatgaggcagaaagcttgcttgagcccgggagttagaggttacagtgagttaaggtcgtatcactgcactccagtctgggtgacagagtgagaccctgtctctaaaaataaacaaataagtttatgggggagagcggaaagaacaggtgccatgggatcataggatgagagggcagtacaggatgaatggtcctttcccccattg

SEQ ID NO: 216560 - DNA, 640 bp, Homo sapiens
tttgacccattggttatttaagagtatgctgttcaatttccacaatttgtgaatttcccaaatttctttctgttattgatttgtatcttcactccattatggttagagaacatactctgtatgatttaaatcctttcaaatttattgagaattgttttatgacccagcatatggtctatcttggaaaatgttcttatgtatttaagaagaatgtgcattccgcagttgagagaaaactttataaatatatattagattaaataggttgacagtgtttttcatgcttcctctacccttactgattttaatctatttgttctatcaattacttgaaggagggtgataaaacgtccaattataattgtggatttgtctacttctcttttcagttttgcaattgttaattcatttattttgaagctctgtcactgggtacatatacatttaggattattatgtcttcttgatgaactgatccctacagatcattatgtaaagttcctctttatctctggcaatactgccagttctaaagtctatttcatctgatatcaatttggccactccagctttcttatgtttaatatttgcatggtatatctttatgtttaatataaattccttgtagacaacatatagt

SEQ ID NO: 216561 - DNA, 285 bp, Homo sapiens
tacaaaaattagctgggcatggtggtgcatgcctgtagtcccagctacttgggaggctgaggcaggagaatcacttgaacccaggaggtgggggttgcagtgagccaagattgtgccactgcactctagcctgggtgacagagcaagattccatctcaaaaaaaaaataaaaagagagaaagaaaagaaaacactgatgacaaggaagggctctgaagaaaacaagttcaatcggatattaaaaatacactacacagctcttgaggcttccaagatggctgaata

SEQ ID NO: 216562 - DNA, 324 bp, Homo sapiens
gcattttccgtgagcaggacgagttcgtcatccgcgcagaggacatcctttccctcaaggtttgcattctgaaagagtggcccaggcagggtgatgtctaacccagggatggcaaaggtgtccacatgccatcatttcttccaccagcacccatatcacatgattgctgctcctttccattagcccatgtgtggccacagagccctcagcacagggctccaggcagctgctacagctgcccattgattggggttgatagatagatttgctacccctgatttaactcaagaaataaaatgctaatggtgaaaagtcaaaaaaaaa

SEQ ID NO: 216563 - DNA, 361 bp, Homo sapiens
attttattatttttgatgctattataaatgtaattgtttcctcaatttccttttaagattgttcattgctgatatatagaaatacaactcatttttgcatgtttttgtatcctgtaactttgctgaatttgtttattagccctaaggagtttgggatcttgttgtggtatgtttaggatgtacatcatatgtgaatagagatcattttacttctttctctccagtttggatattttttatttatttttattttccttgactaattatcctgggtaaaacttccagtataatggtgaatagaagtggtgaaagtgggcattcttgccttgttgtgctaatagaggggagcttccagtcttcc

SEQ ID NO: 216564 - DNA, 746 bp, Homo sapiens
aaccctcacatgtatggtcattgatttttgacaaaagggccaagtcaattcgatgggggaaagaatagttttttcaacaaatagtgtggggtaactggatatccacatgcagaagaatgaatttggacccttaccttacattgaatgtaaaaataaactcaaagtgatcacagacctaaatctgtaagttttagttacaaaccacttaggagaaacgcaggagtaaatcacaatcttgggttaggcgatgacttactaaatatgacaccaaaaacgtagcagtaagagagaaaattgctaagtccaatttcatcaaaataaaaaacttttgtaattatccagtgtaagatattttgtcataacagtcttggactaagacagaacttatatccagaatatgctgtataaagacctcttagaacgcaacatcaaagagacaaataatacaattaagaaatggaccagggatttaagcagacatttctccagagaaggtatacagatggtcagttagcacgtgaaaagatgcttaacatctctggtcatttgggaaatgcaaattaaaaccacaatgagacagcacttcactcccattaggatggttataactaaaaggaaaaatgggctggttgcagtggctcacacctgtaatcccagcactttgggaggcaggtggatcacctgaggtcgggagttcaagaccagcctggccaacatggttgaaatgccatctctactaaaaatac

SEQ ID NO: 216565 - DNA, 520 bp, Homo sapiens
cctggagacagaccaagttacttagtatcctgcacagtgctcctcgattgatggctgacagccctgtgactgcaactgtaggctccctggaggccctccaggaacaaaagaattagctttgaaagcaagttattttcaaatgtattagattggtctcatgggagtggaacaaataataatacagttgttttgctactaccacttgttagaaatatataagtagtccatggatatgtgattacaaaagaatcctatgtatgtatctagagtgagatgggaaagtgtcccgcttaccctccttctacctccaccacttcctggcccagaggtaatcactgctaacaggttacagcatgaatatgtagtctgtttttcataactctatagaaatatatgtacatatttatattttagaaacaggattatgttatgtgtgtgttattctgtgtcttgcttttgttcacttaatgtgttttggatatctttccatgtcagtttataaagttttatttttaatggc

SEQ ID NO: 216566 - DNA, 188 bp, Homo sapiens
acagagcaagaccctgtctctaagaaaataataaaaattaaaaaaaaattagagtcaacatccttataaccactacttacatctaccattaacatatttctttttttattttattttatttttttttgagacctcgactcactgcaacctccgcttcctgggttcaagcgattctcttgcctcagcct

SEQ ID NO: 216567 - DNA, 370 bp, Homo sapiens
gaatgttcctgtgagagcctctgacactttgggcccatccatgttgttttcttgctattaaaaacaactatcttgggcgatagaaggttactcctcaagcaagggaacatatttataaggctttgcacaatcagtgaacactgatttcgattgtaattttcaggcactaccgaaggagacatctccagtttctttacaaaggaaaaactgttgggtttggaatgtcaggacaactctgagtttttgtgcactaaatggatcaatggtgtgtaggttccaaagtatatttgtaaaataaaagccattcctttacacacaagtgaagctttcaaagttgaacttttatgtaaaaacaatcatggaaatttga

SEQ ID NO: 216568 - DNA, 596 bp, Homo sapiens
ggttatggacctacagaagatgtgcagggcctgagagcagccatctgcattaggtggggcagggagagcgggcctggcctctgtgctcagcagcccaggcagtgtcacccacccccggtgacacagcccgccctgctcccaagatctcaggccaggaagggtctgcccatcacagggagcaggacttcttgccaccctaagggcccagggagcagatgtggcccactcttcccaccccgaccaaccctgccacaccgacgccatcttcccgggtttgccatccagtgctgagagcatctctctaaaggcccctaagctcccctaacctaaggccttggcttgccaggagtgtcatggggagcaacgcacagacctgtgggtgcccagcatcagaagacacactttagggtcacacctgtggccttggcctaagtgggttagaggagcgtctggccacaccctggacttagggctgcaagctccggggtggcccttggcctccttagaagtccaagctgctctcttggagcagtggcacctggttcccaaggttactgtgcctgggaggtcccttcccagtagcaaccacagcctag

SEQ ID NO: 216569 - DNA, 463 bp, Homo sapiens
atctggggatgtctttttctggggctagtccatcttgtcctggataactaccctatcttgagaacccagtcttagtttcatgaaacatctttaatgaaaacagccttttgggatggtgctgctgcaaactgtggtctggctctcctcgcatgtgctctggctgccgcagaacagagctcaggccgctagggggcacctccacgtgccgcttttagcagtaccagccacctcaaagctttgccacagactgaatagctccttccgggggcctggatggcacccaggggatctgccgttgcttttttaatttatttttttacatttagctcattaatatctgttagatatttttatgtctgcattgaaatatgtaactttatttttcccccaaaggataactgttccaacattatcagttagcttgtcttttccccaccaacttaaaatacgactcttattttta

SEQ ID NO: 216570 - DNA, 259 bp, Homo sapiens
gaagctttctagagagaagaaactgttcatcatagtctcacaatccctcctcccattcccacaaaaagtagcagcagcagccttactctaaaagaagtccctcttcttccgatactctcaagcatccactcctgcccagggtccagctccagcagaatactgttacattcctaaacaggtagcaaacttactaaaatttgggcctgcctgtctacgtaaggacaagaggacattagcctttcaaggccagtggagggct

SEQ ID NO: 216571 - DNA, 526 bp, Homo sapiens
agtagaggacatagttactgatttagtccatagcatgtttagaaaaaggcctttgtgaaatgaagtaggggtttcttctggtttcctcctcctctcaagagttaactagtattcaactttttaattcaaaactctgcacactatttgaatatcttttgttaaaataaaacattctttacgtaaatgtcagtgtgttctctcttaaatgtaatgctaaaattcagtaaattttccacagtagaatatcaggtccattacttcctttggccaaaatgcaggactgttagaaatttaaacaaaagtgtaaacaaatcatgataattaaaaccgcttgtaaaggttcgtcaaacaacctcacaaacatcagatagtaagagataattattaggaacaaaattaaaacaccttggcccaccataaagacaattctaaccttgtcttttaaaatagaacattattattcagatattgttacttgaatcctgacgtcagcttacataactaaatacctcaagtgcttttaccc

SEQ ID NO: 216572 - DNA, 492 bp, Homo sapiens
caggggatctgcctaccttggcctcccaaagtgctgggattataggtgtgaaccaacgcacccagcctgtttttctttatagtcatctccttataactgtttcccatgcatgtaaaagagtttttaaatagcatgttgtctgcttcttttctgctgagtaaataaatttgcatttaagaaaacaattttgaatttatataggagaaacatctccttaaaagtaccataaacattagagcaaattattagagccaatcattgattcttcttgtctgaaaagttttaggaattctttaatattatttttgtacatataaacactcaatatttactgaatgaatgatcgaaatgaacgagcaaatgaataattagaatgaataatggtttaaaatccctagcaggcctttccatatctgaacttctttgctttctattataatttaataataagccttttggaaattaactcaaatatattccacttgaactacc

SEQ ID NO: 216573 - DNA, 411 bp, Homo sapiens
aatttggcaaatgtgaaagaatgtcagttctgagattaggatacagaaagtctctctctctctctctctctgtaatcaaccataggtgtgatttcactgtgcattacaaatatgttttagacataatttaacctgtggtatatctgaacctgtggaataaaaaaaaaaggcaaggactgttctcactgtcagagtcccctgtcacattctgtgccccatttctcagactgggaaaaacaaattgccatgtgtgaagagccctacggagagcttcatgtagccctgtgaagaggtccaggagcccttgaagaactgaagactgacaacaatcacgtgagtgagcttcgaagtgaatcattcaatgccaacccagtcctaagaaaactaaccatccgtctgaaagcttggtta

SEQ ID NO: 216574 - DNA, 469 bp, Homo sapiens
aatacataaatcaaaatatggaaggtatacattggtttagtctaaaaagatgggctgtcttgaagtgggggcttacaagtcataagtggattcagagattctttaatctgcagttggttaaaggaacaaaaagcttggagctagcagaaaggaatgtttaagttaaggttgctatgtcagggtcagccataactctgacagtttaataagattgatgggctatagatgtgacttaactcttgccttctgtggcctcagatcttgtttataatttggtaaaggagtctttgatcagccgggtgtcgtggctcatgccagtaatcccagcattttggaggcctagacaggtggatcatttgaggtccggagttagagtctgaccaacatggtgaaaccctggtctctactaaaaatacaaaaaattagccaggtgtggtgacgcacacttgtaatctcagctactcgggag

SEQ ID NO: 216575 - DNA, 611 bp, Homo sapiens
ttgagaaaaaagatcatctgtgtgaaatataaagagcaatgctagaaattcaaagctttgtctcttcaatagacctaattctgggaatgtagaagaatatatatgtatatattgacagctaaatgtctactgcatagtcctacagcatgttttatagatgacatctgagatatacaattacattatattttacttcagatttcatgtctgtgagtcctgactttcctaagctctgttcttctcattttctttatttacaaaatgagggcatgatccccccatgtcatattgttatgaggattgtattaggtaatatatataaagcattcagataggacgtgcacataacaggttcttaataactgctggtcttcgtcttttttctttttaactcctagggtacttacagtttttgtagaatggtaaagttagacctcaagatactatttaactctggctgtgaacatcttacgcatccaagtctgacagatttctaggcgactaaaggtttggtttaggaggataaagagtataggtgccttgctccagccagtcattcattgtatgcaaatgtaaccaccatcaataagtaacaatgctatggacccatg

SEQ ID NO: 216576 - DNA, 223 bp, Homo sapiens
tgggttctgctgttttaaattaccttttgatggtttgaaaaatccatgagttgttctagtgggaagcccacagtggaacattggaatctcagttcatggtatgatttttcagacagagctctcctgcccttggagaccaccactcaggggcttagcaaggcgacactctgccctacattctgtcctttttttttttctttttctttttcttttttttttttgc

SEQ ID NO: 216577 - DNA, 153 bp, Homo sapiens
ggctgcagtgagccgagattgtgccattgcactccagcctgggcgacaagagagaaactatgtctcaaaaaagaaaaaaaaatatgccagagaaaaaaaggcttagccatatgcagtggctgacatctgtaattccaacaactccagaggcta

SEQ ID NO: 216578 - DNA, 402 bp, Homo sapiens
taagtccatgtcaggcaaggattaagtcacacaccccatgggtcactctgacccagtggtttggttaacagacttccttaactgaaaacattcctttctgctgattcaaaatttttagacaaagttttactcttttaaccaattgcaaattgaagactctggagtgacctatgaccaggaagcccccactttaacatattctgcctttctgggccaaatcaatgtctaatcttcatgtattgatttatgactttttcataacttctgcttccctgaaatgtgtaaaacagagttgcgatctaactgccctgagaccactgactcaaggctttttcagtttatgtctttccctgggctgttgtcactcatactagctcagaataaacctctttcaaatagttt

SEQ ID NO: 216579 - DNA, 454 bp, Homo sapiens
aattcttattttctgtactatgatttttatagttttagtttattaagtgctcctggaatacaggctcctggaattaattagaaaaagaaaaaaccttcttaggcagcactaggagagaaacactgagcagaaagctatagcatgactttcgtgctttgagtctcagttcctatgaaaagagttaaattacaataaagtagcctggaatagctgctggtttttactgtcatctttaagagactggcaaggacgggttcttgctgcccccaaagagcattttttttgcatgttgatttatactcaggcttttgaagctatggtctcctttaaatgagaatttctgtttttacctagcacctgccattaagccattctttataatttctagtttcctggagaggaagcaacatattcaatacagtattcacacaaacagggaaatatttaaaagaca

SEQ ID NO: 216580 - DNA, 227 bp, Homo sapiens
gactctccattggtactgctgcttccatccagaatgagggttttcccactcaaaagcaaatacttctcttgtcttcagccaagggacatgcccagaaggcatcttttaaatctgttactctgaaccattgattgtcatggaattctgctgaggatggtaaaaggattggggacaacagggtgggtagtctggactatttggttgatagcctggagatcttgtactag

SEQ ID NO: 216581 - DNA, 532 bp, Homo sapiens
tctcgtttgtgttccctgcacttccttaccgctttagcctttgcacactattagttttctcaccaatctggaaattttcaccttatctctcagtgcagctttgcactaaaaagatttctttcctcaatcattcctatatggaatgaatatgtccattctattattttgagaagaattttgtatgtaggaaatcatttgcaaaccaaatgtaggcttttttaaaacttagatttaagattcttctaataagcagaaatatgtcaaacttcctctctcctaaattcaaataacttaattaccactgtaatctataaagtgcttgagataccacccaaggctgaatatacctaaatatataatatcaaattctttaccttaatcattttatacaaataaccaagatgtttttaacactttgaattaaattctattaagaaccaaatatgggctgggcgcggtcactcacacccgtaatcccagtactttgggaggtcaaggcaggcacatcacgaagtgcaggaaacaagaccat

SEQ ID NO: 216582 - DNA, 452 bp, Homo sapiens
gtaattgcatttaagaagaatataatgcttgatttctatagttcatcactgtggcttctttaaaagcttagggtgctaggtatacaaactttgagaactatagttttagatgttttttacatctagaatgaacatcttttagatgttagtatctatggttatgctgaaaaactttaaatattacaaataatgttttttggtctttggaattgaaaattccatggtaaagtacctaatgtatgagtagggaaaggaggacataataatttaccaataatgcataagaagaaaacctgttaagcaccattgcctaattagaaaggtcatttaaggattgttaaatgctaaatttaaatgtttcaaaataatataattttaaaataatacaaaattcatggtgttcttgctgtcatagattttgctaacagaaattcaaaatgatcagttctgct

SEQ ID NO: 216583 - DNA, 255 bp, Homo sapiens
atagagacttttcaatgtaatatttttatgtttttattgacagcgtttttgttttattttttcggttattaaaatccactggctcacataaactgacctatcaaaacagattcctgaatagtgcaacaccaatttgcacccatggacagatagggaaatccaaaactattagttattaggttttcagagagatggtagaaaatgtgaatctatgtgacttaaagggtcttgaatttattttggggaagatatttg

SEQ ID NO: 216584 - DNA, 313 bp, Homo sapiens
agctcatcggctatcattagtgttagtgcattttatgtgtggcccaagacagttcttccagtccgtggcccagagaagccaaaagattggacgctcctgctctagatatactgacttttccaaggaatgacaggggttaagatccgtttttaattggttccactcctggtggaaggctttcttctatgcatgtcaggttttctttgacttatcaataccttcatgaagaaacaatgaagtgaaggacattttaaaagcaggttgtataagccactaaaaaattttgaataatgcctagtctctgcatataagt

SEQ ID NO: 216585 - DNA, 180 bp, Homo sapiens
ctgcctatggaccagtcagcatgcacttccccattctgagcccataaaatccccagactcagccacacattggtactacccaccttcaggccccttctcacacagagggctacctgctttgggccccctctcctattgagagctgttctgttgctcaataaaacccttctccactgcact

SEQ ID NO: 216586 - DNA, 635 bp, Homo sapiens
ataaatatttcacagtgccaattcatattactctgaaattttttggtgatacattatgtatttttagtgcctagcttttcaaaagcaatttagttttcctacgtttattatctttattaatatcgtttaatcataagtgagaactctgaaattctgaagatgtctataaaatttcacattatgtagaccctattatgcaatttttaaatcatatatatagtttgtacattatatgaatactttttctgataagatttcatgatttttttgctttgtattttgcatgtgcttttctgattgttcattttcttcttcagtcgtatttctcagtttttctccctcagaccaagttaaactgtttttttcccaagagctaggaatcatatctgatcacactgggacttcccttcactgtcagtctaagagtttgcatttttgaggtttaggaaaagggaaaaaaaaggaagaaagaaagaaattgtatctgagaacaaagaagctgccacatggtccctcggtatcatgttattattgacacttggtagaaagaagtatagtggcatttcagtctagtctcccccaactggaaattatttttctttctgatttttagtcttttaagttctcgtaccaaa

SEQ ID NO: 216587 - DNA, 435 bp, Homo sapiens
agaccaggccatgtggctcagaatgtatacagcaagcacccaatgcatggctgctgatggttctccctataggagctagttgtcagcattgtttagtaagtgtggcatcctgttcctccaagtgagctggagccagaaggcactttgaggatgaggacagatggcattttctgaaagacagacatacacgctggtgagcacagaggttgtgccatgtttgtttctgggaggaatgttaaggggaatcacagcgcacacttctagtgctcctgggcatgtgacccaggcccgaaggaccactgtgtcatgtcccagacatcttctcactgcagcttcagcatctgttctctccactctaccctccatgcaaacagccaccatggctatgttcctcaccatcccagtgcccagtgcccaacctggagtaccgcagcc

SEQ ID NO: 216588 - DNA, 575 bp, Homo sapiens
ataaatctggaaagtcggattgtctcactctggaccacgctgaattgcagtggcataatcctggctcaccgcaacctccgcttttcaggaggttcaagcgattcttctgcctcagcctcccaaagttgtgaggttacaggcgtaagccactgtgcctggcctactttcttaataaacttgctttcactttaccctatggactcatcccgaattctttcttgtgcgagagctaagaaccctttcttggggtctgaatcaggacccctttcagctaactttaccaattaccacagatggtcacccttaattaccaggtgaatttagaatgaactatttgttacaaatagtgctgtcaggtcagcttacttaggacttgcagcttatctcaagaacatctatgttaagggttgtgtctgcttagctacataaaagggagacttttacaaaacagattacattctgttttgtaatctcttagtggattgcctgtggtgaatatcacattttgatttaatgcttattcaataataaaattatttttctactatctttgtggaaagacttattggagattt

SEQ ID NO: 216589 - DNA, 274 bp, Homo sapiens
ccctctgtttagttagtggaattgagaacaaggcccaggtggatgattgaggactaaaccccaaacttgccttggatcactccactgtttcaggacatcaagggctccagacattgagaaattttccctttaagttgcgatgggaatccagaaaacgccatatggacccctctatgctgtgaaatacttcagtactcaggagaagtcacgttctggttgctgcaagcgtgtgataccctgtcattaaaataagaaatagattgttatcctctgc

SEQ ID NO: 216590 - DNA, 466 bp, Homo sapiens
ctttccttgcatttttttcccagccagttctcaataacctgaaacttattttgctgatgtttgtggttattctccaccaccaccccagtcctcattaacgtgacttttcagacattatcctggagcttacaggcatgttttcctgggcaggatcttgtattcatgtattgaaaaagcagatttctggccgggtgcagtggctcatgcctgtaatcccagcactttgggaggccgaggcgggcggatcatgaggtcaggagatcgagaccatcctggctaacacagtgaaaccctgtctctactaaaaatacaaaaattagccaggtgtggtggtgggcgcctgtagtcccagctacttggaggctgaggcacgagaatcgcttcaacccaggaagtggaggttgcagtagagccgagactgtgccactgccctccagcctgggtgacagagtgagaccctgtctcc

SEQ ID NO: 216591 - DNA, 659 bp, Homo sapiens
cccaaagtagtataagctgcatgatgttgaagaaattacattggctcgataggagagccattcatctggctttgctaccacttaactctggctctggtcaatcttttcatctttctagtcctggttttcttatccgagaaaaaaatctttaatctctaaggtcctgtccagctttagcacttaaggataccacatactcttggtaaagtgtcttcagaactgtgtaatagaagttgaaggagcgctataattggtgattaacattcagccccttgttacttatgcaacttcttcagcaggcttgaatttctccccagaaaatgggttattttctatcacatcatcagtctgcaaatttttcaaactttttttttttttttttttgagatggagtctttctctgtcgcccaggctggagtgcagtggcatgatcttggctcactgcaacctccaccgcctgggttcaagcaattctcctgtctcagcctcccgagtagttgggactacaggtgcacgctaccatgcctgactaatttttgtatttttagtagagacagagtttcaccatattggtcaggctggtcccaaactcctgacctcaggtggtccatccacctcagcctcccaaagtgctgggattacaggtgtgagccacgaca

SEQ ID NO: 216592 - DNA, 597 bp, Homo sapiens
cccaaagtagtataagctgcatgatgttgaagaaattacattggctcgataggagagccattcatctggctttgctaccacttaactctggctctggtcaatcttttcatctttctagtcctggttttcttatccgagaaaaaaatctttaatctctaaggtcctgtccagctttagcacttaaggataccacatactcttggtaaagtgtcttcagaactgtgtaatagaagttgaaggagcgctataattggtgattaacattcagccccttgttacttatgcaacttcttcagcaggcttgaatttctcccctttttttgagatggagtctttctctgtcgcccaggctggagtgcagtggcatgatcttggctcactgcaacctccaccgcctgggttcaagcaattctcctgtctcagcctcccgagtagttgggactacaggtgcacgctaccatgcctgactaatttttgtatttttagtagagacagagtttcaccatattggtcaggctggtcccaaactcctgacctcaggtggtccatccacctcagcctcccaaagtgctgggattacaggtgtgagccacgaca

SEQ ID NO: 216593 - DNA, 1073 bp, Homo sapiens
ggtatttaacttaatctgaactgatgagagatataccaaagtatttgggagggatgtttttaaagcttacctcttttcctgagatatattatcttttccaagctatcctatgtggagagccagtctcaaaatgaagtcaacccaaaattgaggggttagtgagaaactcttaatgacactgtctgtcccttcgggtccatccttggcctgaagccttctcatggcctttttgatgatgtgggccagtttatcttttggcccaggctcttttgagtcaggtatctatacttgtaacagaaaaagccctaactaataagctattagtcttcttgaataaatttttaatatgtaggagttacaaatacattaggctctgtcttattaatggacagtaaaaggacaataacttttgtgtgtgctcttggaagtagcagctccttgtggctttaaagaaattctgttaaatacgtaggattatgatactgttttgtggaaggctgaatttaagtcctaaggttacatgagaattcactgagaagcatatctttaaatgtctgcttttaatgaagatatagattaattattcacttgacaaacttgttggtattttatgggagaattcagtgcatatagaggcttcaaaaggcagattgtccactgacaggttaggattctcaagtgtaattttttattactttagagccgtaattattttgtgagagacagtatctttgaattaaaatgagaaatgtttttcaacttagagattcaactcatttcagggatgtgtttaatccaaaaatagagagttcattatgtagtggtgaaattaaaacatttattaaaagcagtctttgggtttaagtaggtagatctcaaaagtgtctttttccttcttattggttaactaagggacacaaatacacaaccttctctaggaaacacttctaccattcttactagtttatgttttaatttttcaattttattaaattagtacatcttgatacgttaattttcatattgtttcatttcattataataccttcattagttatatgggattttactat

SEQ ID NO: 216594 - DNA, 125 bp, Homo sapiens
taaagaaataagactcatctctcctttattctttcctgaccatgcctgcctttgtattcctgacagccttgaaaggacacagattatgtggtaaatataataatcaccccttctgtcgtcttctc

SEQ ID NO: 216595 - DNA, 412 bp, Homo sapiens
aacccacctaggaggaagtaagagctgtgattcatcctggccctcctggcacctcctctcctcctcctttaccccatatgctgtcaatcatctagttctcccagttttacctccctaatgtctcttgaaccactttgcctagcacaatgctgcctcttgaccagtctgaaattgctgtctgatggatctcttgctatctagtcttacccctcccatcagtcttccacaccatagccagaaaagataaacactttcattatgtaaaaatatagaaactttgtatggaagatattcatttagtaaattcaataggcaaaggctgtatttgaaaaaaaactataatacagataaaaatatataacatataaggagcctttaaactttgagaagaaaaaaacaaacaatctaatac

SEQ ID NO: 216596 - DNA, 854 bp, Homo sapiens
  misc_feature (49)..(49): n is a, c, g, or t
acatttctatgttttccacctttttcagttttcctcgccatatttcacntcctaaagtgtgtatttctcattttccgtgattttcagttttctcgccatattccaggtccttcagtgtgcatttctcatttttcacgttttttagtgatttcgtcatttttcaagtcgtcaagtggatgtttctcattttccatgattttcagttttcttgccatattccacgtcctacagtggacatttctaaattttccacctttttcagttttcctcgccatatttcacgtcctaaagtgtgtatttctcattttccgtgattttcagttttctcgccatattccaggtccttcagtgtgcatttctcatttttcacgttttttagtgatttcgtcatttttcaagtcgtcaagtggatgtttctcattttccatgattttcagttttcttgccatattccacgtcctacagtggacatttctaaattttccacctttttcagttttcctcgccatatttcacgtcctaaagtgtgtatttctcattttccgtgattttcagttttctcgccatattccaggtccttcagtgtgcatttctcatttttcacgttttttagtgatttcgtcatttttcaagtcgtcaagtggatgtttctcattttccatgattttcagttttcttgccatattccacgtcctacagtggacatttctaaaattccactttttcagctgtctttggaggacgtacgtcatacggttttaatttagtaaaccaaatcctatgcatgggtttcagcactaagccaaacctcaccaactcctagttctagaaaaacaggcacttgggcaagcctg

SEQ ID NO: 216597 - DNA, 468 bp, Homo sapiens
ggtgtgcacagctaagcatgcttcagctcgctggctgcatcttttccagtggggactcactgtgcgtcaggagcacacaaagaaagctgacatttggatgtttctcattttccatgattttcagttttcttgccatattccacgtcctacagtggacatttctaaattttccacctttttcagttttcctcgccatatttcacgtcctaaagtgtgtatttctcattttccgtgattttcagttttctcgccatattccaggtccttcagtgtgcatttctcatttttcacgttttttagtgatttcgtcatttttcaagtcgtcaagtggatgtttctcattttccatgattttcagttttcttgccatattccacgtcctacagtggacatttctaaattttccacctttttcagttttcctcgccatacgacgcggccgcgaatttagtagtagtaggcggccgc

SEQ ID NO: 216598 - DNA, 316 bp, Homo sapiens
gcgtcgacatggtctctatgtgtgtacgtgtgtatatctatggcggggatgtgcaattttctcgccatattccaggtccttcagtgtgcatttctcatttttcacgttttttagtgatttcgtcatttttcaagtcgtcaagtggatgtttctcattttccatgattttcagttttcttgccatattccacgtcctaaagggaagagagactgacaacctgctcttgcaaagcctgtattcccaggctacagtataccactgtatccttacacaggaagaccaacagagcccatagatatggatacttggtcgacg

SEQ ID NO: 216599 - DNA, 824 bp, Homo sapiens
taaatccgcggccgcgtcgaccaaagtgtgtatttctcattttccgtgattttcaggttttctcgccatattccaggtccttcagtgtgcatttctcatttttcacgttttttagtgatttcgtcatttttcaagtcgtcaagtggatgtttctcattttccatgattttcagttttcttgccatattccacgtcctacagtggacatttctaaattttccacctttttcagttttcctcgccatatttcacgtcctaaagtgtgtatttctcattttccgtgattttcagttttctcgccatattccaggtccttcagtgtgcatttctcatttttcacgttttttagtgatttcgtcatttttcaagtcgtcaagtggatgtttctcattttccatgattttcagttttcttgccatattccacgtcctacagtggacatttctaaattttccacctttttcagttttcctcgccatatttcacgtcctaaagtgtgtatttctcattttccgtgattttcagttttctcgccatattccaggtccttcagtgtgcatttctcatttttcacgttttttagtgatttcgtcatttttcaagtcgtcaagtggatgtttctcattttccatgattttcagttttcttgccatattccacgtcctacagtggacatttctaaaattccactttttcagctgtctttggaggacgtacgtcatacggttttaatttagtaaaccaaatcctatgcatgggtttcagcactaagccaaacctcaccaactcctagttctagaaaaacaggcacttgggcaagcctg

SEQ ID NO: 216600 - DNA, 697 bp, Homo sapiens
  misc_feature (49)..(49): n is a, c, g, or t
acatttctatgttttccacctttttcagttttcctcgccatatttcacntcctaaagtgtgtatttctcattttccgtgattttcagttttctcgccatattccaggtccttcagtgtgcatttctcatttttcacgttttttagtgatttcgtcatttttcaagtcgtcaagtggatgtttctcattttccatgattttcagttttcttgccatattccacgtcctacagtggacatttctaaattttccacctttttcagttttcctcgccatatttcacgtcctaaagtgtgtatttctcattttccgtgattttcagttttctcgccatattccaggtccttcagtgtgcatttctcatttttcacgttttttagtgatttcgtcatttttcaagtcgtcaagtggatgtttctcattttccatgattttcagttttcttgccatattccacgtcctacagtggacatttctaaattttccacctttttcagttttcctcgccatatttcacgtcctaaagtgtgtatttctcattttccgtgattttcagttttctcgccatattccaggtccttcagtgtgcatttctcatttttcacgttttttagtgatttcgtcatttttcaagtcgtcaagtggatgtttctcattttcccgacgcggccgcgaatttagtagtagtaggcggccgc

SEQ ID NO: 216601 - DNA, 775 bp, Homo sapiens
ggtgtgcacagctaagcatgcttcagctcgctggctgcatcttttccagtggggactcactgtgcgtcaggagcacacaaagaaagctgacatttggatgtttctcattttccatgattttcagttttcttgccatattccacgtcctacagtggacatttctaaattttccacctttttcagttttcctcgccatatttcacgtcctaaagtgtgtatttctcattttccgtgattttcagttttctcgccatattccaggtccttcagtgtgcatttctcatttttcacgttttttagtgatttcgtcatttttcaagtcgtcaagtggatgtttctcattttccatgattttcagttttcttgccatattccacgtcctacagtggacatttctaaattttccacctttttcagttttcctcgccatatttcacgtcctaaagtgtgtatttctcattttccgtgattttcagttttctcgccatattccaggtccttcagtgtgcatttctcatttttcacgttttttagtgatttcgtcatttttcaagtcgtcaagtggatgtttctcattttccatgattttcagttttcttgccatattccacgtcctacagtggacatttctaaaattccactttttcagctgtctttggaggacgtacgtcatacggttttaatttagtaaaccaaatcctatgcatgggtttcagcactaagccaaacctcaccaactcctagttctagaaaaacaggcacttgggcaagcctg

SEQ ID NO: 216602 - DNA, 807 bp, Homo sapiens
gcgtcgacgtttttatcattttccatgtttttcattgttactcattgatatacactgttctacaaatcccgtttccaacgaatgtgtttttcagtgtaactcactcatctgatatgttctacagtgtggatgtttctcattttccatgattttcagttttcttgccatattccacgtcctacagtggacatttctaaattttccacctttttcagttttcctcgccatatttcacgtcctaaagtgtgtatttctcattttccgtgattttcagttttctcgccatattccaggtccttcagtgtgcatttctcatttttcacgttttttagtgatttcgtcatttttcaagtcgtcaagtggatgtttctcattttccatgattttcagttttcttgccatattccacgtcctacagtggacatttctaaattttccacctttttcagttttcctcgccatatttcacgtcctaaagtgtgtatttctcattttccgtgattttcagttttctcgccatattccaggtccttcagtgtgcatttctcatttttcacgttttttagtgatttcgtcatttttcaagtcgtcaagtggatgtttctcattttccatgattttcagttttcttgccatattccacgtcctacagtggacatttctaaaattccactttttcagctgtctttggaggacgtacgtcatacggttttaatttagtaaaccaaatcctatgcatgggtttcagcactaagccaaacctcaccaactcctagttctagaaaaacaggcacttgggcaagcctg

SEQ ID NO: 216603 - DNA, 622 bp, Homo sapiens
  misc_feature (49)..(49): n is a, c, g, or t
acatttctatgttttccacctttttcagttttcctcgccatatttcacntcctaaagtgtgtatttctcattttccgtgattttcagttttctcgccatattccaggtccttcagtgtgcatttctcatttttcacgttttttagtgatttcgtcatttttcaagtcgtcaagtggatgtttctcattttccatgattttcagttttcttgccatattccacgtcctacagtggacatttctaaattttccacctttttcagttttcctcgccatatttcacgtcctaaagtgtgtatttctcattttccgtgattttcagttttctcgccatattccaggtccttcagtgtgcatttctcatttttcacgttttttagtgatttcgtcatttttcaagtcgtcaagtggatgtttctcattttccatgattttcagttttcttgccatattccacgtcctacagtggacatttctaaattttccacctttttcagttttcctcgccatatttcacgtcctaaagtgtgtatttctcattttccgtgattttcagttttctcgctctgtttcctaggccctaagggctaaggatgtctctactatgtttctttcgtcgacgc

SEQ ID NO: 216604 - DNA, 547 bp, Homo sapiens
  misc_feature (49)..(49): n is a, c, g, or t
acatttctatgttttccacctttttcagttttcctcgccatatttcacntcctaaagtgtgtatttctcattttccgtgattttcagttttctcgccatattccaggtccttcagtgtgcatttctcatttttcacgttttttagtgatttcgtcatttttcaagtcgtcaagtggatgtttctcattttccatgattttcagttttcttgccatattccacgtcctacagtggacatttctaaattttccacctttttcagttttcctcgccatatttcacgtcctaaagtgtgtatttctcattttccgtgattttcagttttctcgccatattccaggtccttcagtgtgcatttctcatttttcacgttttttagtgatttcgtcatttttcaagtcgtcaagtggatgtttctcattttccatgattttcagttttcttgccatattccacgtcctacagtggacatttctaaattttccacctttttcagttttcctcgccatacgacgcggccgcgaatttagtagtagtaggcggccgc

SEQ ID NO: 216605 - DNA, 781 bp, Homo sapiens
  misc_feature (49)..(49): n is a, c, g, or t
acatttctatgttttccacctttttcagttttcctcgccatatttcacntcctaaagtgtgtatttctcattttccgtgattttcagttttctcgccatattccaggtccttcagtgtgcatttctcatttttcacgttttttagtgatttcgtcatttttcaagtcgtcaagtggatgtttctcattttccatgattttcagttttcttgccatattccacgtcctacagtggacatttctaaattttccacctttttcagttttcctcgccatatttcacgtcctaaagtgtgtatttctcattttccgtgattttcagttttctcgccatattccaggtccttcagtgtgcatttctcatttttcacgttttttagtgatttcgtcatttttcaagtcgtcaagtggatgtttctcattttccatgattttcagtttcacgtcctaaagtgtgtatttctcattttccgtgattttcagttttctcgccatattccaggtccttcagtgtgcatttctcatttttcacgttttttagtgatttcgtcatttttcaagtcgtcaagtggatgtttctcattttccatgattttcagttttcttgccatattccacgtcctacagtggacatttctaaaattccactttttcagctgtctttggaggacgtacgtcatacggttttaatttagtaaaccaaatcctatgcatgggtttcagcactaagccaaacctcaccaactcctagttctagaaaaacaggcacttgggcaagcctg

SEQ ID NO: 216606 - DNA, 601 bp, Homo sapiens
taaatccgcggccgcgtcgaccaaagtgtgtatttctcattttccgtgattttcaggttttctcgccatattccaggtccttcagtgtgcatttctcatttttcacgttttttagtgatttcgtcatttttcaagtcgtcaagtggatgtttctcattttccatgattttcagttttcttgccatattccacgtcctacagtggacatttctaaattttccacctttttcagttttcctcgccatatttcacgtcctaaagtgtgtatttctcattttccgtgattttcagttttctcgccatattccaggtccttcagtgtgcatttctcatttttcacgtttttcattgtaactcattgatatacacagttctacaaatcccgtttcaaacgaatgtgtttttcagtgtaactcactcatctaatatgttctacagtgtggtttttatcattttccatgtttttcattgtaactcattgatatacactgttctacaaatcccgtttccaacgaatgtgttttacattgtaactcactcatctaatatgttctacagtgtggtcgacgcggccgcgaatttagtagtagtaggcggccgc

SEQ ID NO: 216607 - DNA, 713 bp, Homo sapiens
gcctactactactaaattcgcggccgcgtcgatggatgtttctcattttccatgattttcagttttcttgccatattccacgtcctacagtggacatttctaaattttccacctttttcagttttcctcgccatatttcacgtcctaaagtgtgtatttctcattttccgtgattttcagttttctcgccatattccaggtccttcagtgtgcatttctcatttttcacgttttttagtgatttcgtcatttttcaagtcgtcaagtggatgtttctcattttccatgattttcagttttcttgccatattccacgtcctacagtggacatttctaaattttccacctttttcagttttcctcgccatatttcacgtcctaaagtgtgtatttctcattttccgtgattttcagttttctcgccatattccaggtccttcagtgtgcatttctcatttttcacgttttttagtgatttcgtcatttttcaagtcgtcaagtggatgtttctcattttccatgattttcagttttcttgccatattccacgtcctacagtggacatttctaaaattccactttttcagctgtctttggaggacgtacgtcatacggttttaatttagtaaaccaaatcctatgcatgggtttcagcactaagccaaacctcaccaactcctagttctagaaaaacaggcacttgggcaagcctg

SEQ ID NO: 216608 - DNA, 635 bp, Homo sapiens
  misc_feature (49)..(49): n is a, c, g, or t
acatttctatgttttccacctttttcagttttcctcgccatatttcacntcctaaagtgtgtatttctcattttccgtgattttcagttttctcgccatattccaggtccttcagtgtgcatttctcatttttcacgttttttagtgatttcgtcatttttcaagtcgtcaagtggatgtttctcattttccatgattttcagttttcttgccatattccacgtcctacagtggacatttctaaattttccacctttttcagttttcctcgccatatttcacgtcctaaagtgtgtatttctcattttccgtgattttcagttttctcgccatattccaggtccttcagtgtgcatttctcatttttcacgttttttagtgatttcgtcatttttcaagtcgtcaagtggatgtttctcattttccatgattttcagttttcttgccatattccacgtcctacagtggacatttctaaattttccacctttttcagttttcctcgccatatttcacgtcctaaagtgtgtatttctcattttccgtgattttcagttttctcgccatattccaggtccttcagtgtgcatttctcattcgacgcggccgcgaatttagtagtagtaggcggccgc

SEQ ID NO: 216609 - DNA, 600 bp, Homo sapiens
  misc_feature (49)..(49): n is a, c, g, or t
acatttctatgttttccacctttttcagttttcctcgccatatttcacntcctaaagtgtgtatttctcattttccgtgattttcagttttctcgccatattccaggtccttcagtgtgcatttctcatttttcacgttttttagtgatttcgtcatttttcaagtcgtcaagtggatgtttctcattttccatgattttcagttttcttgccatattccacgtcctacagtggacatttctaaattttccacctttttcagttttcctcgccatatttcacgtcctaaagtgtgtatttctcattttccgtgattttcagttttctcgccatattccaggtccttcagtgtgcatttctcatttttcacgttttttagtgatttcgtcatttttcaagtcgtcaagtggatgtttctcattttccatgattttcagttttcttgccatattccacgtcctacagtggacatttctaaattttccacctttttcagttttcctcgccatatttcacgtcctaaagtgtgtatttctcattttccgtgattttcagttttctcgcgacgcggccgcgaatttagtagtagtaggcggccgc

SEQ ID NO: 216610 - DNA, 668 bp, Homo sapiens
gcctactactactaaattcgcggccgcgtcgatgatttcgtcatttttcaagtcgtcaagtggatgtttctcattttccatgattttcagttttcttgccatattccacgtcctacagtggacatttctaaattttccacctttttcagttttcctcgccatatttcacgtcctaaagtgtgtatttctcattttccgtgattttcagttttctcgccatattccaggtccttcagtgtgcatttctcatttttcacgttttttagtgatttcgtcatttttcaagtcgtcaagtggatgtttctcattttccatgattttcagtttcacgtcctaaagtgtgtatttctcattttccgtgattttcagttttctcgccatattccaggtccttcagtgtgcatttctcatttttcacgttttttagtgatttcgtcatttttcaagtcgtcaagtggatgtttctcattttccatgattttcagttttcttgccatattccacgtcctacagtggacatttctaaaattccactttttcagctgtctttggaggacgtacgtcatacggttttaatttagtaaaccaaatcctatgcatgggtttcagcactaagccaaacctcaccaactcctagttctagaaaaacaggcacttgggcaagcctg

SEQ ID NO: 216611 - DNA, 375 bp, Homo sapiens
agattgttagagcccaggagttcaaggctgtagtgagctgtaattgtgccactgcactccagccagggcaacggaatgggaccctgtctcaaaaaaaaaaaatccatctgtcaataaaattgaggtcattgtcaagtatacctgaagcatagctattggtgtgttgttgatagaggttaatgtattctggtgctgtgctgtctgatatggtagctactatccagatgtagttattcaacttttgaaatgtggctagtctgaattaaaacatgttgtaaatgtcaaccatcaaatttcaaagatgaatagaaatggtaacatctcttaattttttaatgattacattgaattaaaatgacaatattttagatatat

SEQ ID NO: 216612 - DNA, 766 bp, Homo sapiens
attgatagcacattgctagattgttctcccacagctgtgtacccatttacattagcactgacagtccatgacagactctgtctttccattgaccacaggggtgccatcaaacacttaaatatttgccaatctgcaagatggaaaaaaattacaaacttgttttaatttacattgttcaaatttttcgtgaggctgagaattttttcctgggtttattggatacttttgctataaacggcctgcaaatgcccttaacacattattctattaagttagtcttttactcccagtgatttatgaaagcttcttgaaaatgatctttgtcatgactattgcaaatgtatttctccatttatcccttgccttttgatgtctgtttgtaccagcacaagaatagatagattaaatcaacaaaacagaacagaaagtccataaataaaaccaaacgtgcatgaaagctttgttgggatagaggtaggaaactgattaaactgcctggattcaaatggaaaaactgcattcaataaattgtgagattcttaccatttgaaaaatcaagaaaaaatctgattcctttctccttactccaaaataaatttcatgtaaatcaaagatttaaacacacaaacaaacaaaaatgaaatcccaaaaattctagaatattttttgagtgagaaagaccttttaagtatgacatatgggaagacataaggaaaaaagattgataattttaaccatacacacaaaacagtttaaactttatggc

SEQ ID NO: 216613 - DNA, 504 bp, Homo sapiens
actagtgggagaatgtaagtagtcgagtgtggcctaagagtcaaagggaagaagaatggcagcagaagctaaagctggagaggtggaggggggccgtgcccggggagcccaggtgaggagcgggactgatcctctgtagacatgggaaggaatcctagaggtttttccctcttgttccattgttttcctgagttccaccaggaaagtggccttggtaattgccaaacaatttttttttattttttattttttttagagacatagtctcattctgttacccaccgctgaaaatagcaaatgttgacagagattgtgaagcaattgggcttttcatgtcctattggtagaaatgtaaattggtaaagccactttggaaaacaatctgtcagtatcttataaagctaaacatatccttatatgtaactcaacaattctgctatagatattttccagcagaagtgcaagcacacatgctccagaagacatggacaagagtgtccgcgt

SEQ ID NO: 216614 - DNA, 144 bp, Homo sapiens
acatcaccgttaagctgtttctctgaactgaacaaaagaaatttcatcatctttggggctgagggggagcagagttagcatctttttcagcagaattcaaaaacatttatttcagcttcagcatatactttaaaacttactatt

SEQ ID NO: 216615 - DNA, 106 bp, Homo sapiens
cctcctgcaacccctggcgcacagcctcaccccgctgtaaacagagctgggattgaagtgcgatttcggtttctttttctttttttctaatcaaataaaaacacct

SEQ ID NO: 216616 - DNA, 551 bp, Homo sapiens
ggccacctccagcagggctgtgtgagctgggggcctcatggccctcccagaaggagccactcactggagacacctgggccttctctctcaaatggttttccaacaggtaggggtgggcatttccctgcagaggcccgggcctgcacccgaaggaggtgaggtctccctgggtctccagggccctagacgtggatgaagtcctgccgtggctacgggggctcttttcttgtcatcctgctcctgggtctctacgtgatgctcctgcgtcactgttctgggctcctcttcggccctaccctcagtctccttcgggagcctggctgggacctgcttaggtggtgaaggcagcgggagggcgaacttgcggacgggaggagggtcctcagggaccctgggtgcagcaaccttcgggagttcccaacaggtggctcagaggccacagcctgcaggaactccagagggtcacccttgtcatgtgggagaggacaaggggtgccacacaagctgcctggagaggagggcctaggaggccgccgcgggttgaacaggaa

SEQ ID NO: 216617 - DNA, 373 bp, Homo sapiens
cattgtggcttgcacttgtaattccagcactttgggaggccaaggcgggaggatcacttgaacccaggagtttgagaccaatctgggcaacatagtgggactccaactctacaaaaattaatttcaaaaaaattagccaggggactaaagggactgaggtgggaggatggcttgaatccagaaggcggaggttgctgtgagccaagattgcaccactgcactccagcctgagtgacggagcaagactgtctcaaaaaaaaaaaaaaaaaaagaaaaaggtgcgatgatgcagatattctaaagcttccctagtcacaagtggccatcaagtactcaagatatacttgttcaagccctggcgctaaatttttga

SEQ ID NO: 216618 - DNA, 539 bp, Homo sapiens
aggtcagtacttcatccatcttattgctgaatatgccggtttatttatccattcaccagctgatagacatagaggctgtttccagtttggggtgattataaataaaattgttatgaacatgcatgtacaagtctttgtgtgctggacatgtcattgtttctcctgagtaaacatgtaggggtggaatggtgggtcacatggtgttaaatcatttcgctgattttactgagcagtcataatactgttttctgtagcggttgtaccattttacattcccacccacagtgcacaagagttccagtttctccacatcctagctaacacttgttatttatttatttttttaatagtagccctcctaatgggtgtgcagtggtatctcattgtgttttaaatttgcatgttcctaatgataagtggtgttgagcatcttcttcctcttctttttttttttcagttgagatggggtctcactctgtcgcccaggctggagtgcagtggcgcgatcttggctcactgcaacctccgcctcctgggtt

SEQ ID NO: 216619 - DNA, 160 bp, Homo sapiens
gacagagtgagactccatctcaaaaaaaaaaaaaaaaatagtatactgagtctctatggtgtagtttaacatgttcctctatcctctgtatttcctgtaagttggaattctgtaagttttatctagaacttggtcagattcaggtttgatgttttttctc

SEQ ID NO: 216620 - DNA, 507 bp, Homo sapiens
cgtctcactcactccctcccacgctcagacctgtgactttaacattactaaaaatttcaactccttcatgatctgtttcaaggcatccacttccttaaccatcccttcttttcctaggtttctccaggtggcaccttgatcctggactccaacagctttttacccctctagagtcctatcctctttcccctggaaacccttctctgcatgtttctgttttcctcctgaatcagcttgggttccatggttctcagtggaagcagtcctttgcatgttccctcagatctgttgcccattctcacttggctgtactcacggggcaaactcttttttaaatccctgaacctctagcacttccttccacagctccattctttttttggagagagagagtctcactctgtcacccaggctggagtgcagtggcatgatcttggctcactgcaacctctgcctcttgagttcaaacgattctcctgcctcagccacccccactgagtagctggg

SEQ ID NO: 216621 - DNA, 371 bp, Homo sapiens
ggacagtgtcagcattgcacttccctgggcaggagacttttcaggtggctaattccacaggaagatagtgtcaggtataggtgccggggcagcggccggactgtccccagacacagcgtgcgctcgggcagcaaggccgggcggcagaggcagcactggcctgggcgctgctcctggcggccccccagccaccagggccctacctcccccgctgcttaccccatcctggagctgggcacgcttggggcttcagaccttcacgtggccaccggagctgctgtctcaggacccctctccggcacagctgtttgtctccaatacaaggactgtcctgtgagtgtgcagggccctgttggccgtgctgggaaccc

SEQ ID NO: 216622 - DNA, 409 bp, Homo sapiens
cactagtttcttttaaatgcttatctattaagtttctcattagcatctcctatttatgattgtactacattttctctgggattttattgccatacaatagataccagtaatttaaagtgcctgccttccatgactgcacagttagtcaaacattgccgttttctagacaaattatttgttaacgtacattaatgttgccaactagattttatgagtaaacatttctttcattattttcttgcagttctacattagtgtgttttttagtgtaagttccttaatatgagtttattgttttttggttttacttatgtattataattttagacaatttgcaattctgtttgtatactttaagtcagtgtgggatttaattaaaagataaatgagccatatgtctatcacaatc

SEQ ID NO: 216623 - DNA, 586 bp, Homo sapiens
tggctgcaaagcactcattctcttttctggcaatagcacactgattttctttcagagaaccattctttcacctctctctgttcataaaattaacgtgaaactgttccctggctaaaagaattaacagataatttgggggtggagagctattcaggtcttcttatccacttcgccacagtaatgattccaggataagcacatgacccaagttggtccagtcagattaaattctgagacttttgctaaaattattaaaggaaaaattttttccctcttatgtagtttctaaactactaggaacaaccctaaaaaaaaaaggcccatctaagaataaaaccaaatagaggaaaacaaaaacaaagagctgaaagaggaagattgattcctgatgatacattttagcccctggatccagctatgcctgaaaccattactgccagtgaatttttcagtcatgacaatcaattgtctttttttgcttaagccagtttgagttgcatgcctttctataatgtaactgttttctgtcagttagagaatctaactgatacaacgaatgccaaagtgttagacaatgagctagatg

SEQ ID NO: 216624 - DNA, 368 bp, Homo sapiens
tggtcaagaaggctctttggagaagtttgaactgctctggacctggataggtgactaaaatttaagtaaagaggatgggaggttcaaagaaagggaacagttcagcaaagagactgtgacacacgtgttcgcaggcagtgaggagagatccagaaagacacaggttcaaacccaccatgtgtactgcctgggggacctgggtcagacaacgtaatctctccaagcctcagttcccccatctgtaaagtgggaataatactgtgaattgttggaaggattaaaaaacaagcaaataaaaataacccatgaaaatagcctggcagatagatcgagaccatcctggctaacacggtgaaaccccatctcta

SEQ ID NO: 216625 - DNA, 520 bp, Homo sapiens
gcaatgggttgcttcctgtccccacaaattgtacttttctgtctccttggaattgggagcaccacccaccagtcctctgttggaaccccagcttctttccttccaggtagacgaggactgagctctggataactggaataccggccaccccagaggtgcctggtcagccggacctctccacctccttggaggctagaaaatgggcagaaagccaggtttttccgccatcccaggcacccttttgctaggatatgagtgaatctttacagtccctgctttcgtggaccaatggccaagcagccttccccacttggccctgggtttggctggtacgccctgcagaacagctgcctgggactgtctctccctcttctgaggaggactgtatgcagggatccactactccatctgcccctcctttggccagaatgtcggtgggacctaggtcctcttcgcacaagacctgaagacctgcagacacacttacctctcagaggtccgtgggaggtatggttcctca

SEQ ID NO: 216626 - DNA, 529 bp, Homo sapiens
ctgataaattaaatgactcacccaggatcacacagtcagagccagctggcagcctacatcagaataccaatccaggccatagtccagtaacgttgaaccattggtttcttgtgggttatccttgatggctttgtaactttcacatcccaatttttactctgtaaaatataggtaataaacctgtatcatttgatgcatagaaacaaaaaaaatgaggctgggtgcaatggctcacgcctgtaatcccagcactttgggaggccgaggcgggcagatcacctgaggtcaggagtttgagatcagcctgaccaacatggagaaaccccatctctactaaaaatacaaaattatccaggcgtggtggcacatgcctgtaatcccagctgcttgggaggctgaggcaggagaatcgcttgaacccaggaggagaaggatgccatgagccgagatcgcaccattgcactccaccctgggcaacaagagtgaaactccatctcaaaaaaacaaacaaacaaaaaatgatgatcac

SEQ ID NO: 216627 - DNA, 798 bp, Homo sapiens
ccgcatcaaccatgtaagcagcttcgcttcctgccgcaaccgtccgcggcctgaggagcccaccgccgctctcgggggccgacttccgggggctgagccgttgaagcggaggctggggcggggggcagccggcgcggccggggcaggaggcgcagactcatgaaatggccacagatgataagacgtccccaacactggactctgctaatgatttgcctcgatctcctactagtccttctcatctcacacactttaaacctttgactcctgatcaagatgagcccccttttaaatcagcttatagttcttttgtaaatctctttcgttttaacaaagagagagcagaaggaggccagggagaacagcagcctttgagtggaagttggaccagccctcagctcccttcgaggacacagtctgttaggtcacccacaccttataaaaagcagcttaatgaggaactccagcggcgctcttcagcattagacacaagaaggaaagcagaacctacctttggaggtcatgaccctcgtacagctgttcagcttcgaagcctcagcacagtattaaaacgcctcaaggaaatcatggaggggaaaagccaggagacctccgagcttgcacatattgtagaaaaatagccttaagttatgctcattccacagacagtaattctattggggaagacttgaatgctctttcagattctgcttgctctgtgtctgtgcttgatccaagtgaaccccgaacacctgttgggagtaggaaagccagccgtaacatatttttagaggatga

SEQ ID NO: 216628 - DNA, 679 bp, Homo sapiens
ccgcatcaaccatgtaagcagcttcgcttcctgccgcaaccgtccgcggcctgaggagcccaccgccgctctcgggggccgacttccgggggctgagccgttgaagcggaggctggggcggggggcagccggcgcggccggggcaggaggcgcagactcatgaaatggccacagatgataagacgtccccaacactggactctgctaatgatttgcctcgatctcctactagtccttctcatctcacacactttaaacctttgactcctgatcaagatgagcccccttttaaatcagcttatagttcttttgtaaatctctttcgttttaacaaagagagagcagaaggaggccagggagaacagcagcctttgagtggaagttggaccagccctcagctcccttcgaggacacagtctgttaggtcacccacaccttataaaaagcagcttaatgaggaactccagcggcgctcttcagcattaggagacctccgagcttgcacatattgtagaaaaatagccttaagttatgctcattccacagacagtaattctattggggaagacttgaatgctctttcagattctgcttgctctgtgtctgtgcttgatccaagtgaaccccgaacacctgttgggagtaggaaagccagccgtaacatatttttagaggatga

SEQ ID NO: 216629 - DNA, 715 bp, Homo sapiens
ccgcatcaaccatgtaagcagcttcgcttcctgccgcaaccgtccgcggcctgaggagcccaccgccgctctcgggggccgacttccgggggctgagccgttgaagcggaggctggggcggggggcagccggcgcggccggggcaggaggcgcagactcatgaaatggccacagatgataagacgtccccaacactggactctgctaatgatttgcctcgatctcctactagtccttctcatctcacacactttaaacctttgactcctgatcaagatgagcccccttttaaatcagcttatagttcttttgtaaatctctttcgttttaacaaagagagagcagaaggaggccagggagaacagcagcctttgagtggaagttggaccagccctcagctcccttcgaggacacagtctgttaggtcacccacaccttataaaaagcagcttaatgaggaactccagcggcgctcttcagcattagacacaagaaggaaagcagaacctacctttggaggtcatgaccctcgtacagctgttcagcttcgaagcctcagcacagtattaaaacgcctcaaggaaatcatggaggggaaaagccaggatagtgacctgaaacaatactggatgccagatagccaatgtaaagagtgctatgactgtagtgagaaatttacaacctttaggcgcagacaccattgccgactatgtgg

SEQ ID NO: 216630 - DNA, 421 bp, Homo sapiens
gccaccttggccccctctaaactttgtacactgacaagcatgggagaggggctgagggggagccaagggtgacttggcaggggtctgcaagtgcccctcagcaggaacagcttgggtcccgtggatgacattattgatggtggcagaaggcaggctcctgggtggaaaggtgcaggtccagtgaagtaccacctttaagccagggacagcctgaagcctgggtgccggactgtcacttctgggtggagtccatcgcccagaatgagaactcatgatgcttattctgggccatccatggcccaatcagcatgcacttcctcccttctgaagcccatgaaaaccttggactcagccactcacagagacattgaatcgacctgcatgtggaaaggagctactcactgccagtctcctgagggct

SEQ ID NO: 216631 - DNA, 456 bp, Homo sapiens
atagtggttcctgtccctaggcagcttgctatctagaagaggagatagcatttataaaataacttattgaagtgatttagtgattgttcaggagatgggaagaacattcaaggaatatatttaagagacttgtgtttttttcttaacacatggttggtctttgttccctattcttccccttttctttgggtaagaaatttaccattttaagtctaaaagagaaatgagtgtcctcttgcttggcattaaatttggtttactagtaaaataaatgaagaaactcagtacaaatggtctccagagtgtaagtgatgagcatttctgacgaatagaagttagttttttggattttgatagaaataatgttgtatatggacttaggaggctaagacaacaggatggcttgggattaggagttcaagaccagcctgggcaacatagtgagatcctttctgt

SEQ ID NO: 216632 - DNA, 386 bp, Homo sapiens
atgggctcatacttatttctcatttttatgagaaatggagaaaagtcatgcaaataatggttcaagatcagtagtaatttataaaagataattattcagtaggcttagcacggtgcctcacgcttgtaatcccaggactttgagaggctgaggtaggcggatcacctgacgtcaggagttcgagaccagcctggccaacatggtgaaaccccatctctactaaaaatacaaaaattagccaggcatggtggtgtgtgccttttaatctcagctacttgggaggctgaggcaggagaatctcttgaacccaggaggcaaaggttgcagtgagctgagttcacactccactggactccagcctgggtgacaaagtgagactccatctc

SEQ ID NO: 216633 - DNA, 471 bp, Homo sapiens
ctcagaagctacataccaggattcgcaaaggggacaaatccatggataactgtggacttcaaaataaggagccctgggggaacaatgcagtctgaggttgagctgcaaaaactcagccctcaaggcctttgggggtcctgccagtcccctcagaggggcccacagtggactctacttggcaaacttgccagtccagggacatggaagcagagagcgggggcatggagtcccccacctggagacagactctggcctgggcccactcaatggcccaactaggccaaaggagcgcaggcaacaggaaggggacaggcaccagtgcggctgagcaccaccacgcagcaggcccgggccagggagcatgtcctgccttggccacctctctgaggacttgggggtttctctgaaaagttaccagcctctaatgtttaactgtagttctcctctttcatgggaaagtgtagatcagac

SEQ ID NO: 216634 - DNA, 697 bp, Homo sapiens
caggaggatcacttgaggcccggagttggagacgagcctgagcaacaaagtgaaaactctatctccaccaaacataaaaaataaaattagccaggtgcggtggcttgccctttagtccccagctattggcaaaatgaggtagaaagatagtttgatcccaggagtgccaggctacagtgagctacaatagcgccactgcactccagcctaggcaagagtgaaaccttgagttttttttcttgtttttgtggggggacagagtctcgctctgtcgcccaggctgtagtgcaatggtgtgatctcagctcactgtaacctccacctcctgggttcaagcgattcttctgcctcagcctccagagtagctgggattacaggtgcccgccactatgcccagctaatttttgtatttttagtagagacagagtttcaccaggttggccaggctcgtctcaaattcctgacctcaggtgatcctcccgcctcagtcttcctgctgcaattcctccctcccccactctcctactccttatgtttcctcatcttccctacctctctcctactatcccaatcgccctccgcacattcatacacgaccccctcatcccccatcctccactctctcacttcccctcccatcctcctcctccattcatctcttcttccttccactcactttccctacactcctctcccc

SEQ ID NO: 216635 - DNA, 500 bp, Homo sapiens
ataaataaggcaagataggattagggaaagagatggtcagctctgaagccactaggagaaatacttctttgactgatggagaaaaatgaagaaaaaatgaacagcaagaaagaactgggacataattgcagctcatgccatttgtctttgtcctctaacctcacctgaaaccccagtaactatatcaatcacacaaataggcactctgtacttggagttggactttttttttctacattgcttattacattatacaaattccatatacaactcattgaaatggttagttctttaagcttgattatgtcaattcccagtgaccaacctatgagcaaatccattccatcttatcccacacttccaaacctacctaatttatcctatcttcttcctggctttttgtcttttctgcttttcttacttttcttgaatcattaaaaatgtttgcacacttgttatgtgtcagttcttcatctcaaagaattatagtaggagagata

SEQ ID NO: 216636 - DNA, 391 bp, Homo sapiens
tcggaccgtcttcatcatacctaccctacctataccgtatcttggctccagaggctgcctactgtatcattccattccatcctggattctcctatagggagccaagtacacatgatagccccacaggtcttggtcacaatacctatcatctgggggccaatcaaggaaaactgtcaacatgaatatatgaagctcttatcaatgaataataccaattcctggctagatcgggattacatttgcctgcatacaacttgggaattcaaaataacaatgatttatacacacagtttatttctctcatgtaaaagaagcttacacagggacattatcttagttcatggcttctatcttcaaggtcacttggcattggtaggtatgatgaaggacg

SEQ ID NO: 216637 - DNA, 331 bp, Homo sapiens
tgcctggcattttgctagattttagggctacatcagtgagcaaaacaaacatgatccctgcccataatgttgtttatagtctggaggagagagagccattaaaagacaatttcacgtggctcacgcctgtaatcccaacactttggaaggccgaggtgggcagatcacgaggtcaggagatggagaccatcctagagaacacggtgaaaccctgtctctactaaaaatacaaagaaattagctgggcttggtagcaggcacctgtagtccccgctacttgggaggctgaggcaggagaatggcatgaacccaggaggcggagcttgcagtg

SEQ ID NO: 216638 - DNA, 169 bp, Homo sapiens
gccagcccagacttcgattctagagcacacccctgaatcctgttctcacctcagttaactagcttctcattacctgggtgctgatgggctttaggatcaactcccataaatggagttataattccattattagggaaaaatctgtttgaagtgttcaagagaagccata

SEQ ID NO: 216639 - DNA, 392 bp, Homo sapiens
cacccccaactcaaaccttgacattgaggcaggacaggggatacttcaataagctggtattgagaccttggggtttggaaacagagtggatgccacccaaatctagaatccaggagcctgaccaaggagctgcttttgcagaggagggtaacacgcaggttaaagagctcaccacatttcctacagagactggtggctgccttaaaagagtgcacttcagagcctgaatgcctaggtctgaaactctgacacttaacagctgtcggtattgagaaagttgtttagcctctctgggactcagtttcctcatatgtaaaacagagataataaaagtacctacctcataaaatcgttgtgagaattaaatgggccaatatatgtaaaatggtacc

SEQ ID NO: 216640 - DNA, 443 bp, Homo sapiens
gtcataagggtttcttctactctagcacaggagaggcaacagaggtggagagtaataggatgggatcaaaactacagatttgggttagcgttaagtcagtgatatccatatccctctactggggccatgtccttttctttattttttataatgaagcattgattagatgttctttagtctccaactcatggcggatttttcttcttgtatgtttatgtagtataaattccttatatttattctcttagaattttatctttgcgaagtgcttgtttaactctgcctttttttttggcgaggtggttgtgtgtctttatttttatgtgtaggagaccatatttataccaataccttaggatataagacaaacccacttaatatagaggcttaatgcaaaagcatttattgagctcaaggttccatggttagaaaattagcctggg

SEQ ID NO: 216641 - DNA, 445 bp, Homo sapiens
ttggggtttttttggtaatacttattggtaatacttagtacctatttgatttaagccattctgtgggagtattactgtatacattatatatctggtttttcttcaagtacattgaaaaatcatcatcatttgaaatctagtcactgatggagttgtttaggaggtaattagtaaaatatacctgaccagtaaatactatgacttagtttccttgctaaccttacttagtagactccttttcttttctcctttcctttccttttccctttcctttccttttccttttcctttactttttctcttctcttctcactcttttcttttctttttccttttctttcttttttttgagacagggtctcgctccgtcacccaggctggagtccagtgagctgagattgtgccactgcactccagcttgggcaacagagcgagactgtctctc

SEQ ID NO: 216642 - DNA, 424 bp, Homo sapiens
agtatctaaaggttctttctccacgtcctcagcaacagttgctatcttttgacttttcgataagtcatcctaacaggtatgaagtgatattgcagtctggttttgagttgtatttccctgatgaacagtgatattgagcaccttttcatataccttttggccgttggtatgtcttctttggaaaaattatctgtttggatccttttctcattttttaaattgggttgctattgagttgtatgggttccttatacatttttgatattaatcccttattggatatatggtttgcaaattttatctctcatttcttaggttgcctttttattttgttgagtttcctttgctgtgcaataactttttactttgatgtagtcccagttgtttacttttgtttgtgttgtctgtgcttttggtgtcatat

SEQ ID NO: 216643 - DNA, 464 bp, Homo sapiens
actttgggaggctgacacgggtggatcacctgaggtcaggagttcaagaccagcccgaccaactaaatacaaaaaattagctagatgtggtggcatgtaatcccagctcctctggaggccaaggcaggagaatcgcttgaatccagaaggcagaggttgcactgagccgagattgtgccactgcactccagcctgggcaataagagtgaaactctgtctcaaaaaaaaaaaaaacaaaaagttaacaaaacgggcttctctagttctaaagcaccaacacagaggtgatcaaaatactctaagaagcactgggaaacattgaggggatggttcaaacatcagagctaaggcctaatttcccaacagtcattatttctgtggtattcggcatattagagacgtataggttcctcacctaatccttgttttgtcattttatttttaatacatatgaaagtcataat

SEQ ID NO: 216644 - DNA, 491 bp, Homo sapiens
catttcctcctgggaaatgactctcccacaacatacccaggccgggtgtgagaagagggcttcccctccctggctaagcaagggggatgctcctctgcaactgaatctggaaccggctgaccccaaagttcctgtgtccctgggacccacctcttcctgcatggtgtggtcagcaattcctccatcaagcccccgacaaccctccagacaccctggtctgcaggggcaagtggaggccagagaacgctccgacacaggtcatgacccaattcacagcaagaaacagaaccccaacctcacatcaccccaacagcactccttttgctctgcaatccccaggtgacgtaggtctgtccaccagggagtgggcacacagggtggccacgacgctgctcggacaccgcagtcatgtccctctcagtggcctccaacactccactggctgggtgctccctggaccccgacccataacaagtgtccctgtgatgtag

SEQ ID NO: 216645 - DNA, 369 bp, Homo sapiens
agaaaagagtataacagttgcacaaagcatagagaagatgcttgctctgtattgtaagttacagggcaagaacacaagcactgttcaaactccccctgataagtttcttacaaagaaataaaacgtgtagaaggaaagagaaaaagaaagttagttcttagtgttcctaatgtaattacagtgtactcataagtacaatatatttattttactattttttaatttccctatgtagtaaaggtttttaatgttttggcaaaattttttaaaactcgtaagacgataataatttttcctattgattattaagattgttttgcgtggtttcagcttgcacagtcatttttccaatcccattttaccatagaa

SEQ ID NO: 216646 - DNA, 381 bp, Homo sapiens
agctcattcctgtaatcccagcactttgggaggccgaggcagaaggattgcttgaggtcaggagtttgagaccagcctgagcaatatagtgagaccccatctctaagaaaaaaatagaacaattagcctgccatggtggcacatgcctgtagctattttgggggctgaggtgggggaagatcccttgaacccaggagacagaggttgctgtgaacggtggaggttgctatgaacggtggagcgccactgcactccagcctgggtgacagagcaagacttcatctcaaaaaacaaaaagtaaaatgtgaagcacagccaaaacatgttttctaagacctgcaggctttagatagttctggtcacctgatctggcccctcccc

SEQ ID NO: 216647 - DNA, 561 bp, Homo sapiens
agctctccaagccctgttattttggatttttatggaggctttattacataggcacagttgaccaaaccattagtcattggtgatcaacttaaccttcagcccctctctcctccctggaggttggaggtggggctaagagtcccaaccttctaatcacaccttggtctttccagtaaagagctgtcattctgaattacctgggggctgccagccatcagtcaaccattagcttacaagaagacatcactgtggagtctttaaggattgtaggagttgtatgctagaaaacagggtcaaagaccaaatatatatttcacaatatcacagaaggtataggccttggagagtcctagccatatgtgaaagtatcagacctgtctctttactctttttaacacaaaatttcttcccttgttgcagtctccattaaaactcagaattgaccaggtgtgatggttcatgcctgtaatcctaacatcttgggaggccgagacaggagaatcgctcaagtccaggagtttgagaccagcctgcacaacataggaagaccctgtctctata

SEQ ID NO: 216648 - DNA, 271 bp, Homo sapiens
gagacagtcttgctctgttgcctaggctggagtgcactggtgcaatctcggaagaaaagaaaagaaagaaaaaaagaaaaaggaaaaggaaaaaaggaattcaaatcagataatgtctcctctccttaacagtctccaatgatttcctattaaactctgaataaaagccaaatagatggaacagaatgtgtaaatgcacgaaggtgtgctactgtaagcggacaggtatggctgcagtatggggtgtacatggtgggtgcagagaagatga

SEQ ID NO: 216649 - DNA, 599 bp, Homo sapiens
atgtaatatgcttttgtcatagtaataataaggggattatgccccagcatgaagcacattttaatttcgtatttgttcagagaaaagatctaatggtttcatatcccttcataggatgtagtctctcggtctatcttaatagagaattgtctttcattatggaagtagcaacagaaccagaatcatacatttgatgcatgtaggcatggttggcctttggcctggacacaaaacatactttgatacatggtgtaataagctacagaagcttctgatctaatctgccattcatctttctctatgttcatgtgagataaaatcaggatacagatgtaggcttttggaagctgtgttggtcttactaagtacccctcgggaatagaaggccctgacctgtgtcttcacactgcctctcttgttcattactcagttcttcttctggaggtgccctgctcagaggacctgggctttcaagggacattgtttagggttggccaaagaggctgaaaagggatttttccagttcacctatgcataattcgtgcttcaaggccagaaaagctgagagtacctcacctcccaccccattctctcctttg

SEQ ID NO: 216650 - DNA, 467 bp, Homo sapiens
ttgacaaagccattcatgaaaaccttgtagccaggatggccatttgtagactggatgggtgatatttcaggtttctgggtatgtaacacatgcatacctggtacccgacagtgcttgattgagggatccctgttgtccttagtgtgtggtgagggacctgttctagccaatattttttatgagtaacttgaacaaagaaatttgcttgttatatttgcaaattgtgcaaaatagttagtattaattatatgaaaaatacatatttaagaattgcataatattctattgcagtattaattttaaaaacacaatttcaatgtatttgcatttgtccatccattaatttatcaaatatgtatgacacctcatattcaatgtcttatattagttactgaatgagtagaaggctagcaaaagttgtaatagaggggcaagtttgcaataaataatttagtaagatgttaaaa

SEQ ID NO: 216651 - DNA, 353 bp, Homo sapiens
gtcaacgggacggtgggctgggattcacatctgccctccctcctgccagactttttttttccacacaccaccacctccccttcaaaaccgatagtgctagtaatagtaacacaactgtcaggtattcaatacaaataatttttttgtataatcccagttgattgcttcagcagtaaataggggagaattgtgctgatcctgaaatgtcagagtcgaaagaagctgtaaaggccttcccctgcgaacctgttgcttcaatcttttcagctgtattccaggtcggttgtgttgtaactcatgcttgagtgcctccttgtcactagggaagagcgaaaaactaacatttactgatc

SEQ ID NO: 216652 - DNA, 107 bp, Homo sapiens
cctgggcaatgaagtgagaccctgtctctatttaattagtaaaattaacaccacccatgtactgtctgcaggaggcaggtgggctgtgctataactgatagcaccca

SEQ ID NO: 216653 - DNA, 449 bp, Homo sapiens
ctataaataaggaaattgatttgtcatttctagttcactttaatggtaatttaactctctaatttacacattgcatacaattgatatttattgaattcctctttggacagcctaacaatgtacagacactgggaagaaattagaggaatagtctctatcttcactaagcatatgaggtgggacactttttattgcttactttggctaggcatccatttacatactaattcatttaattctcacaacaaccctatgaggcaggtactgttagtgcccctattcatttagcgtggaagcaattgaagcacagaggcactacatgacttgtcctggatcatatagttagtaagttatggaactgcgattcaaacccaggcagtctgcttcaagaacctgtgctcctgatcactactctgtactgcctcttgttccagaacagtattaagaaa

SEQ ID NO: 216654 - DNA, 717 bp, Homo sapiens
tttatgcgaacttgagccttcaagcctccaggtggcagtgttgctccacttgagagtttctgatactacctccctaacaagcactgtgtaaagccatctccgagactcgcagaacagaattttggttaagtctgaacctgacgtttctgagatttttgacactgaaaatgttttattgctggttgcttctcctaccacaacctcaaaggaaacatggctactactgaaaggaagaaaatttttgaatagttaaaatggaatttatagccattcaaagaagtacattaggagttagcattttaaaatttctgtggccttttagaaaggttggaatgttgtaaaacaattaataataggttttcataatcaaaggtgatgagaggcaaggaaagaatcatttctgtgccccatctcatccacagcagcaatggattttgactagtataggagggaatgaaaggaggctatattaaaagtatgctctattttaaagttttccatgggggaggaaaagtttacaattagtacaagccactgaacctggtcattcaatgtcttttcaataaaggggagttcacagggtagtaaaagtatgagtttaaaaagcaaaagtccaaattcaggtaaaaacatcctcaaaagttggttagattgaaaagaatcaatatgagttttactttgcagcgtatttcaattgagacttacttcaagtaggga

SEQ ID NO: 216655 - DNA, 785 bp, Homo sapiens
tttatgcgaacttgagccttcaagcctccaggtggcagtgttgctccacttgagagtttctgatactacctccctaacaagcactgtgtaaagccatctccgagactcgcagaacagaattttggttaagtctgaacctgacgttctctcgacgatcttcttgaacacgtggaacaactgtctcttatttcgcatgcgttggctctcttccatagcaacaaagccttccaaaagggaacacaattggcttactatactgtgcaagagcgagaagaaaactcttcgagcaattcagcttcaacaaggggcaactattagtacgcacagttcaaacagcaacagctaccacttcaggcagcttagcattttaaaatttctgtggccttttagaaaggttggaatgttgtaaaacaattaataataggttttcataatcaaaggtgatgagaggcaaggaaagaatcatttctgtgccccatctcatccacagcagcaatggattttgactagtataggagggaatgaaaggaggctatattaaaagtatgctctattttaaagttttccatgggggaggaaaagtttacaattagtacaagccactgaacctggtcattcaatgtcttttcaataaaggggagttcacagggtagtaaaagtatgagtttaaaaagcaaaagtccaaattcaggtaaaaacatcctcaaaagttggttagattgaaaagaatcaatatgagttttactttgcagcgtatttcaattgagacttacttcaagtaggga

SEQ ID NO: 216656 - DNA, 313 bp, Homo sapiens
gagttccgggggtggtgagggtgtgaaagccaggtcagtcagtaggaagacaggatgtcagattgagagactcccctggccggggaaacagacttggagaagggggagttttggatgagacagtccacttccgagtcacaaaatagcttgtgggtgtctgtttactgttactcagtgggagtggctggggacacgccacctgggcagggctttcgtaattctgcatcacttgtgaaggtcacagattcccagcacaacggacacacccatgttcatagtctgaactcctaaacacatcttaaaccaaaataaa

SEQ ID NO: 216657 - DNA, 742 bp, Homo sapiens
gaaggggagcatttcctcctgatcaggctgaggtttctctccccagaagttccagccctcgagttttcaagaatcagagctagaattccattagttagggtcaagagaacaacagcaacaaaaagcagtctggaagtctcaaaactttccatgtatataattcaacgaatttttagtttatttaccaagttgtccaaccattgccacaatctaactttagaacattttcatcaccctaaagggtatggaatattttgtatctaaaattcctctttgctgctccttgggaaagttttctcctggatttgaatctgcatgagaaaccttatcagtcttggctgggtgcagtggctccctcctgtaatcccagcactggagcttgcagtgagccaagatcatgccactacactccagcctgggtgacagagtgagactccgtctcaaaaaaaaaaaaaaaaaaaaaattagccgggcatagtggcacacgcctgtagtcccagctactcaggaggctgaggcagcagtattgcctgaatttgggaggtggagtttgcagtgagctgagattgcgtcattgcactccagcctgggcaacaagagtgaaactccatctcaaaaaaagaaaaaaaagaaactttatctcttgttcttcaaatttccttttccagtaagcttgatcatttaatatccagatgacaaccgtgtggtctccagcattagtataattctttctttggcctta

SEQ ID NO: 216658 - DNA, 414 bp, Homo sapiens
acccgggacaggcagtgatggagcagggacttagtttgccttttagttcttgtatgaaaagaagttttgaggtgaatgtgattcacgctaacagtcggaaactctgggcggggcgcggtagctcacacttgtgatccctgcgctttgggaagcggaggcggccggagctcttgagcccagcagtgcggaccagcctgggcagcgtggaccagcctgggcagcgtggaccagcttgggcagcgtggctagaccccatccctacaaaaattacaaaaagtagtccggcgtggtgggctcctgtgggcccatctactccgtgggctgaggcgggaggatggcctgagcccgggaggtcgaggccgcagggagtcgagatcactgccctccagcccggtggatagcgagacaatgaaa

SEQ ID NO: 216659 - DNA, 595 bp, Homo sapiens
tgtccccatgatatctttgttttaaagggagattaaaaagagttggagagatgttaaaggcttgttaacaccaaatggagactcattttgacttagctctgaaagagagtgggaaaggcagtacagttcactctctgggactcaatgtcacaatgttacccaatgcctctccatgcatggcctaaacccttggtattcatcccacaagttgcaaatattgcacaaaggatccctaggtttctctcctagatctgaggtcttgcagcaagcacatggtttaacatctggatctaacacggtgaggaagcaagcaggcaagagaaccctcccagtgtccaggatttcattcaataccctcaacaatgctgagagatggggactattcctatttgaccaaaaaggaatgtagagctcagcaagacagtgacttacccaaaatgacacaataggcccatcccaggactcatggatccaatcaccatcctctgctcttcccaccccactttactgatttccatggggcaagcaacaggagaggcaaagccagaggatatgaagaacgacagggaccctaagcaaaaaggctgctctgtgg

SEQ ID NO: 216660 - DNA, 299 bp, Homo sapiens
ctgtatttggctttttcaatatttgttaaaaagatcccatcaaggaaacaatgacatgaatggaaaagaaaccactctcccaaatctgacttgatctcttcttagctttcagtggaggttttcttgtacttggaaatgacccttttacacagaaatgctttattaagaattaagaagtaaggccgggtgcagtggctcacacaggtaatcccagcactttgggagactgagactggcagattacttgaggccaggagtttgagaccaacctaggcaacatagccagaccctttctctaa

SEQ ID NO: 216661 - DNA, 516 bp, Homo sapiens
tgagacggagtctttctccgtcgtcaggctagagtgcagtggcgtgatctcggctcactgcaacctccccctcccgggttcaagcgattctgtcgcctcagcctcctgagtagctgggattacagatgcctgccactacgcaataaggaccagttttttaaattcatcttataaacacggtcactctgtttttgaaagttttacgtcatttggctttcaggagcccacatcctggcttgccttctgtctcattagtcactcctcagtctcctgtgtggaattgtttgaaaccattttcctaggtgatcatatttagttttatgtttatgtttgctggttttttttttttctttttttgagacggagtctcactctgtcaccagggtggagtgcagtggtgcggtctcggctcactgcaacctctgcctcccgggttcaagtcattctcctgcctcagcttcccgagtagggggactacaggcatgtgccaccatgcccagataatttttgtatttt

SEQ ID NO: 216662 - DNA, 528 bp, Homo sapiens
gattccaagctaatctttaacctgaagtgtcttaatcatacttaataaatccttagatgcagtggaaagaacctcgctggcatttcgatgccacactcaatacaggggcatttgaaaggatagaagagctttatttcataggatttcactcgattgaacttgtcaagaaaattcagaagatgttagcttaatctacaagtaataaatccatagtggaccgttgatgcaatgaaggtcgtccatgtgcattccttgagttgcaggaaaatgctcttgatacaatttttcctgctttctctaaaaacatgcattggaatgaatgtgagaggtaatgctggactgaacactggccgaagtcattatgaggtagtctctattacagctttagaaatgattgcgcctatgaagcacagccattactggactttacattttaagatatgagcacagtctgggcacggtggctcatgcctgtaatttcagcactttgggaggccaaggtgagaactgcttgaggccaggagttag

SEQ ID NO: 216663 - DNA, 550 bp, Homo sapiens
gatacatacatcgtatacatgtatctgtgtgtaaacatgtatctgtgttaccatatcctggggttcctttcccagcttgtagccaatagccaaaagttcagaattctgccttctgcggaccctattatcaatttagaagctacttacctaagtaaatccatttacattacagcatctatttttaaaatgtagtaaaattgctgtgtaacacaaaggcttcttggagaatgaaacttcaaaaccagatttgaatcataaaaaatacttcttcacggtggctcacacctgtaatcccagcactttgggaggcagaggcagatggatcacgaggtcaggagttcaagaccagcgtgggcaagatggtgaaaccctgtctgtactaaaaatacaaaaatcagccaggtgcggtgatgggcacctgtaatcccagctactcgggaggctgaggcaggagaatcacttgaacccagcgtggggaggggtggaggttgcagtgagccgagatcgtgccaccacactccagcctgggcgacagagtgagactctgtct

SEQ ID NO: 216664 - DNA, 889 bp, Homo sapiens
  misc_feature (193)..(193): n is a, c, g, or t
  misc_feature (197)..(198): n is a, c, g, or t
  misc_feature (200)..(201): n is a, c, g, or t
  misc_feature (203)..(203): n is a, c, g, or t
  misc_feature (208)..(208): n is a, c, g, or t
  misc_feature (213)..(213): n is a, c, g, or t
  misc_feature (215)..(216): n is a, c, g, or t
catgtcccggtagcagaagcagcagcagcagcagcagccctcggccgttcgcggtagacgcatgacggagccggccatggcgattgtcgatgccgctgaagtgggctgaaggaggaggacaaagagcccctcatcgagctcttcgtcaaggctggcagtgatggtgacaagcataggaaactgccccttttcncagnngnncntcatnttctntnnctcaaggagttgtatttagtgtgacgactgttgacctgaaaaggaagccagcagacctgcagaacttggctcccgggacccacccaccatttataactttcaacagtgaagtcaaaacggatgtaaataagattgaggaatttcttgaagaagtcttatgccctcccaagtacttaaagctttcaccaaaacacccagaatcaaatactgctggaatggacatctttgccaaattctctgcatatatcaagaattcaaggccagaggctaatgaagcactggagaggggtctcctgaaaaccctgcagaaactggatgaatatctgaattctcctctccctgatgaaattgatgaaaatagtatggaggacataaagttttctacacgtaaatttctggatggcaatgaaatgacattagctgattgcaacctgctgcccaaactgcatattgtcaaggtggtggccaaaaaatatcgcaactttgatattccaaaagaaatgactggcatctggagatacctaactaatgcatacagtagggacgagttcaccaatacctgtcccagtgataaggaggttgaaatagcatatagtgatgtagccaaaagactcaccaagtaaaatcgcgtttctaaaagagatgtgttcatgtcttgctctaagaatttgct

SEQ ID NO: 216665 - DNA, 804 bp, Homo sapiens
ccttagtcttcctagggatgggatgccttccttggaaagagcttctggttctgcttgaacttttaggtggtcagtgtagcatagatggtagtgagtttatgttgactgtgaacttttgtttcaaagcacacctgggcagagacaggtgggttgatgccgagaaggctgagagggaggaagtgtgagccaagggaagagatgaacgtgtgtctgagaagggggggaccagggcagcccggcaagaagaggccgtcactggcagccgctctgtcactgctggggaaagaatgcccagggcgctctggcaatggagtttcactcttgctgcccaggctggagtacaatggcatgatcttggctcaccgcaacctcctcccggattcaagcaattctcctgactcagcctcctgagtagctggattacaggcatgtgccaccacgcccggctaattttgtatttttagtagagatggggtttctccatggtggtcaggctggtcttgaactcccaacctcaggtgatctgcctggctcagcctcccagagtattgggattacaggtgtgagccaccgcaccaggccacagtatgcgtatgtttaactttttaagaaattgtccaaatgttttcctaagtgtttggtggttgtaccatttaagttctcattagctgtgtatgaaaattccagttcctccacatccctgccagcacttcgtatagtcagtcttttttattttagctattctaatagttagtggaatgagagatcttgtatccatttttttaggctgctttcttcttatta

SEQ ID NO: 216666 - DNA, 374 bp, Homo sapiens
aatgttgcctttatgctaatttttatatttcttgcttttgaaaacatttaaggctgggcatggtggctcatgcctctaatcctagcactttcagaggccaaggtgggaggatcgcttcaggctaggagttcaagaccagcctgggcaaaaaagtgagaccctatctctattaaaaactgaaaaattagccaggcttggtggcgcatgcctgtggtctcagctactcacaaggctgagacaagagtatagcttgaactcaggagttagaggttacggtgagctgattgtgccaccgcactccagcctgggtgacagagtgagactctgcctttaaaaaagaaagttaaaaaccatttaagatatttctgagctca

SEQ ID NO: 216667 - DNA, 1004 bp, Homo sapiens
  misc_feature (968)..(968): n is a, c, g, or t
  misc_feature (970)..(970): n is a, c, g, or t
aacaaactggttgctgaagccatggtttccctgggaaggtggacccacctgtgcggcacctggaattcagaggaagggctcacatccttgtgggtaaatggtgaactggcggctaccactgttgagatggccacaggtcacattgttcctgagggaggaatcctgcagattggccaagaaaagaatggctgctgtgtgggtggtggctttgatgaaacattagccttctctgggagactcacaggcttcaatatctgggatagtgttcttagcaatgaagagataagagagaccggaggagcagagtcttgtcacatccgggggaatattgttgggtggggagtcacagagatccagccacatggaggagctcagtatgtttcataaatgttgtgaaactccacttgaagccaaagaaagaaactcacacttaaaacacatgccagttgggaaggtctgaaaactcagtgcataataggaacacttgagactaatgaaagagagagttgagaccaatctttatttgtactggccaaatactgaataaacagttgaaggaaagacattggaaaaagcttttgaggataatgttactagactttatgccatggtgctttcagtttaatgctgtgtctctgtcagataaactctcaaataattaaaaaggactgtattgttgaacagagggacaattgttttacttttctttggttaattttgttttggccagagatgaattttacattggaagaataacaaaataagatttgttgtccattgttcattgttattggtatgtaccttattacaaaaaaaatgatgaaaacatatttatactacaaggtgacttaacaactataaatgtagtttatgtgttataatcgaatgtcacgtttttgagaagatagtcatataagttatattgcaaaagggatttgtattaatttaagactatttttgtaaagctntnctgtaaataaaatattttataaaactaaaaaaaa

SEQ ID NO: 216668 - DNA, 423 bp, Homo sapiens
aatccctagacagttaatgccagagtgtttgaaccaattaaaccaccaagatgagcagagacaacattgattaatgttctacttggaaatcaagttttatatttaggtctgtggaaaaagaaaatgaggcagactgctttcctcaacaaaacccttattttgaagtaactttggtcttagagtagacaagtgaaggtgggaggaacagttcctctctttctccactacaatccaatttttccatagaaaaatatgaaacaggctgggcgcggtggctcatgcctgtaatcccaacactttgggaggctggggtcgggggggggcgcggatcacgtgaggccagaagttcaagaacagcctggccaaagtggtgaaaccccgtgtctaatacaaatacaaaaaaattagccaggcgtggtggtg

SEQ ID NO: 216669 - DNA, 999 bp, Homo sapiens
aaagcacagggtcacaggaagactgacgggcaaagacacagttacagacctatgaacagagccacacgccaaacagggacaaaccgttgagcagttgggaagatgtggcaaaacaggacttatattccttatggcaacgatgggctgagctgagtgtctgcagcctgctttaggcagggcacggctgtgcagtctgtcatcgtccctcgtcactcccatcaatgctggcaccaacctcacttctatttatcgcctcatctgatcggctgtttcttatagcagaaacgtctgcaaggcatgtgaatttgtaaccatcaccctcctcacagggttgctgtgaggatccggtggactgatgcatgcaaagccccgagcacagtgcctggtacacggcaaaagctgaatacttctggccagccctaggaatatttccttgggagcagagggctcttctggaagcttctggaagatgaatggcatcttcgcacacctgctccgaacaggcattgtttgggactcagcgccctctggtggctgctctccccactcacacttagcctcttccttggttggggggacactttgaggcctcattcctgcccctccccttcctttcacatggaggaaagttctagaatggggtgggagaaaactttccacttgttctgcatttcctttacctccttcctgaccttaggtctgggcacaggaggaggggcttggaggtggaggctggagcttctgggggtcctggctgcatgactctaaggagggtggtgccttcgtccccacccaacccccaccgcatcggcccattctcctcccgaagcatccctgggccacaggttcccaaggccacctccagactgggcccgcgagtggggcggccctggtagcgtatccacagaagttattatgaggtaattttatttctttccattttaggtaaaaatagtaaatacaagataatcttaataaaggtaaaaatacatcatttgg

SEQ ID NO: 216670 - DNA, 619 bp, Homo sapiens
tcctagaggatcccggttatacggagaatattctgtccccacaccccaactttctatatattggagctttttattatagaagcccttggaagaatctgcatgcgttagggccacaattgaccacccactgacacagtcaccctttaccactgtaggacatgattcaagacagaagcagagccccacaatgactgtatcctcaggctgactttggcgctgtcttcctgcagcatccaccctgttgttgaagcagtctgggagcaatactatcttccatgctccagcccccacctcaacccctattcctacccccattttccaaaagaaagagagagagaactatatcagagtgtgagttaaacaggtattcattacctcttgtcttaaatgtcctgtgcgtagcactgtgagggatagaagaggagtaaaccagttgttgctctcaaggaacttgataagaagatattagaattatacttaaattcataatacaagaaggcagaatggcattcagttggtgtgcttaaaaaaccgtcggccaggcgctcatgcctataaacccatcactttgggaggccaacatgggcggatcatgaggtcaagagatcgagaccatcct

SEQ ID NO: 216671 - DNA, 432 bp, Homo sapiens
caaaaaaccttccttttcctattgctttgaagtgccttttctgttgtatattgtcaatatatgcaaagatcttttatgggctctttattatattggtttttttcctgtgctaatgtacactctcttcattacttcatgatcttcaaaaaaatttttgatatataatatcaaagtcctttcacatccttgttattcatcaacagcttgtggctcttcttggttctctgctcttctttatatattttagaaatagcttatcacgtttcactaaaaaaagccgaacacattgaaaatttgattggagttgcgatgaatctataagctattttgggagaatttatatcatagtgggcctttcaatccatgaacatgatatattgctaagtccttttaatgtcttaataaaattttattaatcaccaagaaggtctt

SEQ ID NO: 216672 - DNA, 385 bp, Homo sapiens
taatcccagcactttgggaggccgaggcgggtggatcacgaaatcaggagatcaagaccatcctggctaacacggtgaaaccccgtctctactaaaaatacaaaaaattagccgggcgtggtggtgggtgcctgtagtcccagctactctggagggtgaggcaagagaatggtgtgaacccgggaagcagagcttgcagtgagccaagatcgcgccactgtactccagcctgggagacacggcaagactccgtctcaaaaaaaaaaaaaaaaattagccgggcatggtggtgggcacctgtaatcccagctactcaggaggatgaggattgtgctactgcacttgagcctgggtgacagagtgagactcagtctcaaaaaaaaaa

SEQ ID NO: 216673 - DNA, 354 bp, Homo sapiens
ctaaattttcactgtgatttaattttgttttatagataagttagaagagtatcacttaatttccaaacgctgagtttttttatagttgtccttttgttattggtctttacttgtttctgttgttatcagaggacaagatttcagtcctttgaactgtgttgaggctggctttatggcttaacatggtctattgtggtaaatgattttttgtgcacttaaaaaatatgtatattcagtaatttttgttgattttgtgtgtgtgtatgaaattctatgatttcctgaaagagttgtgttaaattttaagttaaaatatacaatcacaattaatggtttattccttattttagttct

SEQ ID NO: 216674 - DNA, 129 bp, Homo sapiens
gggggctcctgagcttggcatgtgtgtatacttcagatttgaaaacttgctcacacactgtgttaggtccagggtaactgtagggcaggccactgagtaagaggtaagccagaagtcttcagttgttag

SEQ ID NO: 216675 - DNA, 450 bp, Homo sapiens
gggaccagcattccacgaaggcagcccttttctagatggagaaaacagaacctgaagacacccgtttccctaaactgctcttgctcatgtgcttccgaggcgatcgatcaggcagtgtcggtctgcagctgctaagccaagaagatctgggaaggagtcagtcagggagccttgggctggagtcccaggggctctgggagtggctgccagagcaattcactttgacctgggtcaccctcaacttaaggctcataactcccctagatcctcagggtccacactaaatgtgatgaaatatgatgcaagccacatatttacttttgcattttgtagtaaccacattttaaaaagtaaaacaaaagaagtgaaggtaattggaataatatcagagatttaaacaaatctatccgaaataccaggtctacaagtataaaatattttaacattaac

SEQ ID NO: 216676 - DNA, 710 bp, Homo sapiens
ccttacgggtgcgcgcttcggtcctggaggccttatcctaacctcctctccatcagcgccacccgtctggggcccgaaacgagggagctttccctctgtcccccagcctttggactgtcaccaaacaagccattcgttcatcaaaaatacttattaagcgcctaccatgtgcctgacaagggagatgtaacggtgagaaaaaatagggtctctctctctgccacccaggccagagtgcagttgacgcagggcaggggagccccgaagtggagcatagcgtgtccggaactggtgggttcttggtctcactgacttcaagaatgaagccgcggaccctcgcggcttccgaggcgatcgatcaggcagtgtcggtctgcagctgctaagccaagaagatctgggaaggagtcagtcagggagccttgggctggagtcccaggggctctgggagtggctgccagttctacaaggcctggagctgatacgaaaaacctcccttctttcccaaatgctccccagcttccccgttcactgaaggccctgcagtcaggaacagtcaggactttgcacccagttgttgtgggtgtttggccgactcttcctcttgtgtgattcatggaccctcagcattgcatcacctaggagcttttggaattgaagactctcagggctcacccggaaggacctcctgggccagaatctgcatttta

SEQ ID NO: 216677 - DNA, 484 bp, Homo sapiens
gctgagggaggagaatcgtttgaacctgggaggcggaggttgcagtgagctgagaatgcaccattgcactccagtctgggtgacagagcgagactccatctcaaaaaaaaaaaaagagtgctttagtccctaaaatgattttacattcaaactaatccttctcagagtgtacatttctttagcagtatcatcagctattaggttggtgcaaaagtaattgcagttcttgcctttagtaatggcaactcaaatagtattttggcctcatgcagtgtggtggactagagcttacttaaccttgggctcttagaatcttacgttggggaactgtgggcccagggcccctgttcttataaagctttattggaacataccatgcccattcgtctgcatgttgactttggctgcttttgcatcacacagtgcccaaagagtaaaatatttgctttcaacccatttaagaaaagtttgccaactcctgaag

SEQ ID NO: 216678 - DNA, 424 bp, Homo sapiens
cacagaggataccctcagggcccagccattgaaaaataaatgggtccattcttgtatggcctcaggggaagcctttctgccaccagagccctggactagggctgcccaccaagccaccccttacaggatctgactgcaggccagattaaaatgagaccctcacaacagggggcatccccccgctcccccccatctgccttccttctgctatcactcactcactcactcactttcaatcagtctctctagcttcctttggcactgaaagtactaggtcagaggttgcggtccctgagactgaaccagcagaatttggactcgggcctaactgcccgagagaacttggtgacattggctctgccatctccaagtctctttcctaagcttattttcccaacgtggccagggtgtggcccacagtgct

SEQ ID NO: 216679 - DNA, 549 bp, Homo sapiens
agattaatttttaaatgtcaaatcctccttttctgcctatttttctacatacatgattctaggctggttttctagctgaaccttaccattaattgctgtgacttctcaagtactactacaacatcttctcaagtacttctacaatatccctgttaccagcagagatgaatggtcaattatcttgaaaaactgtagtacatacaatgacattctgatgtagttgtataaatagttgataaccagtaacatttattactcagatttatcgcctacttcagtaaaagattacttccaaaaactctattcactctcaatcgataatagtttgccatcactgaagatactcagaagatacaccaaagagttctgaaacgggagtctaaatacattttgagaaactggcatcagaacaatgtctagtcccttttgaactattaacacactagtgaatatatttccagcaagtatatttgtataataaacacgtcctttaaaaaaatctttgaaatatggtgcttaaataactttcttttgtaaccttaaagtatc

SEQ ID NO: 216680 - DNA, 491 bp, Homo sapiens
catgtgtgtgtgtgtgtgtgtgtgtgtgtgtgtgtgtgtgtgtgtgtgtgagaggagtttcgcctttgttgcccaggctggagtgcgatcacacaatctcggctcaccgcaacctccgcctcccgggttcaagcaattctcctgcctcagcctcctgagtggctgggattaaaggcatgtgccaccgcacccagctaattttgtatttttagtagagacggggttcctccgtgttggtcaggctggtctcaaactcccaacttcaggtgatccgcccacctcggcctccgaaagttctgggattacagtcatgagccaccacgcccggccgggaatgggttcttcagcaaaattataatgtggatcacttgcacttgtaattcaaagacgtgtcacatattaaatattgtgcaattcagttttggataagtattgaattcactcttatacttacataatgccgggaggaatttatatcattttatattaaa

SEQ ID NO: 216681 - DNA, 343 bp, Homo sapiens
actagggggtgtactggcagggtggatttgtatcttatttcctgcacatagaaccagtattttcctgagagaaagggtcttttgtaactaatctttggagtatgacaaaatctaatagtccttaagaaatagagaactatttcctgcctcagctgaatgggttaagttcaatattttgagcctgtaactccagagatcagattaaaatatgttaatctttcttatcagaagttggtatagtagttagctattcaaagaactaacacttctagattctatcaactgacctagaagctcctttaggctgagaccccatatagacataattggaaaataactcaga

SEQ ID NO: 216682 - DNA, 230 bp, Homo sapiens
ctaaagggcttatatcacttctgtcctccttcccagccaagtaaagtaaagcaaaagagaaacaactttcaaaaggactgaaacactatggactcaatttccatgtgctgcactaaatggggtccttagagcatcccgggctgtctttgctctgattttatcagagtaaaaaatttaaattttgcttatgataggctgaagttcttataaggaggagaattctggaagaa

SEQ ID NO: 216683 - DNA, 400 bp, Homo sapiens
tcactgaggccaggaacatttcctagggcctcagctttggtccttctggatgaagcctcagggggactttcctctgataatggactaaacgattcaagatgaccttaatgaccaccctgtttaaaacagcctccttatttctccaatacttcttctccaaacattgatgtttccaccataaggtcagctcctctttttcttccccttatggcaaggcttatggagaaactacaccacataaatgaagactaggagctcaaaattccagaatgacctgggaccatggaaaattagtattttgccttctacagtaaagtcacactcttgagcaaaggaggaaaaaaaaattatcacagtccctcaatcagcaaaaatctaggcatggaagactaaaagaagt

SEQ ID NO: 216684 - DNA, 482 bp, Homo sapiens
aaagtgaaaatgctcaaaggggggaaataaggtatgagaccaccacttctcctgttgtccttcccagtttctccccaacctccccttttccctagtttgtaagacagcaaaaaagggagaaagcaaaaagttggaaaaaacagaagtaaaataaatagctagacgaccttggcgccaccacctggccccggtggttaaaacaacaataatattaacccctgaccaaaactacctgtgttatctgtaaatcccagacattgtatgagaaagcactgtaaaaactttttgttctgttagctgatgtttgtagcccccagtcacgttcctcaggcttacttgatctattatgactttttcacgtagaccctttagagttgtaagcccttaaaagggctaggaatttctttttccgggagctcggctcttaagacaccagtctgccaacgctcctggctgaataaaaaaacctcttccttctttaa

SEQ ID NO: 216685 - DNA, 477 bp, Homo sapiens
tactttcagaatggttgtgaagagtgtgtgtgaatatagctgtccatcagctccggaccatggagaaagtcatcagtggaacagaaacaccagtgtaaggggtttgctttgtttcttaagctggcctttagtccagttgccttagaacttaaacttcctatcttacagaccagtcgttaaggtgaagccaagtcttttctctttgtccatcaaaggctgatccacggagttcactggtcacaaaactgtcttctacaatcagggattgcattttaaataaaattcatgtagtagtcttaacataagcatgtctcaagcatggttacctctcaaaataaatggtcttaaggcaatggcaacctagaggaggtgccctctgtctttcatatcctggtctgatttgttgtatagatgacagtatggaagcttgaataaggaacagctgaacagaagatgccttcctgtgaacctggggtt

SEQ ID NO: 216686 - DNA, 1079 bp, Homo sapiens
  misc_feature (946)..(946): n is a, c, g, or t
gaagtgtgtgcatagtttaccacacaacagcatatgagtcatgtcaccatcattattgtcatcacccatctttatagtaacaagaaggtagttccttcacactctaacctaagccctttttcttcatcttcacctggctttggttcttttgctacagttactccagcctctctccccagcctttatcttccaaattttctgctgtgttgtttcaacagccagtgacttttctgttcatactctattgatgatgaagtaaaaattgattttgatttgtttctgatttcttttccttagtaagtttgagttgaacctttagttctctctcctcatctcctcgctttctacaaaggcaattcctggtgttaagtgaaagctgttcctgttagagcctactgtttgccattaataagtgataagggaggttgtcagccagcattaatactctgtttatgaaattacagttactgatgcagtattttgtgaagttcttaagatataaacggcacaagtgatttgataagttatagctccagagacttccttacatagtatgccagtatttctttttcccctctcaacgggacacacataacattaaattaagtttgtcttggttgccatttactttaaacggatctggtgcctgtgctcagatatgtttatgagagtataattgacttctctgaaagcattgagattgagggagtagttatatcttaccttagtctcattgatgattcatggaattgaaataattaaaaagtacttattacatgcctgattgcttcatgaccctttgataaactaccaacactcatatcaaatgtctcctgatttaaaaaaaaaaattttttttatacatatatagacaagttctcactgtgtcaccgaggctggagtatggtggctttcacaggcatgatcatagctcactgcagctctncgcctcctgggctcaagggatcctcctgcctcagcttctcgagtagctgggaccacaggcacctgcgtctagctaaatgcctcttgattttaatggcatgtcttgtcttcatagcatattccacaaaaaactc

SEQ ID NO: 216687 - DNA, 383 bp, Homo sapiens
catgaaatccaatagtcaactacaacatggtttgtgtgagtgaaaagaccccagaataagaccacctgggtgagcctgtgcctggtggtctcaaagcatccccctcctcccatccacccctgctctgccctgtatcatggggggtctggcctctgcaggctatgagccccgggttcctgtgtctctggcttctgactgggttggaccaatgggaagcctggagggacatgggtgtgtacaggagtctgggtgggcttcttgactctgtttgttgggctgtcttgcctggaggctctttccttctacaagccagctcctgccacagagacccaccctggttctagcttcccttcagtgagtctgattcctgggctctgataact

SEQ ID NO: 216688 - DNA, 425 bp, Homo sapiens
ctgaaataagaaataatctagtgataaaattgttgatgttctccttcactgtaatccattccaaatatagtttattttgctacagagcatgttctgtaatgtaaatggaaataagattgttaaagagggaatgatgtgaacataacttgggtgatgagaaggctcctaagggattttccccctgcattttgcactgccagcatttacactgcagcagagtgcaaaatatgctaacaaagctgcatacagcaaaccttagaagaatacagtactgtacaccatgtccattcatcctatcttcccaggaggttgatcatgtgcaaaagaaacaatgacaagataatgatccaaaatcaccagccatatctttgctgtggtatgtgtgaaacttgcatctacttattacataaaatgctacacctgta

SEQ ID NO: 216689 - DNA, 368 bp, Homo sapiens
tgctgtgtttttcccatcaaccaagaaacactatctttctttttcttcctcgacaatcattactgcaaaagggaaatagtatcttttacttgtaaattattatctgtgcccctctacttgaatataagctccatcagagtggggactcttcatttttgctcactgctgtttatctgcacctagaacagtgcctggcacatcatgggtgctcaagaaatcatttctgaatgaacgaacaaaagaataaaaatcattgtaatcataaaatttaacagttgaataagaaggcttgcaagtaaacttgcaagtcaagaatccctagatatcacatctgtagcaactaggaaattaggccttggtcactttaa

SEQ ID NO: 216690 - DNA, 374 bp, Homo sapiens
tctgatgtggtgtcccctaccaccccacacacttaattttccaggccactgattcagaattcaatggtgactatcttctccttcaatttgtatattgatctttttcattcaaaaattgtgagatttttaggcccaagaatttgagagattttgtagtatgtttgaacctcgagtgtcttgttaatttttgtctaagttgttctctgtctccaccagcagttctatttttatttaggagctacatattctggatattgttcttctatcattgctagatcccctagttttcttcaccaacttctgactcactcttagacctgagattcaccccttggggtgccctcaatagaagtattctgcttccacagatcatc

SEQ ID NO: 216691 - DNA, 433 bp, Homo sapiens
cagtttatttttaataagtagataatcagaattgtgtcaagataacatccagtgagacttgaacagaatcactcctgaatagttgactcagagtctctaatagccctagaaaactgacgagaaatcatcagttcctgataaaattacacaattctacttcaaccaaagaggatcaaagccagattggttggactgtcattcttctgtttatttattttgtgtattttttgagacagagtcttgctctgtcacccaggctggagtgcagtggtgcaatcttggcacacggcaacccctgccttcctggtttaagcagttctcttgcctcagcctcccaagtagctgggattataggcaggtgtggcaacacctggctgatttttgtatttttagtagagacagggttttgccatattggccaggctggtctcca

SEQ ID NO: 216692 - DNA, 553 bp, Homo sapiens
ctgttctgctggtgtttgccttcctcctgtgcaggtgtttcctgttaacctgccctggcagttcagcctactcagaccagcagtaagttctctttctctggcaatggcattttgtatcaacaacagctgtaggtcagggaagaggcatttcaggagccagaatcgcgggaccctcatttattctgataaagtatcacttggaactgttttctttgagattctctgggaaaaaaaatatcgtgccctaatgcagtgttttctaaactgctgattatgactcattaatgggagcaagaaagtaatgtattagactgcaactagaaatgtttttaatggaaggaatttgatgtaaatagtagaagatacaaatgtagcacatacagcaagtgtcctctgtgttcaaggttttgacataaaatatgtttcttcctccgagttggcgtcaaacatttgacagccattactctaattaactttcagtattttttaagctcctttgattcccctctccctttttccttctaatgataatttaagaatttttttttttttt

SEQ ID NO: 216693 - DNA, 495 bp, Homo sapiens
ctgttctgctggtgtttgccttcctcctgtgcaggtgtttcctgttaacctgccctggcagttcagcctactcagaccagcagtaagttctctttctctggcaatggcattttgtatcaacaacagctgtaggtcagggaagaggcatttcaggagccagaatcgcgggaccctcatttattctgataaagtatcacttggaactgttttctttgagattctctgggtgggagcaagaaagtaatgtattagactgcaactagaaatgtttttaatggaaggaatttgatgtaaatagtagaagatacaaatgtagcacatacagcaagtgtcctctgtgttcaaggttttgacataaaatatgtttcttcctccgagttggcgtcaaacatttgacagccattactctaattaactttcagtattttttaagctcctttgattcccctctccctttttccttctaatgataatttaagaatttttttttttttt

SEQ ID NO: 216694 - DNA, 500 bp, Homo sapiens
tggcacgaggtcgagtcttgagtttgactatatagagaaaaggttggcaaatattttctgtaaaggccctgatagcattttaggcctgtgggacccataggtctgttttatacatgtgtatatatatgtgtatatgtgtgtacatgtataaataaaacaacactttaaaaatgtaaaaacagctcttagtttgaggacctacaaaaacagactgtggagtgggcccatagccctagtttgccagcctcttatatggacactgattctcagggaagagctatttgttatttaactttctactccagccactctcaactataacagaatcaaattatgaatctttgccattgccttctgcgtttctgggaaacagtagcagaaaaaaacatgaatgttgagattggtatgaaaatggcaggaaaacactgagctcattttaatattatacttttgttgtgggttagccatttaaagttataactgattcattgccctctgga

SEQ ID NO: 216695 - DNA, 705 bp, Homo sapiens
tggaaatgcgtccggtcccagtgtgacggggaagagccgcgcctgaagctcaacttccgaggctctcatcaatctacgcttcctttggagcgtgcagccaccaggtggcagccgaggccacgggcagacagaaaagctcccgaaactgaaggactgccaggcagcagagttccggagggctcccaggaccttcaaccagaaagagacagagcatatgcgcatatccctgcaaggaatgtactatagagccaattttaccggcaaaggaatggaagatctgaaaggctaggcgatcccacaagcatcgaggagcaggctggaatttgaaccaatcggcatgattcccaagctcaagcttttggccacccctgcactgccagggacaaaaaaaaaaaaaaaaaaaaaccctgggaggagagccaagctagggagtcaagaccctccagccaggtctggatgggaggcaggtgcctccaccctggtcccagagcaagttctgctggcttcagccacctgacttccctgtgaagttgggtagaggccagagcagactgtgtgtgattctggccccagccccagcacctctacccccacctttactacccctaggctgcgggaagaggctttgcccagcaatagtcctgatctaatggatccttgaagcacaataaacagatagcatttctgcatgtgtcactctgagta

SEQ ID NO: 216696 - DNA, 608 bp, Homo sapiens
ccacgggcagacagaaaagctcccgaaactgaaggactgccaggcagcagagttccggagggctcccaggaccttcaaccagaaagagacagagcatatgcgcatatgtatgtctgagcccgtgcacggaggaggagtatgaacagacaccgcgggacagatggctggagtttagtcccttccttcggggctcttcaccactccttgggcttcccttctcctgtccagccctgtcctgggtgcacagagagggaagtcactccattcctgcccttgaggagctcccagacccagggcaggagcaggatgcagacaagtagacagcaccctggggtgggtggagtgagtggggcaggtggggcgggtgcaaagagagggaggagcaggggctgaagttgcccggaggaagtgctgaacccaggagtggggaaaggagcatctgggaagaaatggcatctacgctgatcatggagggctttctggcaagtctcaggagcaataataacacggatgtcatctctgtttcctcccagcagccctgcaaggaatgtactatagagccaattttaccggcaaaggaatggaagatctgaaaggctaggcgatcc

SEQ ID NO: 216697 - DNA, 487 bp, Homo sapiens
ccactgccaccagtcttagacgatagcactgaagtgagtgaatctcacggcctcccatggaaactctgtgcgtcttttaagggctgggctgggactggagtaggactagtgagggagtcttctcaggtacaagttttaagggggcatcaaagaatattttagtgcaatatatacatatatacacatatatatacacacatatacacacacacacacacacacacacatatatatatatatatatatattttgttttggagacagagtgtcactctattgcccaggttggagtgcagtggcatgatcttcgctcactgcaacctctgcctcttggattcaagtgattctcctgcctcagcctcccaagtagctggaattacacacacccgccaccacacctggctaatgtttgtatttttagtagagtcagggtttcaccatgttggccaggctggtctcaaactcctgacctcaagtgatccaccca

SEQ ID NO: 216698 - DNA, 555 bp, Homo sapiens
ctatggtacagcacgaggcaatggggcactgtccagccataccaaaaaagtgagaagcctcgctatatatggagtgattgccaggagacacaactaaatgagaaaagcaaggtgcagggccgcatatattagtgtgtgtgcatgtgtgtgtgtgtgtggtgtatgtattgcaaaaagaaagactggaaggtagaacagggtagatgagacagggataggattgagacttctctacatacactttttaatacaggatatgttgtatgtgttcaaaaataaaattaaattaaaaaacaaaattagccttaatgttgaatataaacatgaataaatgaccctaatgatatatcaaattggtaatatgaaaacaaagaaaaaattatttaaatgagtttaatatactattctaacttcacatacatagatatgtttgaaggataaaaatcttcaaaaaatcttgttacttaactctagttttattgttattaacaatattgaattgtaattttgaaacttttttatattatacaataaatcaaggtaaatgtgtaataa

SEQ ID NO: 216699 - DNA, 401 bp, Homo sapiens
ctttagctatgagacattgggccggtcacttattctcttcagaggattaaaaggataaaatattttaaaaaatatctatctatctatctatctatctatctatctatctatctatagatagatacacacacacacacacacacacacacatagagttcttatacaaaccctcattaaatgtaatccaagttgtagacccacagtactgatttaggtaggcaaaatatcaaattaacaacaacaaaaaaataccagacataaaaaatgtgtctcatattctggacacatcattattctctgaaatatccacagaccactctaatctgagcacaccctaggtggaccaggaacacaagtaatgtgaatgactgcaataataaaatgagtatgttaaactatca

SEQ ID NO: 216700 - DNA, 264 bp, Homo sapiens
tcataagtgtccatcaaaaggaagattagttacaaaagtctgaaaaagaccttgtattttatagacccgttatactagtattgttatcttacttgatgaaatctcttaggcctcctaaatttccatcattaaattaaaaactagggcaggcatagtagctcatgcctgtaattccagcactttgggagcccaaggcaggaggatcacttgagcccaggaattcaagaccagcctgggcaacatagcaaactctgtctctattag

SEQ ID NO: 216701 - DNA, 649 bp, Homo sapiens
tttgtcgctgcagccccatttgttgctccagttgaggtcctgactggtgagtccctcctgccatgtctacctctgagaagtgagacctggcccaacatagccagagtggagcttgtgacggggcagccctggaccctggattcatcgggagtgccttggtgcctgaagaatgggtggctgaagccgaggcagaggtagcccctgaggatttccaggaggcaatagaagctgttttggaggaggaggaagatgaggcctgggtccccatcgagaactggtttttttcagctagtagaagaggaggaggagctaggagaggaggaggaactgggagaggaggaggagctgggagaggaggaggaagaagaatttgaggaggaaaaggaggaggaggaatttgaggaggaggaggagggtgaagagggggaggaagaagaagaaggagagggggaggaagaagaagaaggagaggaggaggattatgaaggagaggaggaggtttatgaaagagaggaggactatgaaggagaggaggaggactatgaaggagtggaggagggctgtgaagaagaggaagaggatgaagacaaagaggaggacgaggaggaggctgaggatgaggacaaggaggagaaggaaaaggacaaca

SEQ ID NO: 216702 - DNA, 163 bp, Homo sapiens
catgctgtggtccctaaaaccttattaaagaatgatgaacaattgccctgattcagccctactttaagaataaaggatgactccttcaggtatctgacaaaaaaaagacagacaaacacacactcacagctgggcacggtggctcatgtctgtaatcccagta

SEQ ID NO: 216703 - DNA, 177 bp, Homo sapiens
caagcccacgtgtgggggctcccaggacagggctcgccttggcagaatggcctctgggaagaacggctgtttcaatgtagtttttggagtaggtctttttcacgtgattcaagtataaaacaccagaggtgaaaaatcacttcctgccctttgcaaataaaagcaaatacaaatttc

SEQ ID NO: 216704 - DNA, 419 bp, Homo sapiens
  misc_feature (13)..(13): n is a, c, g, or t
gattacccatcgncttgtaaggaaagacagagatgaagttatcctgactgctgagatgagcagtttaccctaggaggacctgtgggactatgttttggtaaagaaaagttgagctgctctgtgggagtgaggttccaatgaagccaaatgtacaaggtgtgtgttctatggcctaaagacccgtagatggtatcacaatggcatgagaaaggttcaaagatacatgttatttgggggagcctggggaatgtggtgactgctaaagggtgtggggtttctttctggggtgataaaagtgttgtaaaattggtcgtggtgatagttacacagctctgtggataaaaagcattgaactatacactttaaatgggaggactgtatggtatgcaaattatatcttaataaagaagttatcaaaa

SEQ ID NO: 216705 - DNA, 445 bp, Homo sapiens
ctatactttttatcattattttacagtgttgaacttctacttacaaaaaaagttaacgtgtaaaacaacctctggcaggttcatcaggaggtattgcagaagaaggcattgatacaagggataacagcttcatgtggggtattgcccctgaaagtcttccagtgggacaagaaggcagctgccatagaagaagtctgactacctgacaccaccctgctgtggggaaaacctatgctatccatgtggaaccaccatatggagagagagaaagatgtccagccatcccccagttgttcaaggcaccccaactcaggcaccagacacaagtgaagaagccattttggattttccagctacagacgatgccacttgatcacagaggagcccccactctgcctaaattgcagacttgagcaaataaatattgttttaagcactgatggtt

SEQ ID NO: 216706 - DNA, 498 bp, Homo sapiens
gagccaccacactggcctcatatgactttcttagtgtcagatacatgctttttctcacaacaatcctaggtggtaggtgctattattaccctccattatcattttacagatgaataaacagatacaaaatggtaaagcaaagttaaaggggaattcatgtctacttctaagtgcttgaaagcatgtcagtaacattcttgtcactgtagctggaggggtcccattcttatgttctgctctgaagcatctggaggtgctcctgaatatcctcagggaggggcacttgaagaagagttcctttattatgagatgaagctccttggtaacctcacaggccagggctataccagcaagtgactgtgcttcctcaccctcttcagacaagtgttctatgtagtggttcagaacatccataacaggctttatctcagtaataagcaaggtgtaagagaataaatgtcagaatttatcctgaagcatatccttcctcatcttttc

SEQ ID NO: 216707 - DNA, 441 bp, Homo sapiens
atttggtgttagacacaagagaacaggttccctgctgacaattttcagaggcccgtgcccttcggtcttcaggtgaggctgggcttgagggaggttttgtggaacggtgagaagaacagcgtgactaaggcacagaaggctgagtgatgccctgcagtgcttttgtagggttggaggccagctgggaaagaaggaacccttgcgttagagaatgggaacatgccttaggatatagaaatggcaaatctgagatagtttgaagtgagaatactagaagtgttcccaccaaacaaggtgtgtcttggtgcctgctgtatcccaggctccgtgaggtgccggagtcagcactgaacaaacagagcttcctatgcttgcggaaatgcatttcgttgggggaagggatttttctgctgactctggctattaatagtaacaatcaaa

SEQ ID NO: 216708 - DNA, 415 bp, Homo sapiens
tcactggataatttcatcataggtaaagagaagtatctttataatattaatccagctaaaaagaaaaaaagttaaaatattactattttgccatagttaatatatctctaagcattgaatatcaacagttgctaacaccacataaagagaaaaagaatatactatatacttgcacacctgatgaaagaatatactgtactcctgctatggccttatcaaagggatcaaaccttagtctcttcatcctcaggatccagctaccaatttgcaggaaatgccaagctcagcggagcaagttgaactataccaagtgtatgcaatcagcaaattccagattgtgagaaagccaaacagccttggttctttaacagatattttgtgtggaaaagaaacagaagaagaccatgtagaaaaa

SEQ ID NO: 216709 - DNA, 343 bp, Homo sapiens
gggtggggcatgtggcgggaaatgcctcagaaggattttagttgatgtcaggatcttattgaatacctactactcataagttacgggttccatcctcagggggaccagggatgaattgagtccagttcctgcccctgttagctcattctgtaggataggggccatgttaggctctttcaggttaccagaaaccctcaggatacatcagtggatgaaggtttattgtaagggtacatactgaagtgaggacagccaggaagccatcttggcagccaacatggccaggcctcaagggaaaacaagatggccttggttatgctgtggatacaggattggcttggag

SEQ ID NO: 216710 - DNA, 419 bp, Homo sapiens
aggtaggctcaactgtcagagccaggcctctgcacactcagagccagttgttcaggagccagcagcagctgcaggtctgggtgctcctcagggccaggacaccctttaatccgacccatgaaggccagagaagcctacactttatggattcctcaacccggcttttgtaagtaacttcagccacaagccgcgtggcatgttgcagctattacatgtgatctggcagtaggtatgtgtcagaaactctctgatgaagccaaatggaaactagggccctggcagcacaaggctctccctccttcccgaggcagcctacacagtgagctgaccccacatagttcacccagctagagagggcatgcggatgccccgtgggcagaatctggggaagcagcaggacagagagggtctctctgcag

SEQ ID NO: 216711 - DNA, 600 bp, Homo sapiens
  misc_feature (46)..(47): n is a, c, g, or t
  misc_feature (402)..(402): n is a, c, g, or t
ccagtgtttgaagcaatggatgtcttatcttgatatgtttgggggnntggattcttcttgttcttttttttttttttttttcttcaaccagggtcttgctctgttgcccagagtacaggggcgcaatcatggatcactgcagccttgacctccctgggctcaagcaatcctctcctgaaccacccccctgccccccactgctgggactacaggcatgcgccaccattcctggctaatatttttattttttgtagagacgaagtctcaccatattgcctacactggtcttggactcctgggctcaagtaatcctcctgcctcagcctcccaaagtgctgggattacagtgtgccactgcacctggcctggatggattcttaatgtcttcaaataaagatttcnaagtactccatagcaaataaatccatgctcatttaggttcattaaaaaaaatcagaacagtatataacaattcttatatagcttttgcaaaaatgcaactcatcacctgcccctgccccccactgccatctctcatctccctaacccactgccatctctaatctccctaatccactgccatctctcatctccctaccc

SEQ ID NO: 216712 - DNA, 197 bp, Homo sapiens
gttttttccaaaagcaaatattacaatcagctgtagctgcagtatcccacttgtttttaatttagccatattctgtctatcaccattagtttattatggagtgattaacaagccaggtttgcttgaggctgagtgggttcgcaagacacagtgctttcagtggaaaaactgagagagcctctggcaaactaggataa

SEQ ID NO: 216713 - DNA, 539 bp, Homo sapiens
gtaaaggggtctaggatcttgtcctgagggcagagctgtgggaaggtcttggggtttctgatatccctgaactgactctttctcccatgcttccctttgccaactccagccacccaccctctgcacacacctcaggccttcaggatttgtctctctgccccaagcgcagtttgattttcactgaaggagataggttaagagcatgggctctgggttcttagccctgctgcttacttgctgtgtactgaacctccctaagcctcagtttcctgtctttgtaatgaggacgatcccagtgcctgccccaggggttgaagtgaggactcaagaacgcagtgcatgcggtggattcagagcagtgcctggcacgcagctgccacttcacatggggtggctattgttattgccataccctctccctacccaacctgctcattcccagactcacggggaaaggcctgtcccttcccctagggaccaccaccccttgtccttctctgaggtcggaactttaacaagaggctgagctttctcttcta

SEQ ID NO: 216714 - DNA, 965 bp, Homo sapiens
tcctgcctttttgtactcctcttccttttcttcagaggcaggagaaaagggattgcttatatttctacacagatggattaactgccctctgtgaattcacatgaacgttcataaatggccaaaacttggcatgattgggtagtagagttctgtttgtaaaaggaccactatcaggtaacagtttaaatctcccagtaatcttaccttatttcttaatatcctttttatcattaaaactgtttagcatagaaaaaagttcctaccagaaaaaccaagtgactggaagatagtggaaatgaccaagtgaaataggatcagaatgggaactaattaggaacatcaagaaggcaagtgtaggcagggtgtgatggcccacatctataatcctagcatttcgggaggctgaggtgggagcattgcttgagcccaggagtttgagacctgcctgggcaacatgatgagacctccatctctatgaaaaaaattaaaaagaaaaaaatgagctgggcatggtggtatgtacctatggtcccagctactcaggagactgggcaggaggattgcttgagcccaggaggttggggcttcagtgagccatattcacaccactgcgttccagcctgggtgacagagcaaggtgctatctccaaaataaataaataaatgttaaatttgcttttttctctctctctttttttatgtagaatttgtttgttgatacttactgaatgtagtgaccctgctgtggtaatgaacacttctagtgccttctaggcttaaaataccagacagccccaaataacaaatgctcttttgtgttttgataggttggatttctgtttgcttaatattgggaatactggggggaaaaaagatggtgttttcattctaaggattgtcctaaagaaagtgctactttatttttaagaaagtaaggccacttgttatataagaaataacaagtt

SEQ ID NO: 216715 - DNA, 1611 bp, Homo sapiens
gtgatccacccacctcggcctcccaaagtgctgggattgtaggcatgagccactgcgcccagcctgttttgccaagcttttctggttgttttccttcagtgagagagttgatggatattacctagtctgccattactggacatcattcttttttactccagcttctgatccttatatatattttatcttataggaatgtgtactatttagtttgcttccttgtaagaagctttcaaatgtctcatttgctggtgcctgttcaattaagctttggataacagtacaaaatttggccaacatgaatgcctagttcaccgctaatgaaagctgggcactgcaaatgttctgctatgctccagaaatcagaagttgccagcttttatatctagactgtgatttcctcatagaggattttgtacatgccaattcaaagtttaaatttgtgccatgtgtgaataagtgcacaaaatgctcaaataagaatgagaaaaatatctccttttcccatccacattgagatacctgaaacaactatgaaatacagtttttcttccagttttccgaaatacttatctgggttgagaccaagaatggagcattttaggccaaaatgcttttttaaaattttatgatttatgagtttagaaaaaatctcttttggactttaagcatatgttatttttaggatatcttattcatgaataaaacaaattttttacataggtgaaataatttaggtgtttgtatattatgagtcagttatttctataatatatgactagtttatatttgtagtttttcagttacattcagtagcccacatttgtttagtaacagaattaacaaaaattgctgttattattttgagttaattttcaactcgtatttttaatttgctaaatacattctagcactattatattgtcagagaccttaattcaagtctttaaatatttaataaaattatgtgaaaaattgaaattatttgatgttttaattttgattgctctggacaaagacagtatttccatcttgatgcttcaggataaaaattgcgttaaacaatacttgaatttaaatgtggtttaaaatatttcttaattctaaagctctctgtagttcctattttctaagcaatattagctatattggatcttctagatgaagaaagatttgactatgattaaatatgtgcagtgccatcctggaatagattttattcatagattaataaaatatgtgcagcatgatttaggagaaaatattttaggacattaaatttagttacataagctacagtcttttaaattctgtgcaactaaaatctgttttgctttaaaaagaaaaaatgttcaaatttcactgggaaatgtagagtatttgttttccaagacgatcaaaatcatacccaatcatacttttaggaaattttcaaaatactagatatagcctttcaacttaatgacgattgttattgtctaattttcttacctgcacttaccagtattcagaacactctgatttggttacatgtttcttatagtacctccttggttcaaatgtaattcttttctgatattgaataaactgtaatgtcaaggacctagcaca

SEQ ID NO: 216716 - DNA, 534 bp, Homo sapiens
tgacttcatgaaggcacacatttagaccacaggcctctctttcattcccttctctgcatttctattttaatttactcattcattcacctgttaacatatggacagatagagctatagcagttacttctataggctcatctgcaagagggaaatatgttagcaaaacagggaaaataatacaggtgtgccagagagaaggcaaaggaagggaaagcaatagggtgcccattccatggtggtgagtaataagtggaagttttccagcctcctggccttcctgagcagcttagggccaccttgccgggaactcattcccagctctggaaatgaaactccgggtgccgctgggtttgcattgacactctttccccacaaggtttgtctcttgttgttccagacagaatgaacctcattattttggattaattgggggaagatcaaccaaaattagtgagtcagaattaaagagtgttttaaacaaaagcaactttagaatttgtaattcatatagtaacccaatctaagtgttagaaa

SEQ ID NO: 216717 - DNA, 617 bp, Homo sapiens
  misc_feature (615)..(615): n is a, c, g, or t
aacttgctcaaggttccacagctggcaagtggcagagccagaatttgaactcatcccatttaagagcctgcacatataccactatgctacagtgacttccccatgccatattaataatcatgacagctaatggttgacataacaagaagagaacctgtaatcacccccaggggcttcccgcagcctccttcctattcctaccactgtctgtctgcctgcctcctccctatgcagcagccacgtcacatgatccccgttccttggatggcctataaggtggtcttcctctagtagctgggccctgtcccttcccatctgacaaactcttgctcagcccacgtggcccagtttaaatgtgctctgtgcattccatcatctagtgcttaccacatgatcataaatcccactggtgtatgtgtgtgtctttcccaagttggagtgggagtgcctttgacatgggactgtgtctttccctttcggcatcttgtatcttccccagcatctctggctctccaaagcccccagtaaatgtttgagtaagtgaaacatgcagaagacatgaagattgttaagtaacaaatactcagcagaaagggctgttaattttaaaaaaanaa

SEQ ID NO: 216718 - DNA, 555 bp, Homo sapiens
ttctggttccagtaaagaagtcataagactgtgtcaggaagtcaggaactgagcaaaggggtctgaaattgaggacccttgagggcataacagttgctttaggaaaagcctcatgcatttgctgcccatctactgggaatgtagggaaatgtgacagctcagtgggtacaggtggaccaagcattcacctgggattgactccggggttggggacagccaggttttgagttgaggagcttcaactcaagaggtttagaaagcaggagttaggccgggcgcggtggctcacgcctgtaatcccagcactttgggaggccgagacgggcggatcacgaggtcaggagatcgagaccatcctggctaacacggtgaaaccccgtctctactaaaaatacaaaaattagccgggcatggtggcgcgcgcctgtagtcccagctacacgggaggctgaggcaggagaatggcgtgaacccgggaggcggagcttgcagtgagtcgagatcgcgccactgcactccagcctgggcgacagagcgaaactccgtctcaaaaaa

SEQ ID NO: 216719 - DNA, 922 bp, Homo sapiens
aaatttacaatcctgtttgaatcccagttcagtgttggtggaaatgagctggtttttcaagtcaaggtaaagccttccctcagctctgcgtgtgcgtgtgcgtgtgtgtgtgtggtgtactttatgttacaaaatattttttttttatcacatagcatcttcttctttttgactgttggtaaactgaaaatggactgacctcaccctgagaactgtttcacttaggttctcttaagacatgaacagaggccaagcacagtggctcatgcttgtaatcccagcactttggtaggttgaggcagtcaggtcacttgaggtcaagagttcaagaccagcctggctaacacagtgaaaccccatctctactaaaaagtacaaaaattagccaggcgtggtggcacgtgcctataatcccagctactcaggagaatcacttgaacctgggaggctgaggttgtaatgaaccgagattgtgccactgcactccagcctgggtgaaagagtgagaccctgtctcaaaaaaaaaaaaaaaagacatgaacaagcaaggcccagtgcagtggctcacatctgtaatcctaacactttgggaggccaaggcaggaggattgcttgagttcaggagttccagaccagcctggagctggttgtgagaccccgtctcaacaacaacaacaaattaaaaaataaaaaataaaacatgaacaaacaataatgaactgaactagctggagaggtagactacaaaatggatatgagaaacattacttgggatgaatttgagtaaaggttgtggtaagttttaaatttgttatttgtattttcttcccagaaatatctccaatagtcttttctctctcctgttctccatgtaactttgagaaactttatccttcagaaatatctaagcaacattgcttgt

SEQ ID NO: 216720 - DNA, 506 bp, Homo sapiens
aggccaccatcatcagtgagcagcaggccaagtctctgctcaagaacgagaacacccgcaagtaattgtgcagcttcctctcattccctgctacttgtctcatgtcctggcaacaggaaaaaaagaattctgcctcctgtgtcagatccctgtttgcccttctggcctcttctgggcatcagcaaaggaatataaggaagttcttgggcctggtgtggtggctcacacctgtaatccaagcactttaagaggccgaggtgggcagatcacctgaggtcaggagttcaagaccagcctggccaacatggtgaaaccctgtctctactaaaaatacaaaaaattagccgggcgtggtggcaggcacctgtaatcccagccactagagagcctgaggcaggagaatcccttgaacctgggaggcagagattgcagtgagctgagattgcagtgagctgagatcacgccactgcactccagcctgggcaacaagagcaaaactccgtcac

SEQ ID NO: 216721 - DNA, 5392 bp, Homo sapiens
  misc_feature (914)..(914): n is a, c, g, or t
gcggcgcgcgtccctgggcctccgcgcgtgagcggcgcgcgcgcccccgcgggccccggcgggaggagagtcggcggccggagccgtcaccccgggcggggacccagcgcaggcaactccgcgcggcggcccggccgagggagggagcgagcgggcgggcgggcaagccagacagctgggccggagcagccgcgggcgcccgaggggccgagcgagattgtaaaccatggctgtgtggatacaagctcagcagctccaaggagaagcccttcatcagatgcaagcgttatatggccagcattttcccattgaggtgcggcattatttatcccagtggattgaaagccaagcatgggactcagtagatcttgataatccacaggagaacattaaggccacccagctcctggagggcctggtgcaggagctgcagaagaaggcagagcaccaggtgggggaagatgggtttttactgaagatcaagctggggcactatgccacacagctccagaacacgtatgaccgctgccccatggagctggtccgctgcatccgccatatattgtacaatgaacagaggttggtccgagaagccaacaatggtagctctccagctggaagccttgctgatgccatgtcccagaaacacctccagatcaaccagacgtttgaggagctgcgactggtcacgcaggacacagagaatgagttaaaaaagctgcagcagactcaggagtacttcatcatccagtaccaggagagcctgaggatccaagctcagtttggcccgctggcccagctgagcccccaggagcgtctgagccgggagacggccctccagcagaagcaggtgtctctggaggcctggttgcagcgtgaggcacagacactgcagcagtaccgcgtggagctgnccgagaagcaccagaagaccctgcagctgctgcggaagcagcagaccatcatcctggatgacgagctgatccagtggaagcggcggcagcagctggccgggaacggcgggccccccgagggcagcctggacgtgctacagtcctggtgtgagaagttggccgagatcatctggcagaaccggcagcagatccgcagggctgagcacctctgccagcagctgcccatccccggcccagtggaggagatgctggccgaggtcaacgccaccatcacggacattatctcagccctggtgaccagcacgttcatcattgagaagcagcctcctcaggtcctgaagacccagaccaagtttgcagccactgtgcgcctgctggtgggcgggaagctgaacgtgcacatgaaccccccccaggtgaaggccaccatcatcagtgagcagcaggccaagtctctgctcaagaacgagaacacccgcaatgattacagtggcgagatcttgaacaactgctgcgtcatggagtaccaccaagccacaggcacccttagtgcccacttcaggaatatgtccctgaaacgaattaagaggtcagaccgtcgtggggcagagtcggtgacagaagaaaaatttacaatcctgtttgaatcccagttcagtgttggtggaaatgagctggtttttcaagtcaagaccctgtccctgccagtggtggtgatcgttcatggcagccaggacaacaatgcgacggccactgttctctgggacaatgcttttgcagagcctggcagggtgccatttgccgtgcctgacaaagtgctgtggccacagctgtgtgaggcgctcaacatgaaattcaaggccgaagtgcagagcaaccggggcctgaccaaggagaacctcgtgttcctggcgcagaaactgttcaacaacagcagcagccacctggaggactacagtggcctgtctgtgtcctggtcccagttcaacagggagaatttaccaggacggaattacactttctggcaatggtttgacggtgtgatggaagtgttaaaaaaacatctcaagcctcattggaatgatggggccattttggggtttgtaaacaagcaacaggcccatgacctactcattaacaagccagatgggaccttcctcctgagattcagtgactcagaaattggcggcatcaccattgcttggaagtttgattctcaggaaagaatgttttggaatctgatgccttttaccaccagagacttctccattcggtccctagccgaccgcttgggagacttgaattaccttatctacgtgtttcctgatcggccaaaagatgaagtatactccaaatactacacaccagttccctgcgagtctgctactgctaaagctgttgatggatacgtgaagccacagatcaagcaagtggtccctgagtttgtgaacgcatctgcagatgccgggggcggcagcgccacgtacatggaccaggccccctccccagctgtgtgtccccaggctcactataacatgtacccacagaaccctgactcagtccttgacaccgatggggacttcgatctggaggacacaatggacgtagcgcggcgtgtggaggagctcctgggccggccaatggacagtcagtggatcccgcacgcacaatcgtgaccccgcgacctctccatcttcagcttcttcatcttcaccagaggaatcactcttgtggatgttttaattccatgaatcgcttctcttttgaaacaatactcataatgtgaagtgttaatactagttgtgaccttagtgtttctgtgcatggtggcaccagcgaagggagtgcgagtatgtgtttgtgtgtgtgtgtgtgtgtgtgtgtgtgtgcgtgtttgcacgttatggtgtttctccctctcactgtctgagagtttagttgtagcagaggggccacagacagaagctgtggtggtttttactttgtgcaaaaaggcagtgagtttcgtgaagcctggaagttggccatgtgtcttaagagtggctggactttgacatgtggctgtttgaataagagaaggacaaagggaggagaaagcacatgtgctccagtgagtcttcgtcactctgtctgccaagcaattgatatataaccgtgattgtctctgcttttcttctgaaatgtagataactgctttttgacaaagagagccttccctctcccccacccctgtgttcttgggtaggaatgggaaaaggggcaacctacaaagattgttggggcaagggaagtcacaagctttcggatgggcggtggcttttcacaaaacatttagctcatcttattctctctttgtcctctctcccctcctgcccgcccgcaccctggaattgccactcagttcctctgggtgtgcacatatgtttggagaaatagaggagagaaaagagggccacgtaactgagagcttacagtgccaatgccgtttgtgttctggccagagtggagtgcgcagccctgactcccaggcgctgagattgttgcctggttacccaggaagctgctgttccggctgcccagcctttctctgagccagcggatgcacagtccgtggccttcttcaggcttattgatgatgctttttgcaaatgttgaatcatggttctgtttctaagttggatcttttttgttttctccttgccaccctaatttgacatcaaaattctctcttgtgcattgggccctgggtcattcaaacccaggtcacctcattccccttctctgttcacacctaatgtcttgaagagtaggtagcagcagtgtgggctgaacctaggccagcttgcttagcgggtcaccctgctgtgaagtcctggcaggtgttggtaatgtgtggaaatgcagtcagcaagtttgctggggagtttgataaaagtataaaacaaaacaaaaaaagcctcggtataattttgttccacgacttcttctgtagctttacaccagaaggaaggaatgggctacagcaggtagtggaggaagaggggggtgagcaggtgtattaaaatagcttacgggtaaggcctaaaaggtcacccctcggccccctctccaaaagaagggcatgggcacccccaggagaggatggccccaaaaaccttatttttatacatgagagtaaataaacatattttttttacaaaaataacttctgaatttatcagtgttttgccgttaaaaatattcctctatagtaaattatttattggaagatgacttttttaaagctgccgtttgccttggcttggtttcatacactgatttatttttctatgccaggcagtagagtctctctgcctctgaggagcaggctacccgcatcccactcagcccctccctacccctcaagatttgatgaaaattccaaccatgaggatgggtgcatcggggaagggtgagaaggagagcctgcctgctcagggatccaggctcgtagagtcactccctgcccgtctcccagagatgcttcaccagcacctgcctctgagacctcgctctctgttccagcaaccctggttggggggtcagacttgatacactttcaggttgggagtggacccaccccagggcctgctgaggacagagcagccaggccgtcctggctcactttgcagttggcactgggttggggaggaagagagctgatgagtgtggcttccctgagctggggtttccctgcttgtccagttgtgagctgtcctcggtgttaccgaggctgtgcctagagagtggagatttttgatgaaaggtgtgctcgctctctgcgttctatcttctctctcctccttgttcctgcaaaccacaagataaaggtagtggtgtgtctcgaccccatcagcctctcacccactcccagacacacacaagtcctcaaaagtttcagctccgtgtgtgagatgtgcaggttttttctagggggtagggggagactaaaatcgaatataacttaaaatgaaagtatactttttataatttttctttttaaaacttggtgaaattatttcagatacatattttagtgtcaaggcagattagttatttagccaccaaaaaaaagtattgtgtacaatttggggcctcaaatttgactctgcctcaaaaaaaagaaatatatcctatgcagagttacagtcacaaagttgtgtattttatgttacaataaagccttcctctgaagggaaaaaaaaaaaaaaaaaaatataaaaaaaatataaacaaatcacaacatattatattatcttttattaatataatatttcttcacttttttataatttattctatttctctttaatcaattatataattaattttatctctcattattctcgccctttttgttatttcttccataatgggggtgtttttataatatcgtctctgtgtttcatatgtctgtcttgggaaacacctttgttacc

SEQ ID NO: 216722 - DNA, 4645 bp, Homo sapiens
  misc_feature (914)..(914): n is a, c, g, or t
gcggcgcgcgtccctgggcctccgcgcgtgagcggcgcgcgcgcccccgcgggccccggcgggaggagagtcggcggccggagccgtcaccccgggcggggacccagcgcaggcaactccgcgcggcggcccggccgagggagggagcgagcgggcgggcgggcaagccagacagctgggccggagcagccgcgggcgcccgaggggccgagcgagattgtaaaccatggctgtgtggatacaagctcagcagctccaaggagaagcccttcatcagatgcaagcgttatatggccagcattttcccattgaggtgcggcattatttatcccagtggattgaaagccaagcatgggactcagtagatcttgataatccacaggagaacattaaggccacccagctcctggagggcctggtgcaggagctgcagaagaaggcagagcaccaggtgggggaagatgggtttttactgaagatcaagctggggcactatgccacacagctccagaacacgtatgaccgctgccccatggagctggtccgctgcatccgccatatattgtacaatgaacagaggttggtccgagaagccaacaatggtagctctccagctggaagccttgctgatgccatgtcccagaaacacctccagatcaaccagacgtttgaggagctgcgactggtcacgcaggacacagagaatgagttaaaaaagctgcagcagactcaggagtacttcatcatccagtaccaggagagcctgaggatccaagctcagtttggcccgctggcccagctgagcccccaggagcgtctgagccgggagacggccctccagcagaagcaggtgtctctggaggcctggttgcagcgtgaggcacagacactgcagcagtaccgcgtggagctgnccgagaagcaccagaagaccctgcagctgctgcggaagcagcagaccatcatcctggatgacgagctgatccagtggaagcggcggcagcagctggccgggaacggcgggccccccgagggcagcctggacgtgctacagtcctggtgtgagaagttggccgagatcatctggcagaaccggcagcagatccgcagggctgagcacctctgccagcagctgcccatccccggcccagtggaggagatgctggccgaggtcaacgccaccatcacggacattatctcagccctggtgaccagcacgttcatcattgagaagcagcctcctcaggtcctgaagacccagaccaagtttgcagccactgtgcgcctgctggtgggcgggaagctgaacgtgcacatgaaccccccccaggtgaaggccaccatcatcagtgagcagcaggccaagtctctgctcaagaacgagaacacccgcaatgattacagtggcgagatcttgaacaactgctgcgtcatggagtaccaccaagccacaggcacccttagtgcccacttcaggaatatgtccctgaaacgaattaagaggtcagaccgtcgtggggcagagtcggtgacagaagaaaaatttacaatcctgtttgaatcccagttcagtgttggtggaaatgagctggtttttcaagtcaagaccctgtccctgccagtggtggtgatcgttcatggcagccaggacaacaatgcgacggccactgttctctgggacaatgcttttgcagagcctggcagggtgccatttgccgtgcctgacaaagtgctgtggccacagctgtgtgaggcgctcaacatgaaattcaaggccgaagtgcagagcaaccggggcctgaccaaggagaacctcgtgttcctggcgcagaaactgttcaacaacagcagcagccacctggaggactacagtggcctgtctgtgtcctggtcccagttcaacagggagaatttaccaggacggaattacactttctggcaatggtttgacggtgtgatggaagtgttaaaaaaacatctcaagcctcattggaatgatggggccattttggggtttgtaaacaagcaacaggcccatgacctactcattaacaagccagatgggaccttcctcctgagattcagtgactcagaaattggcggcatcaccattgcttggaagtttgattctcaggaaagaatgttttggaatctgatgccttttaccaccagagacttctccattcggtccctagccgaccgcttgggagacttgaattaccttatctacgtgtttcctgatcggccaaaagatgaagtatactccaaatactacacaccagttccctgcgagtctgctactgctaaagctgttgatggatacgtgaagccacagatcaagcaagtggtccctgagtttgtgaacgcatctgcagatgccgggggcggcagcgccacgtacatggaccaggccccctccccagctgtgtgtccccaggctcactataacatgtacccacagaaccctgactcagtccttgacaccgatggggacttcgatctggaggacacaatggacgtagcgcggcgtgtggaggagctcctgggccggccaatggacagtcagtggatcccgcacgcacaatcgtgaccccgcgacctctccatcttcagcttcttcatcttcaccagaggaatcactcttgtggatgttttaattccatgaatcgcttctcttttgaaacaatactcataatgtgaagtgttaatactagttgtgaccttagtgtttctgtgcatggtggcaccagcgaagggagtgcgagtatgtgtttgtgtgtgtgtgtgtgtgtgtgtgtgtgtgcgtgtttgcacgttatggtgtttctccctctcactgtctgagagtttagttgtagcagaggggccacagacagaagctgtggtggtttttactttgtgcaaaaaggcagtgagtttcgtgaagcctggaagttggccatgtgtcttaagagtggctggactttgacatgtggctgtttgaataagagaaggacaaagggaggagaaagcacatgtgctccagtgagtcttcgtcactctgtctgccaagcaattgatatataaccgtgattgtctctgcttttcttctgaaatgtagataactgctttttgacaaagagagccttccctctcccccacccctgtgttcttgggtaggaatgggaaaaggggcaacctacaaagattgttggggcaagggaagtcacaagctttcggatgggcggtggcttttcacaaaacatttagctcatcttattctctctttgtcctctctcccctcctgcccgcccgcaccctggaattgccactcagttcctctgggtgtgcacatatgtttggagaaatagaggagagaaaagagggccacgtaactgagagcttacagtgccaatgccgtttgtgttctggccagagtggagtgcgcagccctgactcccaggcgctgagattgttgcctggttacccaggaagctgctgttccggctgcccagcctttctctgagccagcggatgcacagtccgtggccttcttcaggcttattgatgatgctttttgcaaatgttgaatcatggttctgtttctaagttggatcttttttgttttctccttgccaccctaatttgacatcaaaattctctcttgtgcattgggccctgggtcattcaaacccaggtcacctcattccccttctctgttcacacctaatgtcttgaagagtaggtagcagcagtgtgggctgaacctaggccagcttgcttagcgggtcaccctgctgtgaagtcctggcaggtgttggtaatgtgtggaaatgcagtcagcaagtttgctggggagtttgataaaagtataaaacaaaacaaaaaaagcctcggtataattttgttccacgacttcttctgtagctttacaccagaaggaaggaatgggctacagcaggtagtggaggaagaggggggtgagcaggtgtattaaaatagcttacgggtaaggcctaaaaggtcacccctcggccccctctccaaaagaagggcatgggcacccccaggagaggatggccccaaaaaccttatttttatacatgagagtaaataaacatattttttttacaaaaataacttctgaatttatcagtgttttgccgttaaaaatattcctctatagtaaattatttattggaagatgacttttttaaagctgccgtttgccttggcttggtttcatacactgatttatttttctatgccaggcagtagagtctctctgcctctgaggagcaggctacccgcatcccactcagcccctccctacccctcaagatttgatgaaaattccaaccatgaggatgggtgcatcggggaagggtgagaaggagagcctgcctgctcagggatccaggctcgtagagtcactccctgcccgtctcccagagatgcttcaccagcacctgcctctgagacctcgctctctgttccagcaaccctggttggggggtcagacttgatacactttcaggttgggagtggacccaccccagggcctgctgaggacagagcagccaggccgtcctggctcactttgcagttggcactgggttgggcacgaaagactgtgtgttcccagaatgggtcactgctgcctgcg

SEQ ID NO: 216723 - DNA, 4843 bp, Homo sapiens
gcggcgcgcgtccctgggcctccgcgcgtgagcggcgcgcgcgcccccgcgggccccggcgggaggagagtcggcggccggagccgtcaccccgggcggggacccagcgcaggcaactccgcgcggcggcccggccgagggagggagcgagcgggcgggcgggcaagccagacagctgggccggagcagccgcgggcgcccgaggggccgagcgagattgtaaaccatggctgtgtggatacaagctcagcagctccaaggagaagcccttcatcagatgcaagcgttatatggccagcattttcccattgaggtgcggcattatttatcccagtggattgaaagccaagcatgggactcagtagatcttgataatccacaggagaacattaaggccacccagctcctggagggcctggtgcaggagctgcagaagaaggcagagcaccaggtgggggaagatgggtttttactgaagatcaagctggggcactatgccacacagctccagaacacgtatgaccgctgccccatggagctggtccgctgcatccgccatatattgtacaatgaacagaggttggtccgagaagccaacaatggtagctctccagctggaagccttgctgatgccatgtcccagaaacacctccagatcaaccagaccacgttcatcattgagaagcagcctcctcaggtcctgaagacccagaccaagtttgcagccactgtgcgcctgctggtgggcgggaagctgaacgtgcacatgaaccccccccaggtgaaggccaccatcatcagtgagcagcaggccaagtctctgctcaagaacgagaacacccgcaatgattacagtggcgagatcttgaacaactgctgcgtcatggagtaccaccaagccacaggcacccttagtgcccacttcaggaatatgtccctgaaacgaattaagaggtcagaccgtcgtggggcagagtcggtgacagaagaaaaatttacaatcctgtttgaatcccagttcagtgttggtggaaatgagctggtttttcaagtcaagaccctgtccctgccagtggtggtgatcgttcatggcagccaggacaacaatgcgacggccactgttctctgggacaatgcttttgcagagcctggcagggtgccatttgccgtgcctgacaaagtgctgtggccacagctgtgtgaggcgctcaacatgaaattcaaggccgaagtgcagagcaaccggggcctgaccaaggagaacctcgtgttcctggcgcagaaactgttcaacaacagcagcagccacctggaggactacagtggcctgtctgtgtcctggtcccagttcaacagggagaatttaccaggacggaattacactttctggcaatggtttgacggtgtgatggaagtgttaaaaaaacatctcaagcctcattggaatgatggggccattttggggtttgtaaacaagcaacaggcccatgacctactcattaacaagccagatgggaccttcctcctgagattcagtgactcagaaattggcggcatcaccattgcttggaagtttgattctcaggaaagaatgttttggaatctgatgccttttaccaccagagacttctccattcggtccctagccgaccgcttgggagacttgaattaccttatctacgtgtttcctgatcggccaaaagatgaagtatactccaaatactacacaccagttccctgcgagtctgctactgctaaagctgttgatggatacgtgaagccacagatcaagcaagtggtccctgagtttgtgaacgcatctgcagatgccgggggcggcagcgccacgtacatggaccaggccccctccccagctgtgtgtccccaggctcactataacatgtacccacagaaccctgactcagtccttgacaccgatggggacttcgatctggaggacacaatggacgtagcgcggcgtgtggaggagctcctgggccggccaatggacagtcagtggatcccgcacgcacaatcgtgaccccgcgacctctccatcttcagcttcttcatcttcaccagaggaatcactcttgtggatgttttaattccatgaatcgcttctcttttgaaacaatactcataatgtgaagtgttaatactagttgtgaccttagtgtttctgtgcatggtggcaccagcgaagggagtgcgagtatgtgtttgtgtgtgtgtgtgtgtgtgtgtgtgtgtgcgtgtttgcacgttatggtgtttctccctctcactgtctgagagtttagttgtagcagaggggccacagacagaagctgtggtggtttttactttgtgcaaaaaggcagtgagtttcgtgaagcctggaagttggccatgtgtcttaagagtggctggactttgacatgtggctgtttgaataagagaaggacaaagggaggagaaagcacatgtgctccagtgagtcttcgtcactctgtctgccaagcaattgatatataaccgtgattgtctctgcttttcttctgaaatgtagataactgctttttgacaaagagagccttccctctcccccacccctgtgttcttgggtaggaatgggaaaaggggcaacctacaaagattgttggggcaagggaagtcacaagctttcggatgggcggtggcttttcacaaaacatttagctcatcttattctctctttgtcctctctcccctcctgcccgcccgcaccctggaattgccactcagttcctctgggtgtgcacatatgtttggagaaatagaggagagaaaagagggccacgtaactgagagcttacagtgccaatgccgtttgtgttctggccagagtggagtgcgcagccctgactcccaggcgctgagattgttgcctggttacccaggaagctgctgttccggctgcccagcctttctctgagccagcggatgcacagtccgtggccttcttcaggcttattgatgatgctttttgcaaatgttgaatcatggttctgtttctaagttggatcttttttgttttctccttgccaccctaatttgacatcaaaattctctcttgtgcattgggccctgggtcattcaaacccaggtcacctcattccccttctctgttcacacctaatgtcttgaagagtaggtagcagcagtgtgggctgaacctaggccagcttgcttagcgggtcaccctgctgtgaagtcctggcaggtgttggtaatgtgtggaaatgcagtcagcaagtttgctggggagtttgataaaagtataaaacaaaacaaaaaaagcctcggtataattttgttccacgacttcttctgtagctttacaccagaaggaaggaatgggctacagcaggtagtggaggaagaggggggtgagcaggtgtattaaaatagcttacgggtaaggcctaaaaggtcacccctcggccccctctccaaaagaagggcatgggcacccccaggagaggatggccccaaaaaccttatttttatacatgagagtaaataaacatattttttttacaaaaataacttctgaatttatcagtgttttgccgttaaaaatattcctctatagtaaattatttattggaagatgacttttttaaagctgccgtttgccttggcttggtttcatacactgatttatttttctatgccaggcagtagagtctctctgcctctgaggagcaggctacccgcatcccactcagcccctccctacccctcaagatttgatgaaaattccaaccatgaggatgggtgcatcggggaagggtgagaaggagagcctgcctgctcagggatccaggctcgtagagtcactccctgcccgtctcccagagatgcttcaccagcacctgcctctgagacctcgctctctgttccagcaaccctggttggggggtcagacttgatacactttcaggttgggagtggacccaccccagggcctgctgaggacagagcagccaggccgtcctggctcactttgcagttggcactgggttggggaggaagagagctgatgagtgtggcttccctgagctggggtttccctgcttgtccagttgtgagctgtcctcggtgttaccgaggctgtgcctagagagtggagatttttgatgaaaggtgtgctcgctctctgcgttctatcttctctctcctccttgttcctgcaaaccacaagataaaggtagtggtgtgtctcgaccccatcagcctctcacccactcccagacacacacaagtcctcaaaagtttcagctccgtgtgtgagatgtgcaggttttttctagggggtagggggagactaaaatcgaatataacttaaaatgaaagtatactttttataatttttctttttaaaacttggtgaaattatttcagatacatattttagtgtcaaggcagattagttatttagccaccaaaaaaaagtattgtgtacaatttggggcctcaaatttgactctgcctcaaaaaaaagaaatatatcctatgcagagttacagtcacaaagttgtgtattttatgttacaataaagccttcctctgaagggaaaaaaaaaaaaaaaaaaatataaaaaaaatataaacaaatcacaacatattatattatcttttattaatataatatttcttcacttttttataatttattctatttctctttaatcaattatataattaattttatctctcattattctcgccctttttgttatttcttccataatgggggtgtttttataatatcgtctctgtgtttcatatgtctgtcttgggaaacacctttgttacc

SEQ ID NO: 216724 - DNA, 1091 bp, Homo sapiens
agccgggtgtcgccgtaaaagatatatccctcatatggccaaatcatatatggtgaacgagtgacttcttggtacaagctggcgctccgcctttggattggtatcatacactgaagttacatggtcctctagtgccaggcagtagagtacctcgtcctaggacctctggatgagagtctgggcattaactccgctagtccgcgaatcatttacctcctctcgctgatgtgtacatatttgatgaaaatacctaccaagatgatgggctgcttcggtgaaatgagtgtagaaaaggagagtcgtgtcatggtgctagggatccacggtctatgcagtgcatgcccgggacgttctgccaaagaagctatgatctagatgacataggtatctagtagcaccgcgacgcccctggatacagcaaccctggttggggggtcagacttgatacactttcaggttgggagtggacccaccccagggcctgctgaggacagagcagccaggccgtcctggctcactttgcagttggcactgggttggggaggaagagagctgatgagtgtggcttccctgagctggggtttccctgcttgtccagttgtgagctgtcctcggtgttaccgaggctgtgcctagagagtggagatttttgatgaaaggtgtgctcgctctctgcgttctatcttctctctcctccttgttcctgcaaaccacaagataaaggtagtggtgtgtctcgaccccatcagcctctcacccactcccagacacacacaagtcctcaaaagtttcagctccgtgtgtgagatgtgcaggttttttctagggggtagggggagactaaaatcgaatataacttaaaatgaaagtatactttttataatttttctttttaaaacttggtgaaattatttcagatacatattttagtgtcaaggcagattagttatttagccaccaaaaaaaagtattgtgtacaatttggggcctcaaatttgactctgcctcaaaaaaaagaaatatatcctatgcagagttacagtcacaaagttgtgtattttatgttacaataaagccttcctctgaaggga

SEQ ID NO: 216725 - DNA, 2031 bp, Homo sapiens
  misc_feature (914)..(914): n is a, c, g, or t
gcggcgcgcgtccctgggcctccgcgcgtgagcggcgcgcgcgcccccgcgggccccggcgggaggagagtcggcggccggagccgtcaccccgggcggggacccagcgcaggcaactccgcgcggcggcccggccgagggagggagcgagcgggcgggcgggcaagccagacagctgggccggagcagccgcgggcgcccgaggggccgagcgagattgtaaaccatggctgtgtggatacaagctcagcagctccaaggagaagcccttcatcagatgcaagcgttatatggccagcattttcccattgaggtgcggcattatttatcccagtggattgaaagccaagcatgggactcagtagatcttgataatccacaggagaacattaaggccacccagctcctggagggcctggtgcaggagctgcagaagaaggcagagcaccaggtgggggaagatgggtttttactgaagatcaagctggggcactatgccacacagctccagaacacgtatgaccgctgccccatggagctggtccgctgcatccgccatatattgtacaatgaacagaggttggtccgagaagccaacaatggtagctctccagctggaagccttgctgatgccatgtcccagaaacacctccagatcaaccagacgtttgaggagctgcgactggtcacgcaggacacagagaatgagttaaaaaagctgcagcagactcaggagtacttcatcatccagtaccaggagagcctgaggatccaagctcagtttggcccgctggcccagctgagcccccaggagcgtctgagccgggagacggccctccagcagaagcaggtgtctctggaggcctggttgcagcgtgaggcacagacactgcagcagtaccgcgtggagctgnccgagaagcaccagaagaccctgcagctgctgcggaagcagcagaccatcatcctggatgacgagctgatccagtggaagcggcggcagcagctggccgggaacggcgggccccccgagggcagcctggacgtgctacagtcctggtgtgagaagttggccgagatcatctggcagaaccggcagcagatccgcagggctgagcacctctgccagcagctgcccatccccggcccagtggaggagatgctggccgaggtcaacgccaccatcacggacattatctcagccctggtgaccagcacgttcatcattgagaagcagcctcctcaggtcctgaagacccagaccaagtttgcagccactgtgcgcctgctggtgggcgggaagctgaacgtgcacatgaaccccccccaggtgaaggccaccatcatcagtgagcagcaggccaagtctctgctcaagaacgagaacacccgcaatgattacagtggcgagatcttgaacaactgctgcgtcatggagtaccaccaagccacaggcacccttagtgcccacttcaggaatatgtccctgaaacgaattaagaggtcagaccgtcgtggggcagagtcggtgacagaagaaaaatttacaatcctgtttgaatcccagttcagtgttggtggaaatgagctggtttttcaagtcaagaccctgtccctgccagtggtggtgatcgttcatggcagccaggacaacaatgcgacggccactgttctctgggacaatgcttttgcagagcctggcagggtgccatttgccgtgcctgacaaagtgctgtggccacagctgtgtgaggcgctcaacatgaaattcaaggccgaagtgcagagcaaccggggcctgaccaaggagaacctcgtgttcctggcgcagaaactgttcaacaacagcagcagccacctggaggactacagtggcctgtctgtgtcctggtcccagttcaacagggagaatttcccaggacggaattacgctctgtggcaatggtttgacggccccccattcctccccccactcatcccccttaccccgctactcctacctatttccccttttatactaataattttata

SEQ ID NO: 216726 - DNA, 5151 bp, Homo sapiens
  misc_feature (914)..(914): n is a, c, g, or t
gcggcgcgcgtccctgggcctccgcgcgtgagcggcgcgcgcgcccccgcgggccccggcgggaggagagtcggcggccggagccgtcaccccgggcggggacccagcgcaggcaactccgcgcggcggcccggccgagggagggagcgagcgggcgggcgggcaagccagacagctgggccggagcagccgcgggcgcccgaggggccgagcgagattgtaaaccatggctgtgtggatacaagctcagcagctccaaggagaagcccttcatcagatgcaagcgttatatggccagcattttcccattgaggtgcggcattatttatcccagtggattgaaagccaagcatgggactcagtagatcttgataatccacaggagaacattaaggccacccagctcctggagggcctggtgcaggagctgcagaagaaggcagagcaccaggtgggggaagatgggtttttactgaagatcaagctggggcactatgccacacagctccagaacacgtatgaccgctgccccatggagctggtccgctgcatccgccatatattgtacaatgaacagaggttggtccgagaagccaacaatggtagctctccagctggaagccttgctgatgccatgtcccagaaacacctccagatcaaccagacgtttgaggagctgcgactggtcacgcaggacacagagaatgagttaaaaaagctgcagcagactcaggagtacttcatcatccagtaccaggagagcctgaggatccaagctcagtttggcccgctggcccagctgagcccccaggagcgtctgagccgggagacggccctccagcagaagcaggtgtctctggaggcctggttgcagcgtgaggcacagacactgcagcagtaccgcgtggagctgnccgagaagcaccagaagaccctgcagctgctgcggaagcagcagaccatcatcctggatgacgagctgatccagtggaagcggcggcagcagctggccgggaacggcgggccccccgagggcagcctggacgtgctacagtcctggtgtgagaagttggccgagatcatctggcagaaccggcagcagatccgcagggctgagcacctctgccagcagctgcccatccccggcccagtggaggagatgctggccgaggtcaacgccaccatcacggacattatctcagccctggtgaccagcacgttcatcattgagaagcagcctcctcaggtcctgaagacccagaccaagtttgcagccactgtgcgcctgctggtgggcgggaagctgaacgtgcacatgaaccccccccaggtgaaggccaccatcatcagtgagcagcaggccaagtctctgctcaagaacgagaacacccgcaatgattacagtggcgagatcttgaacaactgctgcgtcatggagtaccaccaagccacaggcacccttagtgcccacttcaggaatatgtccctgaaacgaattaagaggtcagaccgtcgtggggcagagtcggtgacagaagaaaaatttacaatcctgtttgaatcccagttcagtgttggtggaaatgagctggtttttcaagtcaagaccctgtccctgccagtggtggtgatcgttcatggcagccaggacaacaatgcgacggccactgttctctgggacaatgcttttgcagagcctggcagggtgccatttgccgtgcctgacaaagtgctgtggccacagctgtgtgaggcgctcaacatgaaattcaaggccgaagtgcagagcaaccggggcctgaccaaggagaacctcgtgttcctggcgcagaaactgttcaacaacagcagcagccacctggaggactacagtggcctgtctgtgtcctggtcccagttcaacagggagaatttaccaggacggaattacactttctggcaatggtttgacggtgtgatggaagtgttaaaaaaacatctcaagcctcattggaatgatggggccattttggggtttgtaaacaagcaacaggcccatgacctactcattaacaagccagatgggaccttcctcctgagattcagtgactcagaaattggcggcatcaccattgcttggaagtttgattctcaggaaagaatgttttggaatctgatgccttttaccaccagagacttctccattcggtccctagccgaccgcttgggagacttgaattaccttatctacgtgtttcctgatcggccaaaagatgaagtatactccaaatactacacaccagttccctgcgagtctgctactgctaaagctgttgatggatacgtgaagccacagatcaagcaagtggtccctgagtttgtgaacgcatctgcagatgccgggggcggcagcgccacgtacatggaccaggccccctccccagctgtgtgtccccaggctcactataacatgtacccacagaaccctgactcagtccttgacaccgatggggacttcgatctggaggacacaatggacgtagcgcggcgtgtggaggagctcctgggccggccaatggacagtcagtggatcccgcacgcacaatcgtgaccccgcgacctctccatcttcagcttcttcatcttcaccagaggaatcactcttgtggatgttttaattccatgaatcgcttctcttttgaaacaatactcataatgtgaagtgttaatactagttgtgaccttagtgtttctgtgcatggtggcaccagcgaagggagtgcgagtatgtgtttgtgtgtgtgtgtgtgtgtgtgtgtgtgtgcgtgtttgcacgttatggtgtttctccctctcactgtctgagagtttagttgtagcagaggggccacagacagaagctgtggtggtttttactttgtgcaaaaaggcagtgagtttcgtgaagcctggaagttggccatgtgtcttaagagtggctggactttgacatgtggctgtttgaataagagaaggacaaagggaggagaaagcacatgtgctccagtgagtcttcgtcactctgtctgccaagcaattgatatataaccgtgattgtctctgcttttcttctgaaatgtagataactgctttttgacaaagagagccttccctctcccccacccctgtgttcttgggtaggaatgggaaaaggggcaacctacaaagattgttggggcaagggaagtcacaagctttcggatgggcggtggcttttcacaaaacatttagctcatcttattctctctttgtcctctctcccctcctgcccgcccgcaccctggaattgccactcagttcctctgggtgtgcacatatgtttggagaaatagaggagagaaaagagggccacgtaactgagagcttacagtgccaatgccgtttgtgttctggccagagtggagtgcgcagccctgactcccaggcgctgagattgttgcctggttacccaggaagctgctgttccggctgcccagcctttctctgagccagcggatgcacagtccgtggccttcttcaggcttattgatgatgctttttgcaaatgttgaatcatggttctgtttctaagttggatcttttttgttttctccttgccaccctaatttgacatcaaaattctctcttgtgcattgggccctgggtcattcaaacccaggtcacctcattccccttctctgttcacacctaatgtcttgaagagtaggtagcagcagtgtgggctgaacctaggccagcttgcttagcgggtcaccctgctgtgaagtcctggcaggtgttggtaatgtgtggaaatgcagtcagcaagtttgctggggagtttgataaaagtataaaacaaaacaaaaaaagcctcggtataattttgttccacgacttcttctgtagctttacaccagaaggaaggaatgggctacagcaggtagtggaggaagaggggggtgagcaggtgtattaaaatagcttacgggtaaggcctaaaaggtcacccctcggccccctctccaaaagaagggcatgggcacccccaggagaggatggccccaaaaaccttatttttatacatgagagtaaataaacatattttttttacaaaaataacttctgaatttatcagtgttttgccgttaaaaatattcctctatagtaaattatttattggaagatgacttttttaaagctgccgtttgccttggcttggtttcatacactgatttatttttctatgccaggcagtagagtctctctgcctctgaggagcaggctacccgcatcccactcagcccctccctacccctcaagatttgatgaaaattccaaccatgaggatgggtgcatcggggaagggtgagaaggagagcctgcctgctcagggatccaggctcgtagagtcactccctgcccgtctcccagagatgcttcaccagcacctgcctctgagacctcgctctctgttccagcaaccctggttggggggtcagacttgatacactttcaggttgggagtggacccaccccagggcctgctgaggacagagcagccaggccgtcctggctcactttgcagttggcactgggttggggaggaagagagctgatgagtgtggcttccctgagctggggtttccctgcttgtccagttgtgagctgtcctcggtgttaccgaggctgtgcctagagagtggagatttttgatgaaaggtgtgctcgctctctgcgttctatcttctctctcctccttgttcctgcaaaccacaagataaaggtagtggtgtgtctcgaccccatcagcctctcacccactcccagacacacacaagtcctcaaaagtttcagctccgtgtgtgagatgtgcaggttttttctagggggtagggggagactaaaatcgaatataacttaaaatgaaagtatactttttataatttttctttttaaaacttggtgaaattatttcagatacatattttagtgtcaaggcagattagttatttagccaccaaaaaaaagtattgtgtacaatttggggcctcaaatttgactctgcctcaaaaaaaagaaatatatcctatgcagagttacagtcacaaagttgtgtattttatgttacaataaagccttcctctgaaggga

SEQ ID NO: 216727 - DNA, 4146 bp, Homo sapiens
  misc_feature (914)..(914): n is a, c, g, or t
gcggcgcgcgtccctgggcctccgcgcgtgagcggcgcgcgcgcccccgcgggccccggcgggaggagagtcggcggccggagccgtcaccccgggcggggacccagcgcaggcaactccgcgcggcggcccggccgagggagggagcgagcgggcgggcgggcaagccagacagctgggccggagcagccgcgggcgcccgaggggccgagcgagattgtaaaccatggctgtgtggatacaagctcagcagctccaaggagaagcccttcatcagatgcaagcgttatatggccagcattttcccattgaggtgcggcattatttatcccagtggattgaaagccaagcatgggactcagtagatcttgataatccacaggagaacattaaggccacccagctcctggagggcctggtgcaggagctgcagaagaaggcagagcaccaggtgggggaagatgggtttttactgaagatcaagctggggcactatgccacacagctccagaacacgtatgaccgctgccccatggagctggtccgctgcatccgccatatattgtacaatgaacagaggttggtccgagaagccaacaatggtagctctccagctggaagccttgctgatgccatgtcccagaaacacctccagatcaaccagacgtttgaggagctgcgactggtcacgcaggacacagagaatgagttaaaaaagctgcagcagactcaggagtacttcatcatccagtaccaggagagcctgaggatccaagctcagtttggcccgctggcccagctgagcccccaggagcgtctgagccgggagacggccctccagcagaagcaggtgtctctggaggcctggttgcagcgtgaggcacagacactgcagcagtaccgcgtggagctgnccgagaagcaccagaagaccctgcagctgctgcggaagcagcagaccatcatcctggatgacgagctgatccagtggaagcggcggcagcagctggccgggaacggcgggccccccgagggcagcctggacgtgctacagtcctggtgtgagaagttggccgagatcatctggcagaaccggcagcagatccgcagggctgagcacctctgccagcagctgcccatccccggcccagtggaggagatgctggccgaggtcaacgccaccatcacggacattatctcagccctggtgaccagcacgttcatcattgagaagcagcctcctcaggtcctgaagacccagaccaagtttgcagccactgtgcgcctgctggtgggcgggaagctgaacgtgcacatgaaccccccccaggtgaaggccaccatcatcagtgagcagcaggccaagtctctgctcaagaacgagaacacccgcaatgattacagtggcgagatcttgaacaactgctgcgtcatggagtaccaccaagccacaggcacccttagtgcccacttcaggaatatgtccctgaaacgaattaagaggtcagaccgtcgtggggcagagtcggtgacagaagaaaaatttacaatcctgtttgaatcccagttcagtgttggtggaaatgagctggtttttcaagtcaagaccctgtccctgccagtggtggtgatcgttcatggcagccaggacaacaatgcgacggccactgttctctgggacaatgcttttgcagagcctggcagggtgccatttgccgtgcctgacaaagtgctgtggccacagctgtgtgaggcgctcaacatgaaattcaaggccgaagtgcagagcaaccggggcctgaccaaggagaacctcgtgttcctggcgcagaaactgttcaacaacagcagcagccacctggaggactacagtggcctgtctgtgtcctggtcccagttcaacagggagaatttaccaggacggaattacactttctggcaatggtttgacggtgtgatggaagtgttaaaaaaacatctcaagcctcattggaatgatggggccattttggggtttgtaaacaagcaacaggcccatgacctactcattaacaagccagatgggaccttcctcctgagattcagtgactcagaaattggcggcatcaccattgcttggaagtttgattctcaggaaagaatgttttggaatctgatgccttttaccaccagagacttctccattcggtccctagccgaccgcttgggagacttgaattaccttatctacgtgtttcctgatcggccaaaagatgaagtatactccaaatactacacaccagttccctgcgagtctgctactgctaaagctgttgatggatacgtgaagccacagatcaagcaagtggtccctgagtttgtgaacgcatctgcagatgccgggggcggcagcgccacgtacatggaccaggccccctccccagctgtgtgtccccaggctcactataacatgtacccacagaaccctgactcagtccttgacaccgatggggacttcgatctggaggacacaatggacgtagcgcggcgtgtggaggagctcctgggccggccaatggacagtcagtggatcccgcacgcacaatcgtgaccccgcgacctctccatcttcagcttcttcatcttcaccagaggaatcactcttgtggatgttttaattccatgaatcgcttctcttttgaaacaatactcataatgtgaagtgttaatactagttgtgaccttagtgtttctgtgcatggtggcaccagcgaagggagtgcgagtatgtgtttgtgtgtgtgtgtgtgtgtgtgtgtgtgtgcgtgtttgcacgttatggtgtttctccctctcactgtctgagagtttagttgtagcagaggggccacagacagaagctgtggtggtttttactttgtgcaaaaaggcagtgagtttcgtgaagcctggaagttggccatgtgtcttaagagtggctggactttgacatgtggctgtttgaataagagaaggacaaagggaggagaaagcacatgtgctccagtgagtcttcgtcactctgtctgccaagcaattgatatataaccgtgattgtctctgcttttcttctgaaatgtagataactgctttttgacaaagagagccttccctctcccccacccctgtgttcttgggtaggaatgggaaaaggggcaacctacaaagattgttggggcaagggaagtcacaagctttcggatgggcggtggcttttcacaaaacatttagctcatcttattctctctttgtcctctctcccctcctgcccgcccgcaccctggaattgccactcagttcctctgggtgtgcacatatgtttggagaaatagaggagagaaaagagggccacgtaactgagagcttacagtgccaatgccgtttgtgttctggccagagtggagtgcgcagccctgactcccaggcgctgagattgttgcctggttacccaggaagctgctgttccggctgcccagcctttctctgagccagcggatgcacagtccgtggccttcttcaggcttattgatgatgctttttgcaaatgttgaatcatggttctgtttctaagttggatcttttttgttttctccttgccaccctaatttgacatcaaaattctctcttgtgcattgggccctgggtcattcaaacccaggtcacctcattccccttctctgttcacacctaatgtcttgaagagtaggtagcagcagtgtgggctgaacctaggccagcttgcttagcgggtcaccctgctgtgaagtcctggcaggtgttggtaatgtgtggaaatgcagtcagcaagtttgctggggagtttgataaaagtataaaacaaaacaaaaaaagcctcggtataattttgttccacgacttcttctgtagctttacaccagaaggaaggaatgggctacagcaggtagtggaggaagaggggggtgagcaggtgtattaaaatagcttacgggtaaggcctaaaaggtcacccctcggccccctctccaaaagaagggcatgggcacccccaggagaggatggccccaaaaaccttatttttatacatgagagtaaataaacatattttttttaaagaagaagaaatagaaagaaataaaaaaaaaggtg

SEQ ID NO: 216728 - DNA, 2330 bp, Homo sapiens
  misc_feature (914)..(914): n is a, c, g, or t
gcggcgcgcgtccctgggcctccgcgcgtgagcggcgcgcgcgcccccgcgggccccggcgggaggagagtcggcggccggagccgtcaccccgggcggggacccagcgcaggcaactccgcgcggcggcccggccgagggagggagcgagcgggcgggcgggcaagccagacagctgggccggagcagccgcgggcgcccgaggggccgagcgagattgtaaaccatggctgtgtggatacaagctcagcagctccaaggagaagcccttcatcagatgcaagcgttatatggccagcattttcccattgaggtgcggcattatttatcccagtggattgaaagccaagcatgggactcagtagatcttgataatccacaggagaacattaaggccacccagctcctggagggcctggtgcaggagctgcagaagaaggcagagcaccaggtgggggaagatgggtttttactgaagatcaagctggggcactatgccacacagctccagaacacgtatgaccgctgccccatggagctggtccgctgcatccgccatatattgtacaatgaacagaggttggtccgagaagccaacaatggtagctctccagctggaagccttgctgatgccatgtcccagaaacacctccagatcaaccagacgtttgaggagctgcgactggtcacgcaggacacagagaatgagttaaaaaagctgcagcagactcaggagtacttcatcatccagtaccaggagagcctgaggatccaagctcagtttggcccgctggcccagctgagcccccaggagcgtctgagccgggagacggccctccagcagaagcaggtgtctctggaggcctggttgcagcgtgaggcacagacactgcagcagtaccgcgtggagctgnccgagaagcaccagaagaccctgcagctgctgcggaagcagcagaccatcatcctggatgacgagctgatccagtggaagcggcggcagcagctggccgggaacggcgggccccccgagggcagcctggacgtgctacagtcctggtgtgagaagttggccgagatcatctggcagaaccggcagcagatccgcagggctgagcacctctgccagcagctgcccatccccggcccagtggaggagatgctggccgaggtcaacgccaccatcacggacattatctcagccctggtgaccagcacgttcatcattgagaagcagcctcctcaggtcctgaagacccagaccaagtttgcagccactgtgcgcctgctggtgggcgggaagctgaacgtgcacatgaaccccccccaggtgaaggccaccatcatcagtgagcagcaggccaagtctctgctcaagaacgagaacacccgcaatgattacagtggcgagatcttgaacaactgctgcgtcatggagtaccaccaagccacaggcacccttagtgcccacttcaggaatatgtccctgaaacgaattaagaggtcagaccgtcgtggggcagagtcggtgacagaagaaaaatttacaatcctgtttgaatcccagttcagtgttggtggaaatgagctggtttttcaagtcaagaccctgtccctgccagtggtggtgatcgttcatggcagccaggacaacaatgcgacggccactgttctctgggacaatgcttttgcagagcctggcagggtgccatttgccgtgcctgacaaagtgctgtggccacagctgtgtgaggcgctcaacatgaaattcaaggccgaagtgcagagcaaccggggcctgaccaaggagaacctcgtgttcctggcgcagaaactgttcaacaacagcagcagccacctggaggactacagtggcctgtctgtgtcctggtcccagttcaacagggagaatttaccaggacggaattacactttctggcaatggtttgacggtgtgatggaagtgttaaaaaaacatctcaagcctcattggaatgatggggccattttggggtttgtaaacaagcaacaggcccatgacctactcattaacaagccagatgggaccttcctcctgagattcagtgactcagaaattggcggcatcaccattgcttggaagtttgattctcaggaaagaatgttttggaatctgatgccttttaccaccagagacttctccattcggtccctagccgaccgcttgggagacttgaattaccttatctacgtgtttcctgatcggccaaaagatgaagtatactccaaatactacacaccagttccctgcgagtctgctactgcttgatgggggatatctgataaccggg

SEQ ID NO: 216729 - DNA, 455 bp, Homo sapiens
atgataggaagggagcttggctgaggctgaatgttataagtagtaacaggggataccatctgctgaaggtgagagggaatggagacatggagagaatagaggaatgtgggcagtgtattagaggatatggcttaaatgatgagggagttgcggaccagagtcagggcccacttgaggtaagacatcacaagcatgtcacggccctagtgattacatgttgcaggaaatagttgtttggggatatggtttttttttggttgtttcagtctttctcccatcagatttgaccaactccacttaacttggtcaaatccaagtgagaattccaaattatgggtaacaaagcctctctaatttggctaaaattcctcacagctgcaaaagaggaaaacaaaacaatacaaaacaaacccaaaacactatgcacttggtttctgagtttgcttcctgtctca

SEQ ID NO: 216730 - DNA, 603 bp, Homo sapiens
catggtgaaaactgcatttaaattataaaataaccttttttatttgcatattttatactttttagaacactggcaagcatgcatgtcatggaaatttttatatacattaaatgtatcaggagatattaagatgaaattcctagttttcttatagtcacttaaaaattattttaatacataattaactccaagatatcttgtattagtcatgtagtacaactcaattatcaataagcacatcaatatcaatgtgatcacttgaaagttttggaaaaactttctctggtttggcctctggaaagcctggacatttatttgggtctcaggagattattttctggtaataacaaaaattacactaagatagaattatgagtatgtgttacctttcttgatttttttccttaaacttttcattttgacagaaatgtagattcacatgtagttgtaagaaataatacagagaggtcttgtgtaccctttatccagtttcacctgttttgcatgttgcaaaactatagtatgataacacaaccagcatactgacacagacacaatctaccaatcctattcaagtttttccagttttacttctatgtgtgt

SEQ ID NO: 216731 - DNA, 192 bp, Homo sapiens
acttgaagctgtaagaaaatgttaatttcctttgatctattagtattgctcttgagaatttaagaataaagaatttattaattctaaaaaggaaaagagctctaagtacaaagatatctatttattatttttttaatctcataccttcctgcacaccaaagatatttatagcaacattgcttaaaatagaaa

SEQ ID NO: 216732 - DNA, 590 bp, Homo sapiens
cttggtggcgggcgcctgtagtcccagatactcgggaggctgaggcaggagaatggcatgaacctgggaggtggagcttgtagtgagccgagattgtgccaccgcactccagcccgggcaacagggtgagacaccgtctccaaaaaaaaaaacaaaaaaagaaaataacagtacagctgactttctgtgccctctcccattcccacatccatttttctttcatattaggatataaacccttagaatcaaacctgcttccttatggtttaggaatgacagtaatgttcttagtctttgtagagattagcaattaaaaaataaaaaagtcaaagcaaacaaaatgacttttttactctattagcgttctgcaacaagagttaaggaccataaaagacatcggagggctaggcacagtggctcacgcctgtaatcccagtacttttcgaggctgaggtggatggattacttgaggtcaggagtttgagaccagcctggccaacatagtgaaatcccatctctactaaaaatacaaaaattagccgggtgtggtggcagatgcctgtaatcccagctactcaggaggctgaggc

SEQ ID NO: 216733 - DNA, 500 bp, Homo sapiens
ttcctcatgtatatgaaagatggagaagaccgttgtagaaattcatgttattagtattccaagcaaaagagctaaaggttggtctctcaaattcctacccctttgaagaccgatggataagattctttaagtttgctgcaggtgattaactatgcaagggctaaagacagcagaactcttgccaaagtagcgtgccacggtaattctgccatgacctatgtaagcagaaatggatggataaatagttgcagactatctacagatttccgtcttccaagtcttccaggcagaggctacaaaataaaatacccttaagagccaggcaggtaatgagaatgagtggtgcatgccgggggtttgcatagttaatattagcactattccttgcttccacaaaggcgctttctgcacttgctggtaaaacacacagtcctctgggtatatgttttgttttctcacattttgtagattcatgagcacagagaaatatttctgcacta

SEQ ID NO: 216734 - DNA, 307 bp, Homo sapiens
attgtatataaaggaacaaagactaggatgacagcggaattcccattagaaacaatgcaggcgtaaaggcataagaatgatataatggacttggggactctgggggaaggttgggaggggggtgaaggataaaagactacacattgggtaacgtgtatacttctcggtgacaggtgcaccaaaatctcagaaataaccactgaagaacttatccatataaccaaaaatcacctgctcccccaaaactattgaaataaaagaaacaatgcaggctgaaaacattgtaatgacaatctttgtaagtgca

SEQ ID NO: 216735 - DNA, 392 bp, Homo sapiens
tgcttagcactcaagataattagctcttgtagttgatgtgatgccaggaggctgctcctgctgaccattcttcctcctctacctgcctccctgaccccatccttccgctcacttcaactgatgtttacataaaccaatgggatggctacaatgcccgacatgtgctgtggctggaaagcgtctatagctagaaactcactggaaagatctattttagcacttgcttatgcataatatttaataatgacaaacataatttaaggggcaaaatattgatagaagaaaagggaaaaatttaaaaagtagccctactataatcaagttttttttgttcgtttgtttgtttgttcatttgtttgagatggagtctcgctctgtcacccaggctgaag

SEQ ID NO: 216736 - DNA, 705 bp, Homo sapiens
agagaatgcatttgtaaacatacctccttctctgttagcctcatttttatttctattaataggtacagatttttagaagtcttattacttcagggctgtgacagtgaagcagcaactgcaacaacaaattcttgccctgtatgcacctgtgccttacctttcccaaacatttttaggctttttcttctgttattcaactccatattctctagtcatatgtttctaaactttaaaaaaacctagtcttagaaacactcttcttgttatggaagatgagaatttaatactcttacaccaccagatattcctggcacctctttcttaatcatttcaattagtaataaatattttggttaactgctaagccaagtagtgtactataattgcattttctttttcggacaactttttgtttttttgtttttattgtagtttacagttcgttgttacatttgcctagatttcaaggcactgtctcttctttatctcatgtagaattgtcagatccttttgtttttcatataaattctaatactgtttcctccttcccactcccaggaaaaatcccccctggaacttttctgttctgaactggttgctctctaggcaattttgtctaccctttacttcacactgttgaatggatttcatttcttcctctttgttggtttggtaaagcaatttcttagtgctatcttagaaagg

SEQ ID NO: 216737 - DNA, 570 bp, Homo sapiens
atatgatccacttaattatgaaaaaaaatgaaaatcttaagcttgacctgttcacatcaagatagacctagttatagatgccacaagtaaatcatggtgggagggatggggagtgggaaaacagtatttgggagatatagccaccaacagcgatccaaccaagcaacccatatccttgcaaagttaacagtagtatctaccaatatccagagttccagcactggagatgcagacaaaaatgatatgcaaatatgcacacagatacaaatgacccttggggagggggtgggaaaaacaaacaaacaaaacagccctgggcgcagaggcaggatcccagtttaacaggaaatcagagctcacatctgtagcttgatgtatgtaacatatatgaagatgagatctcagacacaataaacgagacaggaccaactggaactggcacttaaggttgcaactaaagagtagcaagtatagcatttgaaagtagaaattcttgagtcattccttggtaatgtcaagaaaaacgtctggagcctgggcagtacctgaagatgggagtctgagaatgaa

SEQ ID NO: 216738 - DNA, 769 bp, Homo sapiens
cagcaggaaagggaaagatagaactacccattgttcctcttcatttcagtgcctatttagttgtctgtatatgtaggtagaaatgttggtagaatgtgcatgtatcaataagataaataaaagcagttgagttagttttatacaccacgagaaattttaaaataaaaaaaattttttaattggggggggggtgggggttctttggcccatttccccttaaagggggggttttaaaatttacgggcccgggttttaaaacggggggactgggaaaaccctggggttccccaatttaaatggtttggaaaaaaatccccttttcccaagtgggggaaaaagaaaaaggcccccaccgatccccctttccaaaaatttgccaaccctaatgggaaatggaaatttgaagccttaaattttttgtaaaaatccgggtaaattttttttaaaacaggttattttttaaccaaaaggcccaaatgcggaaaatccctttataattaaaaaaaaaaaccgcaataagggtggaggtttttcccggttgaaaccaaagtccccttttaaagaagggggccccaccctcaaagggggaaaaaccgctttttagggggagggcccctatcggaaccctccccctattaaagtttttgggggcagggggcccaaaacccttaatatgaacccctaaaggggcccccctttttaaattttccgggaaaacccccaaactggcaaaggggggacccaaggggccccccctagcccctttcct

SEQ ID NO: 216739 - DNA, 581 bp, Homo sapiens
agtgctgctaaggtcatgaatctgtctgtggctctgtccaggttctctgtcctgtccacaagcctccatccctgctccagggccacactgccttaattgttggagctttctaacaagactcctaatctggaagggtgtgtcttccagttttgtccttcaggatagtctcagatatcatcccttcacctttggagatgcacgttagaattgatttcctgatttatacacactatccccccaaaaccattttttttcttctggaatattgactgggattgattatagatctattttgagagaatggacatttaaaaaatttgaagccttcctaggcacaaacatgatcatttctccatttactgagaactttttctagaattttcggggtagtacttttgtttagaggtcttgcacattttttgttagatttactgatgcatttttttttggatgctgttgcaaagtatttctctttaagtttttgtattattatggataaagctgctatgaacatatatgtaccgggttgggtgtgaacctaagtcttcatttctctgggataaatgcccaggatgcatttc

SEQ ID NO: 216740 - DNA, 272 bp, Homo sapiens
ctccttctctgaaccactgctaacaggctctcaccttttgcgtctacttttctctctctttctaaaattccattataatcatgtaagcacttgaagatcccccttcttttacctagccaagcaaaccactctaagaattccctttccatcactgacttcatcagtttctttccctctgctgaatcattcacatatattcatatatctgctggatatatcagcacacaaatatgctcgcttgagagcatttctatcatatttctgacttcccc

SEQ ID NO: 216741 - DNA, 618 bp, Homo sapiens
cgtggtgactcacgcctgtaatcgcagcactttgggaggccgagacaggcggatcacgaggtcaggagatcgagaccgtcctggctaacacaatgaaaccctgtctctactaaaaatacaaaaaaattagctgggcatagtggcaggtgcctgtattcccagctactcgggaagctgaggcaggagaaaggcatgaacctgggaggcagagcttgcagtgacctgagatcgcaccactgcactctgtctggcctgggcgactgattgagactctgtctcaaaaaattggtatgcacacctggcaatgtttgctgaatgcctagggtgcagtatgggtagtggcaaagtgttaggtctccgagggagattgcctgggtttgaatcctggttttgccacttgccagctgtgtgaccatagcagctacttaacctcactaagccttcatttcttcatttttcttttctttttcttttttgagacagggtcccgctccatcacccaggctggagtgcagtggcttgatcttggctcagtgcaacctctgtcctctgggctcaagcagtcctcccacctcagcctcgcaagtagctgggaccacaggtgtgcaacaccatgcc

SEQ ID NO: 216742 - DNA, 947 bp, Homo sapiens
cctgaagcagagactttaagggtgggtgcagcaatgtggtctaacaagccctgcaagtgatctggaggcccaagttagagaacagctgctttagaggaagacctgtcacagtcccacctattcccatctgttcccatcctatagcagctcagacgccctcggtgtcatagatcttttccgatcatgccctacataccactgatgtcccctttcccctgtagccacaaaatgcatagtgactcaacactccttttggcaattagtcacatactgccttgtccctaacagatgaatatagtgatcattccgtaaactatttatttatttaagatggagtttcgctcctttacccaggctggagtgcagtggcacgatctcagctcactgtaacctccgcctccctggtccaagcaattctcctgcctcagcctcctgtgtagctgggactacatatggtggcctggctaatttttgtatccttagtagagatggggtttcaccttgttggtcaggctggtctcaaactcctaacctcaggtgttccacccgtcctggccttccaaagtgctgggattacaggtatgagccacctcacgaggcccagtaaacatttatttaatcagccacaaataaatgaagttgcaaaactggagtgacaaggacagccaggaaaatatttaacttcggtaatctttacaatgcttcaagtaggtcctgtggaagaacacttatttgctatgatgtagaggctgatgcaggaagaaaaaagtggtaatatttataagcttttcaagaccattcgtttaaataagaatagcagaagcagctcccctttcccaagcacatactctccatcaggcactgtgtgccttccaaacaccatactattatcttccccattttgacaatgaggaaattgaggattagagaacttaagacgattgttg

SEQ ID NO: 216743 - DNA, 260 bp, Homo sapiens
ttactatccctagccaaggaatctcacctacactcagaattacctatttgacacgcctacttcagtgcttaggacacttctcagattcagcatattttaaactagtctcctgattatgccccttcaacattcctgacttacactgccgccagctatcttccccttccagatgttcatgcaaaaatcttacaggcattcttgaccccattctttttctctcaccctacatccaatgcatcaacatcctgttaggtctatcc

SEQ ID NO: 216744 - DNA, 872 bp, Homo sapiens
aggtaaaaaaaaaataatacatttttacattgtaaagtattaaatattttacctctattcctattgacatgcctacatgcatatttaaccatatcagaacaacttaagttttcataaagctatcttttgtgtaggacaagtatatcaaagaagcacatctcagaatttttacttgtaattatttcataattcttactgctggaatatttttctcagttttctcctttttattaaaccaagttaaaagatagttgaaatttgaaattatactattttcctgttgttgtcttctcagaggaacatcttgagggcccagtttatctgtagttcatactagatacttgctgatagtgtcattgtagatgtcttcaccttatctatccaatgttcttgtagaatatatcagctgcagctctttcctccccaaataacaaacataaacccttaaacaccgaaattttgtttcaccaaaacttttcaaaaagattataatactattctagaacttgaaatcatattctctgctcttaaaaatatataaaatacaataataaggacccaggattgttaggaaatcagttatgtgccactggattatatagcagtttttgtgccttctctcctgtgttggcagcagccattgcagttttcacaatgccttcctcctctgctcctaatataccagagactaaaataaaataatggaaatgttactaatacattaaccaatatgctttgaatatggtctagggccatgtaaattttcttgcacttaggctctaaaaccttgttttcttttttgtgtgttccagactgtcttccatgttagggaatcgtctggtttaacattaaataaaatgttaatctgttaa

SEQ ID NO: 216745 - DNA, 345 bp, Homo sapiens
gccaggcgtgatggctcatgcctgtaatcacagcactttgggagcctgtaatcacagcactttgggaagccgaggcgggcacatggcctgaggtcaggagttcgagaccagcgtggccaacatggtgacactccatctgtactaaaaatacaaaaaattagctgggtgtggtggtggaagcctgtaatcccagctactcgggaggctgagataggaagattgcttgaacccaggaaaaggaggttgcagtgagctgagatcgcgccacggtatgccagcctgagtgacagagtgaaactctgtctcaaaaaaaaaagaaagaaagtaggaagatcactgaataaa

SEQ ID NO: 216746 - DNA, 186 bp, Homo sapiens
agagcccagctttgagatgcctggtctctcctgatgcttccctttgattccacaaaagggagggcccggtggctgctgaatggtacagtctgaggcgatgacagaggctgcaggtctctgccagcattggagaccctcagacacagtgtggctggtgaccactggaggaggcagggttcaggttcc

SEQ ID NO: 216747 - DNA, 375 bp, Homo sapiens
ctgctcagggtggatggatataggtaggtgtgagttttccgcagagggttgctggcttcgggtgggtgagactaagaccagtgggaaagtgtgtcaagtgggaatcagatccgtgtttggggtgggcgcggggtcacggctaggcctccgcaaatgaaactgaagatttgtaaacgctccctggcccatctcctagttggcttccccgaccaccgtccacaccaggcggcccaccccgctcctccctactcccagccagcctggaattcagcctcctctcccaggcttcctgcccaggagaagggggtggatctcaggagtgtgggcaggagcagtggggtgccccggcccctccctccccttccccggcggccg

SEQ ID NO: 216748 - DNA, 620 bp, Homo sapiens
agatgctcagcaccattaatctttagggaaatgcaagtcaaaaccacaatgagataccacttcacatctactagatggctagaataaaatctaaaaatagataataagtgttagtaaggatgcagagaaattggaactctcatacactgctggtgggaatgtgagatgttgcagccactttggtttgtttttgattttcgttttttgagagacagggtcttgttccacacccaggtcaaaatgccacggtgcagcatggcttactgcatccttaaactcctgggctccagtgattctctcacctcagcctcttgagtagctgggaccacagtgcccagctaattttttttatttttatttttgtagagatagagtctcactctgttgcccagcctggtctcaaactcctgggcttaaagaatcctcctgctttggcctcctaaaatgctgggattacaggtgtgagcaattatgcctggccccagtgtagctgcttcggaagacagtcttgcatttcctcaaaatgttaaatgcagacttaaccatatgacccaggaattccacttctgggtatttacacaagagaaagaaaacatgtccatatagaaacttgtacatga

SEQ ID NO: 216749 - DNA, 240 bp, Homo sapiens
ggggctgggggggcagtggggagtgactgtgaatgtggacagtttccatcttgtaagatgaaaagtgtcctggagctggatggagggcgatggttgcactacaccgcagatatccttaatgccactgaagtgtgcacctaaacatgctgaagacggtgaattttatgtgatatctattttaccacaactaaaatgatttttcaagcattgctgtaaacggtactttgcagactcatttct

SEQ ID NO: 216750 - DNA, 493 bp, Homo sapiens
cacccaggctggagtgcagcggcgcgatctcgactcactgcaagctccgcctcccgggttcacgccgttctcctgcctcagcctcccgagtagctgggactacaggcgcccgccaccacgcctggctaatttctttttgtatttttagtagagacggggtttcactgtgttagccaggatggtctcgatctcctgacctcatgatctgcccgccttggcctcccaaagtgctgggattacaggcgtgagccaccacgcccggctaaattattattaatttttattttacagcagtccagagtagtcgagtattctgtaacaaaataacagggttacttattttggatagtagagggtttctagcacaaagtaggtgcttaataaatattggttgagtgttaagtgaatggtggacctgtttggttacacacatgcacacacggagaaagaaaacatagctgagctctcattgctgctgatgaactaccatttt

SEQ ID NO: 216751 - DNA, 387 bp, Homo sapiens
cgtttttgctgcgtcacagggagacagaagatgggctgctatttcgtcggctaaatgctatcattttaagcaccgttccaaagaaaacagggatcttgccagaggaaaataacatataccataaaggaaaaagaaatgtgcatcaaggcaaataaacagctctctactaagggcctaggatcttgctagacgagtcatttctctggttgaaaagcagttgagaaaggcaagacaaggggggcgggggcccagcagggcacctctgagcccttcctgctgctcttcaaagacagacgcattttcctttctacggtctccttgcaagtcttctgtaggccctgccaccttcaggctgactgactgcctccttcaaatatcagcatttgg

SEQ ID NO: 216752 - DNA, 596 bp, Homo sapiens
gtcccaaaaaggtagaggaactcacattcagaacctggtggtctctttgagctgaggaaacaaatatcagattttgagaggtcgaagtatctagacagaatacatgctgcagagtaccaaaaaatagggagctgtacagacagagagagatggaggtcttcagagtttcctcaagtttttgtctgagtgtgatgtgtacaaccaaaagcagaaactatacaatctggggaaacaactaccaaaatggggagacataaaaatttccaaaactcacacaagtaaggcctcataagacatgcggcatagagtaaagttcacagaagtctatcatcttcatggtagggtttaattacactaaatgccaagagcaaagacttcaaagcagaccacaattaatccaagtaacttaactgtataaaaaaccatatgcaaaattattattaaaacataataaaatccttcacataaaaggtaaaaatcacaatgccttggatctcatcaaatgttacaaaacatgcaaaatatcagaaagtatgatccataattattagaggaaaagtcaagtcgtgatgaaaacagagccacaaatgactaag

SEQ ID NO: 216753 - DNA, 440 bp, Homo sapiens
ccgcctactactactaaattcgcgggcgcgtctacattctgtgtggctgactgctgcaactttagttcatctgtcttaaaatgaaaaggggcacaataatatttttttctttactgagacaggttctcactgttgcctgaaccacgagtgcagtggcacaatcaccactcactgcagccttgacttccgggttcaagccatcctctcacctcagcttcctgagtagttgggactacagttgcatgccaccatgcctggctaatttttgtggttttgtttttgttttgtttttgagatggagtcttgctctgttgcccaggctgaggcaggagaatcgcttgagcctgggaggcggaggttgtggtgggccaggatcacgctactttactccagtctgggcgatggaatgagacacagtctcaaaaaaaaaaaaaaaatcc

SEQ ID NO: 216754 - DNA, 1207 bp, Homo sapiens
cgcggtggcttgtgcctgtaatcccagcactgcgggaggctgaggcaggcagatcacctgtggtcggaggttcgagaccagcctgaccaacatggataaactccatctctactaaaaatacaaaattagccgggtgtggtggtgcatgcctgtaatcccagctactcaggaggctgaggcaggagaatcacttgaacccgggaggctgaggttacggcgagccaaaatcatgccattgcactccagcctgggcaataagagcgaaactccatctcaaaaaatacatttaatgcaaaactacataatttacagcagttttttatgctctccattttcttaatatttaaaataccgtaaagaatctttacaattagtaagtatcttgatggtagtccttaaagggaagtaaaatacaagttaaagctggtaacaaaataatctcaaatacgaaataattttgttacccataaagttaataggatagagcacatgaagaaatgcagacctgacaagtccccccttatctgcagtttcactttccacagtttcaactgcctagagtcaactacggtctgaaaatattaaatggaaaattccaatcttgacccctccaattcaatctggccaagacattaatcaatccctttttcgacctattcatgccgaaatttggcccaccagccattaggcactaggggccatttaagtttaaaatggacgtcaaggatacaagggcttgggttaaggaccttaatggccttaaaaatggcctaaaggcacaagagtaggatgctagcacttggaagtgcaaaaacaaagggtggttatcccactgggactttaaaaaggttgccaaggggttaagcctgaacccggcactttggagggttggccaggagactttgacccgggttaggcccctttcgcaaaggccgacctgtcaaaaaattttaaaaactcggggggtggcacctatgcctactatgggggttaacagggaactttccccccatgggtcctgagaaaatggccctcgtcccacgggaaaaatttctttcaaaatcgcacattttacttcggggcggtgttcccttccacactccgcggggcggaatctcgggatgtgccacccacacgacgcacccttctctatctcactcatacgcgcgggtgctctcttctcgcggggggtgcgcaccccacaccc

SEQ ID NO: 216755 - DNA, 848 bp, Homo sapiens
ttggccaggctaatctcgaactcctgacctcgtgatctgcccacctcagcctcccaaagtgctgagattacaggcgtgagccaccacgcctggccttgaatttatttaaaaaaaaaaaaagtattataaacccagtatctacaagaaaaaaaaaattgtcagacttctcacatttgacatgacagtataaaaagattaacaaattatctttcagtacagctgtataaacctatttcagtgctctggaattcaaccaaaggcataaaacaaactgggagcatttatttattaagttactgaacttcaggcagaaatggtggttttcagttttgagctgctaccagactcctgcccttcccccaacgccagctctgtgggtattagtttaagcagggcatgctgctgcctgagaggactcgttggatttggagtgttgtcaagttaacggggcaaacacggaagactagtggcagactggtggattaggccagggatgtaacaggtagttgtaggaggtgagacagccacaagaagcttgaaaagctctccccaaattggttgactctagacgatacacacacatataagagactggaacacactcaagccactcatacatccttggccatcagaagctgcacatacagagatttcaagagaatctggcagagagcaaaagccagggaagaattgaaaatggcctgaagtaagaatgcacttccagctcacatacagatccattagcagagagctgaaagtttactggctcgaggtgtttaactataatctcttaccaatctgactgatccctaaataatggagacagagaacccaaggaagccaagctt

SEQ ID NO: 216756 - DNA, 887 bp, Homo sapiens
gtatacagggcagggagaagctgtttatttccgtgcctgcggctggagcttcttaaggatttgagctgtgatgctggcacctggcagaccacatcctgtgcggttttcagttttgctccgttcctgaccctggtatagcagaagctttttcacatctatgacacccgctatgtcttggtaaaccctggaagggaaaggaggacaaggttaaaatactgttccgaggatctggtctctccacagcgcaggctggaggtggcagcccgtggaaagccaagttcatccaccatcggagcccaggccaggctgccaaggctaatattcaggacaaagccaggcacaggtcgggaatcctatgaagatgatcatcgtcctgaggtcttccttccagggttgcatccgcgacagaagatggaaagagaaatgggtgagtccctgctaccaccccaccctcaggttgcttttttggctgaacaagaagggtcctcccaggcaggaagggtggggcacagaaacgtgagccaatgtggatgacttggggagggctttgcagttgaatctcctgaaaacagcaagaagtacagacctccgggcattctagactcagattctgtagacgcttccctttggccgagccaagccagggttgctcaggaactggggtccttgagattggattagattggacggaacgacacaggattgcaacgtgctgaactgtgaggaccggggtttagcttgagttccccagtctgtccacgaggtccaagcttgagatcattacggcgaccacatctcaggaggaagataggtcagcaacgcagtgacgtgctggaatagttttgaaatatttgaactattctaatgcaaactcttcttttaatgac

SEQ ID NO: 216757 - DNA, 370 bp, Homo sapiens
atgtactgttccatctggaagtcaagtttggtgccacctaagtgggttcctgctgcaaggaactgaaggacatcctcctccttcatttgcaggacatcaggggctccagacattgcgaaagtttccctttaagttacgacgggaatccagaacaacgctgtatggacacctctgtaggtagtgcggaaaagcgtaattttatttatataaagtgcaaaaaaccatgcaaaaccaagtcatacattgtttatggatacatatatgtattatacaaatttatataaaatcaaaggaagaattagtgaaagataatggccacctccaggggacagggaagagtgtacacacataaataaaatggatacatggg

SEQ ID NO: 216758 - DNA, 262 bp, Homo sapiens
tgggtggacctgaacttggacactcccctaccccaaagcttggccagactctggcacggactccgaccccagccagacactgactctgatcctggaccctaccccgctcctggctggcactgacgtgactctagtcctgaccccaagctggtgcggacgctgacccagacctcagatggatgctggtactgacctccaccctatctttactggaaccaaaataactgccctggtcctgaccctggacttgggctggatgttg

SEQ ID NO: 216759 - DNA, 494 bp, Homo sapiens
aagcttcttccttaaaactataaaacaatcctactccaagcatatattttaaccatatggtacaactattaatacttcaaatgagttgactatacagacaatgacattactctcatccagtgcagatcagattttctcccaatataacttccagctactggtgaaaaaaaatgcaacctctaaaaacactgttcaagtgggtttggtgggttttctgctttgagaactctaacagtttacaatgtctggtatcagactccagttcctcaaaactacagaacttgtgagaacctccaatcagggtggttacctgaatggctttggtctggtgcaaatcctctttggtgtgtcccccaccttgcctctgggcccacagtcttacctactttgacgtatctgtttcttgcttcttaaaaactacattgacaactgattttaattgacttccaagtatttaaaaacatacttaaggagggatgagaaggagggatgag

SEQ ID NO: 216760 - DNA, 468 bp, Homo sapiens
agacgggggaaggattacaaggcaggtgagcgacgaatgaccatgatgtacgacgagtttcgagtaggattccgtatagggagagttgggacggcctgcaggaccggctcgggtattccggggtcgactactactactactatatttgcggccgcgtcgaccacacgtctgtaatcccagctactcaggaggctgaggaaggagaatcgcttgtacccaggaggcggttacagtgagccgagatcatgtcactgcactccagcctgggtgacagagcaagactccatctcaaaaaataaaataaaataagctgaatgaattgagtgccgaactgaagagtgagacagtgactagggatgaagggagaggaaaaaacaagaaacaacccaacaagcgaggcctccctgcatagagggagaagggatgtgttcgaatgagaagaagcagagcaaggttttgaatcacagg

SEQ ID NO: 216761 - DNA, 483 bp, Homo sapiens
attaattaatttttttagaaacagggtctcactgtgttgcccagacttaactcctagaatcttatatatgaggactcatacaatatatattcttttatatctggcttcttcaactcagcatagtgattttgagatttatatttattgttggatgtgtgagtagcttgtttcttttattgctgaatagtattctagcatatggaaataccacagtctgtccattcatttgttgatgaacatttgggttgcttgcagtttgagactactacaagtaaagtgctatgaacattagtgtatgattctttgtatgaacataatgctttcatttttcttggatgaatacgtagatggaatgactgtgtcatattgaaggtgtatatttaactttttaaagtggctttgcacaagtgtataggaattcatttgcactgtattctcaccagcccttggtatggtcatttacagtatttttttagccatctg

SEQ ID NO: 216762 - DNA, 552 bp, Homo sapiens
tgtagggataatctataatgaggcttgatgtctttcttcaatttgcacagtccagcagaaatcaatgaaatttgtgaattgggaaatggaaaaatccctgtattttccctcttaggcctctcggcccatgatgagaggggctgccatgaaggtctttgacatgttctggagacattttccctattgtcattacatatgcaaatttctgcagtaagctagaatttctccccagaaaatggggttttcttttctgtcttttttttttttttttttttttttgcctaaatcaacacatctttattaaacacctgcagttactgggaggaggcgatgatgctggacacactgtcaaagtcaatcttctctagagtattctagggtttaatgctctcttcctggttacagatgaagatcggccctgactcgttagcgctccagccatatttgctcatctacacctttagctggctggctaacagatcaccaaacattttaccaagcagccagcatcccatgtgctggtaagtgatacccatgacatggcagataaac

SEQ ID NO: 216763 - DNA, 318 bp, Homo sapiens
gaagttcttgttctcagaaatctagtctagattataatttcagtatgattactctattttgataacatatttagatgacaaaagcatagagttgtgacaaggcaaaataaaaatttattagcagttacgagtaaagaatagtttcaagcaaacataaattttagccttttcatgactgcaggtcctaagataactgaatacatatatgtcttcttttcccactgggtgtttattgaatgcctgttatgtgcctggcactgttctacatggtgagactatagcaatgagcaagacaggtgggatctctgttctcatgga

SEQ ID NO: 216764 - DNA, 478 bp, Homo sapiens
atagccttcattttctgccatgccccttcataagggagaaggatgtttgtaccatgatcctccccgcataatctatggaattaggagtcctgtgtggagtcttatcaataaatatgcacattcatcaaatgtctacttaaatgtgagtattctaccagtgagaaaaaacacataattttcaaggtaatcattgttaaaccaacagcaaacttttgtctttttcagcgccataaagtccagaagacagtagaaaagtatcttcaaagtgctgaggaaaataagtatcaacttagaattttatgtacaatattggaggcaaaataaagacatgtttagacatacaaaactaagagagttgaattattaaaggttatattccaaggacaaaaaagaggatctgcccaaggtgaaggtatggcatacaagaaacaatggtcaacagagaaataaaatatatggatgaatatatggataaatt

SEQ ID NO: 216765 - DNA, 773 bp, Homo sapiens
tgcgtgggcaagatttcataaagaaaaccttaaaagccggcaacagaagcagaaatagacaaatgagattatatcaaactaaaaagcttcggcacagccaaaggaacaaccaacagactgaagagacaaccaacagaatgggagaatgtatacgtaaactaatcatctgacaaattattaagatccagaatatacaaggaactcaaacaacaacaaaaaaagaggcagcatagacttcagaaaggtgggtctgggaaaaatgaatcatatacctctccagtggtctcagacaccccaacatagataccatcagatcccctaaacacaggcacccaggcaggtgccatcagatacccaaaacaggcttccaggtaacccccaaatatgtcagacactccacataggtccagcagatacccccaaacacatactagataaccccaatacagatgctgtcagataccctcaaacaggtgctcagagtctgaaacacataccataccctcccctatccacttccacacaggtgctatttggcagatgtggataggccagatgcttcccccagcaccagcaacctctcaattgccatcagacaccccagtcttgaggttgcctgtctaatccaagtcctgccacaggggaggcagttgaacagtaaccaggagtcgagcagaacagctctcaccaaggttggctggtcagccaggcctagaagatctccccatggccaggcaagacggctcatgcctgtaatcctaacactttgggag

SEQ ID NO: 216766 - DNA, 711 bp, Homo sapiens
gtgaaagcagcctgctgaggaagagactccgggaggatcccgaggacaccccagtgcagccatgttgagactgacgctgaggaggaccccaactgtcacgagcaacacctgtcgaacacagccacccacctggggacagatcaagaagctgtcacagatggcagaagaaaacctgaggaaaggtgggtctgggaaaaatgaatcatatacctctccagtggtctcagacaccccaacatagataccatcagatcccctaaacacaggcacccaggcaggtgccatcagatacccaaaacaggcttccaggtaacccccaaatatgtcagacactccacataggtccagcagatacccccaaacacatactagataaccccaatacagatgctgtcagataccctcaaacaggtgctcagagtctgaaacacataccataccctcccctatccacttccacacaggtgctatttggcagatgtggataggccagatgcttcccccagcaccagcaacctctcaattgccatcagacaccccagtcttgaggttgcctgtctaatccaagtcctgccacaggggaggcagttgaacagtaaccaggagtcgagcagaacagctctcaccaaggttggctggtcagccaggcctagaagatctccccatggccaggcaagacggctcatgcctgtaatcctaacactttgggag

SEQ ID NO: 216767 - DNA, 420 bp, Homo sapiens
ccataccactcaaaaacctattgttggtggctttcttttattttgttcaattagaaatgggatgatattatatatactattttttatgcatattgcctgtttccatcttcatgtgttatgaacatttccttatgtcattaactattcctgatagttcttgataactaatcatattcctgataacatgatttttaaaggctgcatggaactcagtctcaggtcgagatggtttataaatcccctggtggacttttcattccttttgtaaattgctattataaatagtattttggtgaatatatatctaatcatttttgcatacatatctgtttctgcaagatacagaaaaattttcactgttttgcacccctaccagcaaaatataaaaatatctgtttcttcacatatttatcatcatga

SEQ ID NO: 216768 - DNA, 306 bp, Homo sapiens
tcaaaaagacaatccttaattaaatctaagttttaaactacatggtttctaaaatatagaaccaaaacgatgaaattaaaatatacaaagaaggaaacctatatgcacattatgtataataaccaccaacatcattatttaccaagcatctacttactaccaggcaccatactagagttttcatatattatttctaataccgagcaccatactagtgacttcatatataatttataaacttcacaacagacagctaaagaaattaggactcagaaaggttgaataattctcccagagccacacagg

SEQ ID NO: 216769 - DNA, 688 bp, Homo sapiens
ctgatttgaggttttaaatgacaaacagcagaaccttcgctgtttttaatcttaacttttaaattattttcaacacctcagcaatctactgattagcatccatagtcaaaaagtaaagatcctctttccagaaaaatgtacatatatagaagattttgccagcagtttcaggatgttcacagaccctctaaaactttcaagagactttatggatttcagattaagaatgacgagaatttgggccgggcacagtggctcacgcctgtcatcccagcatccaagaacatgggccataaggaagcagtaacagttacatcacaagcggctacttatttcacaacatcatcgcccagtctattaaattaatgttggtagtcagaactttattggttttgtagtttggtttgaaattaatttataaactgccttttatagctgcattagggatataagcacacaaattatacctaatttgtgtattggggaagggaggaaattaagtaatatagaagaacacaaaaactatttttgaagtaaacatactcaagtttcaaaaacatgaaagaccctggaactgcatcagaagttccacatcctcaacgtaagcaacataaggaggagaccctgtctttacacttctttagcaggccatgtggcccctgccttgagttccaagttctggggtcct

SEQ ID NO: 216770 - DNA, 456 bp, Homo sapiens
gcctttccagcctctgctttgggaaatgcagactgggaaggaaggatcaagcctactcagaaacacaagccgaggtataagacgagctccttgcaataaaaagcaacaacatgatggaagaaagttgagctcagaactcagtgacatccgagctcaaataccaccttctccacttaattacttttgtctccgtagacagattatacaaatttcctgaccttccttatctgagaaattgtgagagtcctgccttgcagggcgggtgtgagaattaaaagcatgggacatacctagcatagcccttgacacatagtgaacattcatttgtcacctccctcttaaaggaaataactatcttttattctctgtatcccttctattatctcccacacaatagtacctcaataaacatttgttaaataaataaataaatagctccacttctcagccaagtgg

SEQ ID NO: 216771 - DNA, 407 bp, Homo sapiens
gtgagggtgtatcaatcagacctaggatgcagccaaatgggctggctcagccaggtttctagaacacagatgctggaaggagactgtggtggttgtgaatgttaccctgcaaggaatagtctttggagatatgattaggttaaggattctgagatggcagattatcctgagttatccagatgggacctaaatgagatcacatgtattcttataaggcagagacagaggaagacttaacacaaacagaggggaagaaaagagcagagagatttgaagatgctggtcttgaagctggagtgatgtggctacaagcaaaagagtgccagcatccacctgaggctggaagaggcgaggaacagatattttcctagagcctccggagggagctcgggcctaccaataccttg

SEQ ID NO: 216772 - DNA, 426 bp, Homo sapiens
gctgagttgaaggcctgccgggaccaggaggaggagtataagtccaagtatgaggaggaggcccacaggcgcgccacacttgagaacgactttgtggtcctcaagaaggatgtggatgcggttttcctgagcaagatggagttggagggcaagctggaggctctgagagagtacctctacttcttgaagcatctgaatgaagaagtgaggctcaaccaaagggcaggctgcagccaagagagaggactgggtgggcaggcttcctgtggccatgaggagaatggccaagaggggaagtctgttagggtggcttagattctgggtcattcagtcacttgacaaccaattactgaaaacttactatgtgaattgctaggtcctggggatacatcaatgaataaccaggtcgacgcggccgcgcattta

SEQ ID NO: 216773 - DNA, 389 bp, Homo sapiens
tcagagcctccagaaggaaccaacccagccaatacattcattttggacttcaggcctccagaactgtgagaaaacaaacttctgttgtttgaagccacccagtttgtggtgacttgctatggcagccctaggaatctatttcatcctaagagagagggaaaggacaagaggaggaggagggagggcaagggaagggaaaagcagggggagagaaatgggtccggagtgggggaatgaagagtaagtgtgtgcagagaaagtgaaagagtttagttggttatagtgctccccgccaaggtatgttcacccagaacctcggaataagaccttatttggtgcacacttactaagaaccaggaagaaaaaaaagaaaataacaaatttaaaaa

SEQ ID NO: 216774 - DNA, 289 bp, Homo sapiens
gcaaagcccagttttcttcatcgcatatctttgttttcttcaagtatccccttacttaatgttggtagtattttttttaatgaaatataaatccctaaccaccaagcaagaaatgagactcttaattgcatcagtttacagtgcaatgtgagtgtaaatagtgtaaattgaatttttaatggacttttttttttcccgtttttgcttgccttacattcattatccctccctgggtaataaacatttatttttccctttgtaaccactcctccccttctgtcgtcttctc

SEQ ID NO: 216775 - DNA, 309 bp, Homo sapiens
taaatctccgtttaggccccatctaagagatccaggccttggagcaacactgcgcccagtatggggaggacgcaggcttcggtggctgagcttctgctctgctggtattggccatgggtttgcactcagcctctccaagctcagggttccgctctgtaaaatggggtaacgtttactttctttcttttttttttttttttttttttttttgagatggagtctcgctctgtctcccaggagaattacttgaacccaggaggcagaggttgcggtcagccaagattacaccattgcactccaggtcgacgc

SEQ ID NO: 216776 - DNA, 638 bp, Homo sapiens
gatatagcaagtgctcaacaaacgttagccacttccatgatgatggaggaggagaagggggaggaggagggaaaaagaagaagatatgcaaagcatagcaatagttgactttcaacaaaggttactccctttcctctttcctattccattattggttgggggaaagcttcatttacccattctagggtcaaaccccattacaataaaattattgcccaacttcccctgctgaatgggaaccttcttatattaaattttggtaagaattacctacattataaataattcaggttacttaattcaatatgtttgacaatgtataggcataactcttagaaaaatagatcatgtaaacactgtcagattatttccccacactttctttttcttgccagcaccattataaaattatagagggcttccatatatcgggacctgcatcatgcaaaaatggttggggtggagtgggagtagaggttccaaacttctagtggctttatggagaaagcctcactgtccctattacctgaactcttacctctgaggtggttgggttttgtttgtttgtttgtttgtttttggttttggtttttttcgagacatggtctcactctgtaacccaggctggagagcaatgg

SEQ ID NO: 216777 - DNA, 549 bp, Homo sapiens
gttagtttgctgaggatgctggcttccagctccatccatttctccctgcgaaggacatgatcgcgttcctttttatggctgcacagtattccatggtgtatatgtgccgcattttctttattcagtctatcactgataggcatttgggtcatttaactttatttttaagctgtttgaaaatatttagaccctaaagaccttttcttttttacatttttaatacgaattaaagtgcttagccttgatccattgcacctccaccccatctcccactcaccctgtctcccaggcacagttgctgcttgagtcgctccaggcccagctgccaggtggacagtcccagactctcaaagcctttgttctgggacgggtgcggtggctcacgcctctaatcccagcactttgggaggctaaggcaggtggatcacctgaggtcaggagattgaggctgcagggagctgtcatcccaccaccgcactgcagcctggtgggcaatagaatgagacctgcctcaaaaaaaagctaaatggatatgacttaagaaactga

SEQ ID NO: 216778 - DNA, 664 bp, Homo sapiens
gttagtttgctgaggatgctggcttccagctccatccatttctccctgcgaaggacatgatcgcgttcctttttatggctgcacagtattccatggtgtatatgtgccgcattttctttattcagtctatcactgataggcatttgggtcatttaactttatttttaagctgtttgaaaatatttagaccctaaagaccttttcttttttacatttttaatacgaattaaagtgcttagccttgatccattgcacctccaccccatctcccactcaccctgtctcccaggcacagttgctgcttgagtcgctccaggcccagctgccaggtggacagtcccagactctcaaagcctttgttctgggacgggtgcggtggctcacgcctctaatcccagcactttgggaggctaaggcaggtggatcacctgaggtcaggagctcgagaccagcctggcccacatggcaaaaccccgtctctactaaaaatacaaaaaaaattagctgggcatggtggtgggcgcctgtaattccagctactcgggaggctgaggcaggagaatcgcttgaacccaggaggcggaggttgcagtgagctgagattgcgccatggcactccagactgggcaacaagggagaaactctgtctcaaaaaaagaaaaac

SEQ ID NO: 216779 - DNA, 259 bp, Homo sapiens
tggtagagatggggtttcaccatgttgcccagctagtcttgaactcctggactcatgcagtttacccaccttggcctccaaaagtttggcttttggtttttttgccccatggatattgacagtataacatttaacagtgacattttctcatttgtttgtgtcatatacctaaaagtatctgtgtattataaacatcaactgcttatatacaatttacagatattaaagaaaattttttttttttttttttttgagacgg

SEQ ID NO: 216780 - DNA, 104 bp, Homo sapiens
tgtagaaggtggtgcctttttattgcagtttatctgtttgtctctcattctctctggacaagcttgtcctttcctttgtctgcgcatccttcggtctctgcatc

SEQ ID NO: 216781 - DNA, 394 bp, Homo sapiens
taccccttcatcggaggagtaagttacagtactcttgggcagatcctgattgagtggctcagctccaatctaattagcagttccctattgcttaacaagtacacaggcccaggctgggcgtggtgggtggctcattcctgtaatcccagcactttgggaggcagaggcaggaggtttgcttgagtccaggagttcacgaccagcctgggaaacgtggtgaaacactgtctctactaaaacaaaaattagccaggcgtggtggcatgcacctgtagtcccagctacacaggaagctgaggtggtggactcactgggcctgggaggtcgaggctccagtgagctatgattgcaccactgcactccagcctgggtgacagagcgagaccctgtctca

SEQ ID NO: 216782 - DNA, 188 bp, Homo sapiens
aatattcttccaatccgtgagcatggacatcttcccatttatttgtgttcttctcaatttctttcagcttgcttggtactttcctcgttgaggtcttgaaactccttggttaaatttatatctgggtattttattctttattgtagctattgtaaatgggatcactttcttgatttctttttcaatga

SEQ ID NO: 216783 - DNA, 247 bp, Homo sapiens
atttgtactctgtatataaaagcttaaagacagtgctaaaaattctccagtagtaggatgtatgtaagttgtttgaacagatagttctagtgggttcatagtaagctatttacctctcccattctgtggttcagttgacccatttaaaaaagattcaggatcaaaggcagaagctattgtatcaaaaatctttgtccactcttctcttgatttactcattcatccaaaaaatatttatggaacctct

SEQ ID NO: 216784 - DNA, 478 bp, Homo sapiens
aaacatttaggggtttcctagacaccttactgttacgtttgtatttttcaccatgtcttcattatttattcaatcatttttccgccccatttgctcacattcgtctccttctggaactcctattgggtatctgtcagacctgatgttgtcacataggtttcggaagttgtccctctcttccgtcttttttctccctgctctgggatctctaagggcagtcctgctctcacaacctgcaactgtgactcttcctcacatggccccatcctcagcttcactccccaccccctccatccctttgccctggtgcctttcctccatgctgcatctcacactttgactgaatgttacctccattctttctcttcagcctacatgttttttcctcttctttgccttggttgacaacccctttctttcacctaaatgaccataacgcagaatttaagcaagtttattttcccctgttctgtagtga

SEQ ID NO: 216785 - DNA, 162 bp, Homo sapiens
cctttgtactgaagagatgctatggataatttaatctgtttttcccttacccaatgctgacgtaaatcttactctatctagcccaagtgaatctcaattgccctggtcatcctaagcaatagaccgctagcataacaccaccatcaaaatgatgtgtttaac

SEQ ID NO: 216786 - DNA, 286 bp, Homo sapiens
gggaagaaatggaaaggacaaatctgcaagaagcccttagacctctgataagcagctgttgactcacctgagcccttgtggccttgcagaatcaacgattagaagatgactcatttggttagttctaaaatatgcccagatgttaagtcccatgtgtgcatatccccccaccaccaatttgaagaaattgtctacattttcctttgtgtggctccaatgttttttgttgtgcggctattctaggtgttttgtattttaatataagatgtgctcatcaatttctaca

SEQ ID NO: 216787 - DNA, 435 bp, Homo sapiens
agagaaattaagctttacaaataccccccctccaggctgaccccgggcccctcctagtcagccagacggccacatcagctcagctctgagaagaaagcccgtggttgggcctggcagagaggggcaggtggtggtcactgcaggtctgtccctgggcgctgccatggagaagaggacacactggttatattaactctcttcatattcaccaaaattaatgcctgcaagtggacaggcgcagacactgtggcagagaaactgtagttccggactagcgggtgaacccggggccatgttaaggaagtggccaagccgttctgctcacgtccccggtatgtcagccactttcatcagttttgttttaccttgtaataaaagttaccaaggagttagcaaaatctattaaaaattaccaagaagataatttgaagtaca

SEQ ID NO: 216788 - DNA, 589 bp, Homo sapiens
tctagaaggctgtccacatgagtaaggctttgttaattctcaaggctatgcacatgtcctgaaaatatctaaaaataccctaagctgtcacctctgactaaccttgagggactgtacaagcagaaagtgaaggctaaggcagagttgtcatctgtcacctgactgtttatgatgtaccccaacatgtacacagagaccctttgcaaggatcaggaaacttgctggtttcaggtgcttaagaaaatctctaattattagctgattactaagctaactggtcagagactttaactttagtagccacaatgacaaagaataaaagctttacaaattagtttataaaagacactaaacaaacaaataacaacaacaaacagcaaccacaacaaaccctggaaggggatgagaataatttccagagttgctatattatttaagatgtttagttttcatttaaaaattgcaaggtgtgtaaagaaaaacaaagtatagcttataaatagtttaaaaagcagtcaatacaaactttccctgagaaagcccagactttagtcttactatacaaagactttaaatcagatatttaaaa

SEQ ID NO: 216789 - DNA, 411 bp, Homo sapiens
gctgtagagtttaatggtaccaggacacagttggcccttggcatggtttcttcatcttgttataggattacaaacagcacctgtttcaaatagctgttgtaagaattaaataattacaagtagaacacataaaacagatatttattagataaaatatcaagccaaaagtattgtgacttttatctgagtagtctgcaatgacttctcaaacatatttggtctctcaactataccactggtgtgaaataggccacagttcccctactattctctccagctttatgctgagaaaaccaaaaattcctctcatctgcaagagagaggtatggccctgattttgataaggcaataaggatttttattaaccatcataataattattcattcatgatagaaccattatcttagcat

SEQ ID NO: 216790 - DNA, 539 bp, Homo sapiens
tgatgatgacggtgatgactgtgatgatagtgatgatgtttatggtggtgttagtgatggtgatgttgatgatgttggtaatagtaagaactgttactctgagtgcctacactgttttaggtaccttcatttcaccaggacacgtaacagagctctcgtctctctgactctgcaccccatggctatgtcctaattccactaaactcacactcttacaccagccagtaaacctgttgagggaagtgctcattattttttttccctggcatgcaggaagagttcgacatatgtttgcaaatacaggggtctgggacaggcggaactgcaaatgatccttttgagacctgaactactctgctgaatgggcactgaggggagatttatcgctggacagtgtagagtagccctgcccacctacaagatcagagagaggccctccagaggtggggtatcacaaagctctggtggctgagacctgggtgctctgtgtgccagtgagcacagttttgtatccttcttgtagaatgggtgagattcag

SEQ ID NO: 216791 - DNA, 399 bp, Homo sapiens
caatctttactcttgactgtctgcttactagtgttacaatctcacctttgagctgggctctgttagtacctatctgtaccacccaaagaatttatgagatacatagtttggctctatgtcctcacccaaatctcatctacaattgtaatctccacgtgtcaggggaggaaggtaattatatcatggggcagtttcccccatgctgttttcatgatagtgagtgagttctcaggagatctgatggttttataagtgttggaagttcctccttcattcactttctctctcctgccaccttgtgaagaaggtctctgcttccccttctgccatgatagcaagtttcctgaggcctccccagccatgtggaactgtgagctaattaaacctcttttctacata

SEQ ID NO: 216792 - DNA, 1033 bp, Homo sapiens
ggcacgagggtttttttttaggtttgggggagggtgagaggaaggagaggagcaggaaaggtaactattggttactgggcttaatacttgggtgatgaaataacacacacagcaaagccctgtaacacttgtttatgtatgtacaaaagtttcacatatacccccaaacctaaaaaaaaaaaaaaaaaaaaaaggaaagtgtgcttacgagctctgtgagtctgctgaaatgatggtagacgacaagctgtcctcaatcattcgccccccgctccccagccaattttctctgtgcaacagtggctatttactttggttacaagataaaatttatgtaagtggttgagcctagacttaggggcactagtttcagaaaaaaatgaaactatatatatttccatgttttttccaaggccaagagtagttttgtcctaagacaacagtaatcagtattttttgcttttgttttgttttggttttctttatactctttaactactttttacttttcacataccttactctcttgtactatgaaaacttattgaagactccaaagaggttttacttctaggttgtaaatgtcagtactcactgttggaaactgaaacagaaccactacaatgcttattgaaactgaaacagaaccactacaatgcttatttaatgatgccaaggaagatagcaaagataaaagcattgcatattaataacatctcggtaataggatgaagttatttctggcctcagaaacagccctgagacctgtccgaaaatcaagtgtcattttgttccacatatgaaagagcagaaccacagacacaacttggaaagtaaaactcatctgccttggtttttataatgcctgaatctggaaatctataaaacctgttaagatactagcaaagctttctcaattttgatgagcttattttctttgtttactgactaatatcttcatctgcaatataaagtgttaccatttttgttgtgtgtaatctgtctagataataaagattttcttttcaccaga

SEQ ID NO: 216793 - DNA, 595 bp, Homo sapiens
gtgtcatcccaggtggaatattcccagtatcccttcctgctcccagctgtgggcccctggagggcactccgggtgatgaggattctcatccctgctgagttggaaaggggcaccctgacaggagagctggccatgccccaagcctccccagccttgccctctgcattccttgagggccctgtcttcatggggatgggggatggcagctgtcagcaacaggccaagtggttctctcttctgtccccagcctcgagtggaagcagaggctgcattaatttaatttaaaaatttaagccaaagttccaactcgtggtacagagatccaagagcatagaaggtttgtaaggagagcaggtacctcttgtcctgccccttgctttccctcgcattcaggctcgtggggtaaacacttgcaactgttcctatgtttttgttcttttggcagttacctctgtaattctaaataatgagcttgtaattcaattgcttgacttatcaattttggacaatcttcaatgactattacaatggaatcttacaaaatagtctcttagctaatttcattagatttagttctagtgatgacctttatagc

SEQ ID NO: 216794 - DNA, 396 bp, Homo sapiens
caaacatgcccccatgaaagcagggacctctgtgaaagcaggaattgagaaattgggctcactactgaatattccctgggagttcatcagtcctgccacagaatagaagctcagtctgctggagtttgctgggggtctattccagacgctgttggcctggatatcaccaacggatgctgcagaacagcaaagattgctgcctgctccttcctctggaagctttgtcccagaagggctcctgccaaatgccagccggagctctcccgtaagagatggggcctccacgtgaaaagtaactacaaaacagaaccagaaaatagtcatgctgttcaagtgagttggcatatcacttcatgctactttgaaataaaatttcctcttattttcttatggata

SEQ ID NO: 216795 - DNA, 477 bp, Homo sapiens
cagccgcctcttcccccacagccatgtttccagctggtctcaggcctgggcttctccccaagaccactctgggtctcgtccaaacctgccaagagactcctagtggcagagtcttggttatgtcagcaccccctcaaggtgcatatatgcaccccagcacttcaccacctcggaggctatatcagcagccgcttccgctggggaggacagagccaggattggcccctcggagtccgaagcctgcggctttgataagagacaggcctcccactgctcaagactggggccgccttttcccatttctgtgcagctgcctgcctctctagccacccactggctgaccactggtccttctcagccagcgggaccaatgggctccctgggctgtggtcaccatggtgaccagagctgggcaggtaggaacaggcatgggcctcactcaatttccctcctctcaggccatcttgcctgccagca

SEQ ID NO: 216796 - DNA, 590 bp, Homo sapiens
gttaagggattaaaaaaataataaaatagaataccagtgactattgataaagagtcagtggagagggcaagatagaagtaacctgggctggacttgggaatgaatcactgatgctgcaaccaagaaagttaagaagatacatggagtatggtttagaagaaatgcagatggttgtagcagaaatagttctgaattggaagtcgggagatctatgttcctgtcttagtctttgccacttgacagctatgagaacttggcaaaggagttttgtgttttcttctgtagactcagtgttcccttcttaaatctgaggtagtcgaactaaattgtttcaaaattaacatctacattttaagtactccaattcagtaatacccaagagtaaatgaagagtggatgtagagatatatatttggacatatgaagagggaagatgaggaattttacctcccatacccttaatctggaggccagctgctacccactggggagatggaattggaggatataagcaatttatttatatacagctttatttttagtaattagttggcattttgccaagcctcattattccagacagtaaatgg

SEQ ID NO: 216797 - DNA, 460 bp, Homo sapiens
attgggtggatgcagaaactgagacctaggagacttcaaggagaagggagacggcttcctacagggaaccgcaggcttccacagggaaaatgcaaattgcacatgggaggcttggctctgcagtgaggttttcaaacattcccattcaatgctggttttaactctgagaatcctgaggcctggcaacttcgtgtatcaagagcctttcagcatggttaaatctagctcagaaaacccagaaaaccaaaggccaaaagaaccaccgaattccctattgcccaaaaaataacggctgcaggggtctcgacttccttcttgtccatttttatttcctttcactgtacacatgtatttctatatatatacacggaatccttgcgccaggagtggtggctcttgcctttaatcccagcactccgggatgaataaataaatgaatggaatggaaagccttgcttga

SEQ ID NO: 216798 - DNA, 283 bp, Homo sapiens
cagataaagccccttcatccctcccctgccagtgtagacaccacttcatccacctcccccgccagtgtagacaccctgctttcccagcaggtcaaacaggcagaggccagtgctggcccccggtcccggagccgggagtcccaggtgtctgtcttcaggttctgtttattaacaccccatcctcgaaaaaccaaccctagcgaattttatcgtatgtgaattaaaaatttaaaaataagatgaagtaagcaaataaattttaaaataaaatacatctaaggca

SEQ ID NO: 216799 - DNA, 415 bp, Homo sapiens
aaaagctgtgtttttatgatcttcactcacttattcatttatacaaaatgataaggagagattctagataagatacttttcctgaaatgaaacattatggtttctaagctatttcaccttctgagtagcaatttttcctttttttcccccccatttctttttttaagcagatatgagggcaatctgtctttgtctcctgaaatcccattgatcactagagttgatctaattaatcttgtcaatcagatggctgttttgtgttcagaaagtccaacctaaaggttgacaaatgaagagaattatgaccttgataaaggaggacagtcctttggttaagagcagtcatcattgaagaaacatttagcaccctctgtgtccttccctgatcccatcttcttccttttcctctggagat

SEQ ID NO: 216800 - DNA, 229 bp, Homo sapiens
caaaatcccccaagacaggaaccctagtctacctgtcccctcctacctccaccccattcagctctgaaaacacttgctgagccctgataagtgcagagcatggggggctggggatggggtctcccaggaagctgcaggtcttcagaggcagctttggcaactcggagtgggggtatttcactgggatagcctctgtggctggctgggctgagactggcaggcgaagtgg

SEQ ID NO: 216801 - DNA, 460 bp, Homo sapiens
ttttgcatttaatcaaacagtatggtttatggagagtttcctggatgattggttttcagagccagcgttgttttgtgtttccttggtaattccaaagaaatcccagcatcctacgtacctttggcctccatgatggattgaccatgattgggtgttagatggtcagaaactgagtgagatggtttttttttttttttctttaatgagctttccctttttttgctttaaaattttcaatgtaaaaataatgacatcatagtctatatttcatgtaaagtattgtggcttaacatgtacaaagttagaaaaatccacaagactcatttgctgatctaggtctaaagatttattttttggatgactataaaatttgcagagttagaacatttcaagaaagtttctcggctcgatgcggtggctcacgcctgtaatcccagcactttgggaggccaaggtgggt

SEQ ID NO: 216802 - DNA, 471 bp, Homo sapiens
agctcttggggaggcagagggaggaggatagctgtgcccaggaatttgagatttgcttgggcaatatagcaagaccccattctccaccaaaatgggggggaaaggaaagaacaatgaaacatattagggaatatctagcaagtctaatgactgagctggaaagtagcctaaccatacagtctctgcatcttatatactacagagagtgaagtttactgtatgtaaattcaaaaacaaaaggccaagtgtgaaggagtctaagaatgtgatggttctacaacaccccttccctaaaagagtgttacatgttttaggttaaggattctcaacaagtttttgtccccgcactctgcacatgcctcagtctctcttcgtattgtctcagtgaactgctatgattctcaacaatagtggggaggttgccaaaaataggaaggtttttacacaattttaaaaggcttctcttgctct

SEQ ID NO: 216803 - DNA, 425 bp, Homo sapiens
acagcaggccaactccaagaaccctctaagctattttttagtaggaagcatcaaaaaagctaagattcctttgattctatcaggattgatgctcaatcctttggctgacataacatgtgccacatgtttgacttgagaaagacaaaattaaagtttacccttaatgtaatggtcaattgttgaagtaagtacaagttttcttcttcagaggaagaaagtgtgtcagagcaaaggaggaggtatgcatacactggatgagggatgaggatcccctgagagaagtccgagtctgctaaattcatatttcagtatttgggaaaagtaagtggggcgctgtatatccctgtgacatcacagtccaagtataccgtcattctctccaggaaaaggcaaacaaatactgactacctagatgtatagggatg

SEQ ID NO: 216804 - DNA, 462 bp, Homo sapiens
gttcacaaataataagcatttggttgcaatttaaaattggttggcagagcaatagggcatttgattattaggattttacattatctgagtgacttggaaatagaaaagaagggacttgtattatatgtccagaaaaaaagtccagcaaactataatccataggcaaaatccagtgcactgctgtgtttgtaaataaagttttattggaattcagtcacgcccatttgcttatgtgttgtctatgtctgatttctgtctacttggtggcattgactagttttgagaaaccaaatgacccacaaactttgcaatatttaccgtctctttattgaaaaggcttgaccctctataaaaacgaattaatcctgaaggagaagaaaaaataaatagggaccctaatcatatttttaaatttatacagcatgcagttttgaaacactcagtcaatgatgtagaacaatt

SEQ ID NO: 216805 - DNA, 566 bp, Homo sapiens
gaaattattataaaaggttagattggagtgcttactattgtggtgccactcatcccaggctcagtggtcagaacttgggaattgtgtacatgtatgcacacacatatgtacacacgttgtctaaatttgcttcacattaatatctaaatttactttcatatccatatattgaaaaccatgaattcacaccagtacctccaattctagtccaacaacacaggattgcttctcattttctttccatattgataactcctttctcagacagtggctcccattatcctcaatgtaataacccatgattggtacagattttttttatccttgggcacgcttaaaattacttagcaaaaacaaaaagtaaaatcagttttgaagtaatatttctgctaaatatttagacatttttacttctttttcttcagcatggtaagtaaaaccatttattccatatttagatggttttctaaatttcagaaaatttagttagataaaagccgaccgaacccatgctacaaagaactttttgtatctataggcatgccctgtggttactggcgtaattg

SEQ ID NO: 216806 - DNA, 751 bp, Homo sapiens
caaagcgcctttgccgaggatttgccttccagcacattaaaactctagaagctctcccagttgatctgcagcatctggtacctaaagggattttcatctttaattctaaatgtatgaacgtaaaatgtagggattgaaagttgatgtggaatgtgtttttgaatttgtttgtgcaacttcatacttccagcatagcctttctaaggtagtgacaggtatatttaaatcatattttacttcgaatgtgacagagttcaatattatttaatgtgattttaaaatgcagtgggtctagatgagattaacctgtttcaaggtaaaatagatgtcatcatttactcccttctgaaaagctttttcttttattccattaacctttggttgtctctgaagtactatttattgcaggaaaatcagttctaaaagttggttccagggtatcatgaaaatgttaaattaaataatttctagtctgcttttacaaaacagcaatatggaggaaagagtgaaaaccatgttattcaatactttgcacaaaataagacagagctatgttaataaaattaacaatactaaattgaacaaacaaaaaaaaaaaaaaaaaacctttttggggcggccttgggccccaggaaaagagtttcttaaaaccctttggtgggggcgcggggccccagtgggtagggcgacccggggccaaaaggcggtcccaaggagaaccgggccgagaaaagggggggaattctcccaa

SEQ ID NO: 216807 - DNA, 408 bp, Homo sapiens
ggtaccatattgaaaactgttgaagtttaagtgactgtggtacttaagagagctctattttactccctgtcacagcttagagattttgtccctcatctgaccctccagggtcacagcccgggagagaataagttccatgtgtacattcatgtcacaaatattcattgagaaaaccatgtgccaggtgcgagatgtgggatggccagagagtaccattctgagcagggcagcagatcttgaaaaaggacccttggcaccagatcagagaggaacctaataatggcaggctgcatttattgagcactcactatgagccagctactgctcaagtactttctacatactaactcattgaaccccataaggctgatactcttacaattcccattttacagatgagatgactca

SEQ ID NO: 216808 - DNA, 675 bp, Homo sapiens
cagctactcaggaggctgaggcaggagaatcgcttgaacctgggaggcaaagattgttgtgagccaagatcgtgccaccgtactccagcctgggcaacaagagtgagactctgtctcaaaaaacaacaacaacaacaacaaaaacccagttattgtgtgtttgagttttgtgtttttgctttctattctgttccattgatctgtccagtcatgtactgataccaccttgctttcattaatcatttaattcatttattcaattagcacatatttattatgtcatatatgccattctggaaactaaatgtatagcattgaacaaaatgatcatagagcaaagctaatgatgtgttcatggagcttaagttctggtagggcatctgcgtgaaaacatacatcagctttggtagggcaggtgttggcaaactataaccctaaatccggactgtttcctgtttttgtaaagaaacttttattggaacatagccatgtccatttccttacatatcgccatggcatgccatttctttacgtactgccatgccatttgcagctatggtctgcaaagctgaagatattttctctctggactttcatggaatttgctgactcctttgctagggaaagactgaaagtaaacagaataggcaaaatatatattcgatagtgacaagt

SEQ ID NO: 216809 - DNA, 519 bp, Homo sapiens
cagatgtggtggctcacgcatgtaatcccaacactttagggggccaaggcgggcagatcacttgaggtcaggagttcaagaccagcctgatcaaccttgtgaaacccgtctctactataaatagaaaaattagccaggcatggtggtacatgcctgtagtcccagctacttgggaggttgaggcaggagaattgcttgaatccaagaggcggaggttacagtgagcggagattgtgccactgcactccagcctgggcgacagagcaagactccatctcaaaaaaaaaaaaaaaatgttattaggtacattcaaatttaggatttttgttttcctattgaattgaccttaaatattagaaaatgctttattcattataatcttcttgtcttcccatctgctttgccttacattaatatagccacaccaacttcttttggttagcaatggcacagtgtatctttttctgtccttttcctttcaacctttttgtgttcacatgtttaaagtttatctcccgt

SEQ ID NO: 216810 - DNA, 469 bp, Homo sapiens
tcttgggcagtcagttcagaaactctgagccacagtttcctcctctataaagtgggataataatatctgccttacagagtgctttcgagagttaaatgagttaatataactagcattgagggtaatgcctggtacttaatggcaatcaataaatattctcaataaacactgggttcctccggaagacattggtggacactgtgccagagattcaacaaaggatgacattgttaagttctgtggggtcagattgcctgggttcaaatccaaaacctatcgctctgtgcttagagtaagctatttcacctccctgaacattaatttcctcatctgtaaaataagaattattatagaacctacctcctaaggattatacaaaagactacatggaaagcatttggtaaagtgtcttgtactgagaaatcaaacattcaataaatgtcagctacttttgaggaggtggatgata

SEQ ID NO: 216811 - DNA, 571 bp, Homo sapiens
attaagagccacctcacaaggctgtggtgagaatttaatgtaagtgacttgcttggtgagatcagcttgacaagtgggaggtgcctggtacagagtatcatgagtatcaactcagccctttattatttggaaggccttgggcaagttctttaaactctctgagcctcaatgtcctcatgtgtaaagtaggggttgagaggagtctaagaatgcttctaaagcccttataacctagcaactgctcaatcagtattagctgttatatcatgtggcttgtaataagcacttagtatcattaatagcattttctcccaccttttaacatctttaatagctaagttctcctccatctgctaaaacgtaagctgtcagaaatttttgttataatcactaatgtgccccatatgcctagaacaatgtctaacaatacagtaggtgttcaacaagtttttgttgaatgaactttcctaagacttgcctctcctagcttctatgcttgctgcttgaatgtcctaattatcttgcagggaaagcactcaggttcctctcaaaaaggccccatgcaactctg

SEQ ID NO: 216812 - DNA, 272 bp, Homo sapiens
gtcccccttcattctgggtacctgcaggttccgacctgctgcctctgggcctagggcatggctacaggaggtggtgccagggtgagagaaagccccagtccccacacacagggccggctaagctggcagtctcgccccgggcaggggcagccctccttgtcaagacctctccccttcccactgccattgtcattgctctgtgtttgtactcattagtaataaaggtttagaagctctgacccagtgtgtgggtccagaaagctccctctgga

SEQ ID NO: 216813 - DNA, 355 bp, Homo sapiens
ttctggggagtagggatggggagattaagatgtgggtgagtgtgggcaaacagagacacttaaaaagtgagagttgataaaaaatattttcaagtcagtaagtgtcacttaaaatgggaatataaaatgaaatggacacatacaatttaggatgatagatatcatttaagtaactatgcttttcagaatgtacaacatgaaatttatatttgactatataaggcttatatagaataatagacagaaatagggaaaatgctatcatttcacctattcattagaccaagaaaatgttcatattccacaattctaaatgaagactactaaaattatatttctatataaaaaaatggag

SEQ ID NO: 216814 - DNA, 561 bp, Homo sapiens
agatacaacaaaaacacatatcattcccatgtgcacacagcgcggccaccatgacagaccatcagctccattaaaaacaagcctcaaatgtcaaaggactgaaatgataccaagtgtgtctttaagcacaatgacatctaattagaaatcaacaataactaagaaaacttcagatatgtaaaaattatacatctaaataacctataagtcaaataagcactcacaaggatattaaaaatttcacattgaatgataattaaaatacaatataggctgggagtggtggctcaagcctgtaattccagcactttgggaggccgaggcaggcagatcacttgcagtcaggagttcaagaccagcctgaccaacatggcaaaaccccgtctctactaaaaatacaaaaattggccaggcgtggtggtgcacgcctgtaatctactcgggaggctgaggcaggagaatcgcttgaacccagggggttgaggtttcagtgagctgagattgcaccactgtactacagcctgggtgacagagcaggactccatcttaaaaaaaaaaaaa

SEQ ID NO: 216815 - DNA, 433 bp, Homo sapiens
cttttaatgcatgtgaagcatgaaggggtctaaggacagcagctgtggggaaaacaggctggccaagacccaccgccccacaaagggctccgggagtggattatgctgatgctgtgtagcagggtggagtgcccagtgacccgtgcagagcctaggggattgcctgtcctctgtgtggagttctgctgaaagagacaatgatgggcacatcctaatatccaggcttctcactggatccaatttatttaccttctcctccgcctgggaaaatggaatctaaacggggtgattgacactacgttgcttaaacatggctcagttttgtattccctaatgcaaagtggaaataaagtgcggatgaaacagagaagcagttgcagtgagatgaaagggaatgatgtttaatattctacataaacatagagcaaggatg

SEQ ID NO: 216816 - DNA, 501 bp, Homo sapiens
tcatcatccttacccaatattgtgctcattcctgcctctgtaacattccctctatctcaaatgtctcttcaaattactcccatccttcaaggctctacccaaatcctactccacagtacagcctcaccaccccctggagcattccacagactcccccacttgccatggtctctttcttctctcatcctgttatagtcattgtctctaatccacaaccctcacattattatcattcttgtcactatctctgctttataatttagaacattttaaataaattcagtctgctgaacatttatattttaaatagcatgagagctaccccataaatgtttgaatgcatgacatatataccctaaatattttaatgaatgaactacaatatataatttaaaagataaataacacatttatcctgtaaatagaatataccataaatatcctacaattctattctagaatgttatattattcataaagataaacatattgttcaaaata

SEQ ID NO: 216817 - DNA, 294 bp, Homo sapiens
tacacttcttggctttattacgctggacaggcaggtctttttgtttcccaggatgttggttggcttcagctcttagtcttaggggatctggcatcccgtgctggggttttcacagcctgcaaagcaagccaggttctgggcagagccaggcttcctggtggatttaggaatgaaacccatctggacagggagggggaatgggtgggcttataggaatgctgggctatacatttcctatctcaagcttcaagagtgacaggaccaccaatggatatttcggaatagatgcctaaa

SEQ ID NO: 216818 - DNA, 226 bp, Homo sapiens
cttgaaaaaggtacaattttgaggggtgaaatcagggccttcaaagccagatatgcaaaatcattaataaagctacagacataagaaaagtataaggcttgttaggggagcagtaaagattttatctgggttagaatataaaggagtgagtgtattctgagtgatgttcaggaatgtagaagaagatggcagtctctataggaattaaatttttctgtaatgttta

SEQ ID NO: 216819 - DNA, 432 bp, Homo sapiens
acaagtaggatcattcatcattatggtatacatgtgctgttatggactacataatgttttggttgaagttttatttgcaagcgatgtgtgtgtgtgtgtgtgtgtgtgtgtgtgtgtgtgtatgggattttttaggtagtgggtgttgagcttgaacgctttcttaattggtggctgcttttaggcctactatgggtgttaaattttttactctctctacaaggttttttcctagtgtccaaagagctgttcctctttggactaacagttaaatttacaaggggatttagagggttctgtgggcaaatttaaagttgaatcatgctaagaacacttctgctttttgatccactgtttgcagcagaattatatatatgtataggaaaaatccactttgaataatccatgttttgtatttggaaattgttttta

SEQ ID NO: 216820 - DNA, 386 bp, Homo sapiens
gattttattgatgtaaagtagcaaatattcctgtgtccccaggaagggtgaggttctatgccaggttgggatgagattaccgaaatgtttgagaaagaaagagctcttcccgctgagaacaccgctcttaaaactccacctccccatggcttcacatcagcaaagcccagagatcgcgccaaccacacatggagaccaataggaccaagaaggcagatctgccgggattagggaagaacttgaacctgtggctgcaaagttggcgcttggcagacactcaggatgctctgcttctctccaagatctgggccttctttttgatgacaaaagttgccttagccccagctcctaagcacttagaaacaaaataaaattaagttttgaat

SEQ ID NO: 216821 - DNA, 452 bp, Homo sapiens
cttgtcacccaggctggagtgcagtggcacgatctcggctcactgcaacctctgcctctgggtataagtgattctcctacctcagcctctcaagtagctgagattacaggtgtccaccaccacacccagctaatatttatatttgtagtagagacagcatttcaccacgttggccaggctggtctggaactcctgacctcaagtgatccacccacctcagcctcccagagtgttgggactacaggcgtgagccatcgcgccgtcttttctttttttcttttaaagaaaatctcatctggattctttctgttaaagaactaaacccaactccaataacgcctttactatctgcctatttgcagttatactcaacttgcacaaaatttgtatgccatatacaaatatacacacattctctttacactatatgcacatgaatggaaatctgctgt

SEQ ID NO: 216822 - DNA, 477 bp, Homo sapiens
tctccctccacaaggccaaatccatcgtgtctgatcttaaggagaaggcccttccagtgctaggagaggtatgggcagcctctcatctgtgagctatggggatcagcaggccacctgccccagtcttggagctctgtagggtgaatgaggcagacgtggaagagttggccccaccaacagctgctttgtggagcaggggtccaaggaagataaggtggactcaaggtcaggctgcctggatttgtccgccaccctgttatgccatgacaacttctgaaccacacaccagacctgagttctgggctcatttgaagcctggaatagcaataaatatttttaacttgcaaaaagaaaagaaaaaggcaggtgtggtggctcacacctgtaatcccagcactttcagaggctgagatgagcagatcacttgaggccaggagttcgagaccagcctggccaacatggggaaaccccctctct

SEQ ID NO: 216823 - DNA, 449 bp, Homo sapiens
tcttgaacatgggagtggggagacggactcctaagggtatgacacttgaagatttcaggagggggcctgcaggtttatgtcctcacttgttttacacctcacagaggtcagcgaagcagggtatcaccaaagccccacctgatgtctctggaaatcgagtactccgtgtcttcaccaggcccatgccagctgtgaggggcagaaccaggttttctgacaccaaaccccaggtttcttcctgtgctggcatgggtcctttttctgacttggccagcagcctctcatagatgggggtctgattaaatagttctggtgatgggtggagtgatggttgcacaacaatatgaatgtatttaatgccactgaactgtacacctgaaaatggttaaaatgttacattttatgttatgaatatttcaccacaataaaaaaaagaaacaaatatggat

SEQ ID NO: 216824 - DNA, 413 bp, Homo sapiens
gccctcggcgtggcttctctccagccgggagtcccagggccagctagcctcctcccctaaaggggacggcctgtcagcgcagtgccagagtccagcaccgggaggaaagtttcggagtgcggagggagttggggccgccggaggagaagagtctccactcctagtttgttctgccgtcgccgcgtcccagggaccccttgtcccgaagcgcacggcagcgggggggacttcagccctccaggcggggtgggttccaggtccgggtccgaggcgggcgctggaggctcggccccaggccggagaggaactcctttcgcgagctgtcgccgtgggcccgcattgtctgcaggaactctccggaatcgggagggggaggactggatcgcgcttccactgggattcgtcaagagttc

SEQ ID NO: 216825 - DNA, 939 bp, Homo sapiens
cgagggaataagtgtattttaaagcatcccaggtgatggcaatgtgcagccaaggttaagaatcactgtttcatagaatcagggaagaagtcagagaaattgggaaagaaaataaactttagtacttagtgaccaaatacaggaagcaatacgggactctgagaacacagagtttgaaatttggggctaggcgcagtggctcatgcctgtaatcccagcattttgggaggccgagacgggcagatcgcccaaggtcaggagtttgaagccagcctggccaacatggtgaaaacccatatctactaaaaatacaaaaattagctgggcatgatggcgggtgcttgtaatcccagctactcgggaggctgaggcaggagaatcacttgaacccgggaggcagaggttacagtgagctgagatctcaccattgcacgacagagcaagactccatctcaaaaaaaaaaaaaaaagaaatttggaagtaacctaatatttagtctttcccacttactttatgaatgtaaagttaagttacttcttcatgtcctacatctaataagtggacatcacttcttcccacacatgtgtttacacatgcgtatacacaatttctccccactacttcctttctgtaattgtaatattttttgttggacaagagcaggacacttgtactatcactgacaaaagttggaaaggtagattattgtattgagtatacactggtgagtttagttgttgattggttcagtttgagaaaacaggtatttaaaaaggagattatttttatataaacttaggaataaagaaatggtattcaggtatgaaattaggaccacattgagagtcattaacaaaaagggacaagttaaaactataaatgtggcttaagaaagaatagaggacatcagagggttgagggctgagtcttgaaaagca

SEQ ID NO: 216826 - DNA, 429 bp, Homo sapiens
gcttacccatatcagaatgtcttgattttataatactccagaacagttgttttactaggtagggtagtagattccaaacaaagtgaggaagtgtaatttctagtgtgaggatagtagttttaattatgtattacattatgaaaatgaagagaaggagtgaaagaactcagtttatggattagacagtggatggatgacagcagtatcctttattgcttgcacctaagttggggcctgactgtgttaggagggaggagagattggcattggtgagaaggcagtggggtagagcagctctgtagcacttgagacaaaacatgcctgtggtgggccttgatatactctttgattcaagtagggtggtgtatctatttcattcacattaccttgtcataaaactcctttgggaaagttaacaagtttttgtct

SEQ ID NO: 216827 - DNA, 782 bp, Homo sapiens
gagggagggaggctgtcaggagaatactggggaggaagacttgggtctccaaatgtctgattctgttatccactgtggcagcttcaaagagataaacagaaaggcaaacttgaactgctggaaatgaaaagcccctggaggaagcagatctgaatattttataatgagcagaaatagctcatttctttatgtcctgacctatacaaaacttatacccagtattttcctaaagaagtctgctcttcctacactgctacctgcaggatcatgaagctctggctatgaagacccttgggagttacggtagttcactgttatctttgtccacaaagttgggacataaagagaaaattaatgtttaactccaaagaaatgtaaaactgtcttctagtgggacagtgtccaatttaagtttccttacacatttgcctaagaatagcgttggttttcctccccttttcatctgcaaacagtatgatgcttttgaaaattaagactcctttgaacgctggagtcaaattgacaaaatccactttgtctaaatcttttgaagtcagacttttgtctcttctctatcccaggcctcttataatggcaatctataaaatacctgctaaaaactctgacttttaaaagttgcaaactcgaagtcctgaaaaggaacagaaggcttgggttgatagggccagttctactgctgggtttgtgaactagtcattagacctcattgccggtttcccagccagaccttctttcctgtcatccttgggagagaattcgcc

SEQ ID NO: 216828 - DNA, 446 bp, Homo sapiens
tcatcggaagacttgagaacttggcttctctatcccacgaatgttatgcagtcatcttcccagcatcctgcaggacagacctgcttatgccatttgcagtacaaacaaagtactatctatctgaaattgagcagcaagtactttaacttcacgtacctctccttctgaaaatgccatcaggatagctcagcccataccaagcttctggtacttctctagtaccccaaagcaagtaattcatgccctaaggcattagcatccttgaagggaatgttgccaagacaaggccacttctgcagagcagataccttccccagaggggaggcgtccaaagtcttgcctcaaacgtaggaatgttcaggaagcagtcatggacagcgagatcatcaagtcccttaggaataagtaaactcaaataaaataaaaataaagtgattttccctttt

SEQ ID NO: 216829 - DNA, 335 bp, Homo sapiens
acttattagctgggtgacatgggcaagctgcttaaacactgtccacccttggctgggtgcagtggctcacgcctgtaatcccagcactttgggaggctgaggtgggcggatcacctgaggtcgggagttcgagaccagcctgaccaacatggagaaacccggtctctactaaaagtacaaaacattagccgggcgtggtggcacatggctgtaatcccagctactagggaggctgaggcaggagaattgcttgaaccccggaggcggaagttgcggtgaggtgagatcatgccattgcattccagcctgagcaacaagagtgaaattccgtctca

SEQ ID NO: 216830 - DNA, 412 bp, Homo sapiens
agcaagaatcgggaaagaacgatcaatgcccttcccccataaggttgacagcaggtgggagatgctttggattggctgtcagatcagaatttcggatgatattggataaatattttaatgcctgaaagtcagtcttaatgaccacattgagacttttcttgtaagtagaagtgcttggagagccatagcatctttccaagttgtcatcaagaggtgaggggacatagatagggcaaaaggttgtgcaaggtgatgggtaggaagacactaaaatttcaggagagcagaaaatggcagtcagacaaggctggcacttccatgcccctaagcatgggcacctccttccattttgcaccatagacacctcacttgccttaccttaatcagccctgcattcagccacaaagacacc

SEQ ID NO: 216831 - DNA, 425 bp, Homo sapiens
cattggcaaaaggggctttactctcctgtaaaaccgtgacttccttggcagggcatataaaaaagaagggttatagccaaaacagaataatatggatataactgtattataagatgtatttcaagaagaatgcatattttttaattagctttattttctatccatatctgactttcaaagcaaaatttctagagtagtactgattaataccatagtcactagcctcatgtggctattgaatgcttggaatctgggtagtctgaattaaaatgtatgttaagtgtaaaatactcagggtgtttcaaagacttagtacagaaaaggaatgtgcaatatcacattaatgattatcttgtatttgttatgtgttgaaatgataatattttggatatgttggactaaataaaatatcttattagaactaa

SEQ ID NO: 216832 - DNA, 393 bp, Homo sapiens
gccctagcaagtgagcctccccagcttggcctctcaaatccatgtctgaactcacccggctgtcaagtgtcttttccaaatctgaccaactgttcccttctctcctgaacagttgttgcttttacctcttaatctttgcatatgttcctcactgggtcacacgtgtaccatgacccaggattacagagaagatgctgtcatctcctgtccttctgtcccaccctcttgaggtaccggatgttagcagggccgtagacacacaggctcacctagaaactgtctaaggggtctcttgctgctcgctcactatttatcttatttttttgagatggagtctcactccagcctgggcgacagagcaagactccgtctcagaaaaaaaaaggaaggaaa

SEQ ID NO: 216833 - DNA, 768 bp, Homo sapiens
gcttccctgcatcagaaagggaaagcacagggcagaatttcattgcagcaaggagtagaaaggtgttgtccattggtttttaaaactaatgactttctgtcagaatctgtttgagtgctgctaaaaaaaccaaccaaacaaaaaccagtgacttttaaagacagagacagcctttggttgggggagtcctttagagttgtcttgtacactcccctctttttagtggggctcccctcgtgggactcctggagctctgtcccatacagcagccacagccagttgtggcttttgggcactagacacgaggctagttttagttgagatgggctgtgaataaaacccacgccagattttgagacttacttctgaaaaaataaactttcttgctaatttttttttgagacagagtcttactctgtctctcaggctggagtgcagtggcgcgatcttggctcagtgcaacgtgcacctcccgggttcaagtgattctcatgcctcagcctcccaagtagctgggactacaggcaggtgccaccatgcctggctaagttttgtatctttaatagagacaggatcttgccacgttggccaggctggtcttgaactcctggccttgagtgatctgcctgccttggcctcccaaagtgctgggattacaggtgtgagcctctgtgcctggccaactttcttgctaatatgttttatacagattacatgttgaaatgatagtattttacatatcttaggttaaataaactatattttaaa

SEQ ID NO: 216834 - DNA, 523 bp, Homo sapiens
catttccttgtgcttgaattattcatattatctacaatctaatgtctctttgcaggaatcttttaaagatcatgtgctcatttttttgagggctagtttagcttaaattagataatataagccataaatccacttcactgggaacatcttagctgaaatagacactctaaaatatgtgagatgaagagtgtcactatcaatggttctacatcatagaactctcctcactctaccatcaggataaatagcacatggaccaaggaaaggtctcagtattaattcatgtactactagtaaagcttaatgttttagataacaataaatataacaaataacatatcaaaagaagttctgaatttaaaaattagccaggcatgatggtgtatggagcccgtagtcccagctactagggaggctgaggtgggaggaccgcttgagcccaggagtttgaggctgcagtgaattatgatcataccactgcactccagcctgggtgacagagcaagactgtctcaaaagaaaa

SEQ ID NO: 216835 - DNA, 871 bp, Homo sapiens
  misc_feature (266)..(266): n is a, c, g, or t
gggccaggtcagaatcacgcctcaatcccagcattttgggagccgaggcaggtggatcacttgaggtcaggagttcaagaccagcctgggcaaagtggcaaaccccatctctacaaaacattccaaaaatagttgggcgtggtggcaaacacctgtggtctcagctacacaggaggctgaggttagaggctgcagtgagccgtgatcataccactgcactctagcctgagtgagagagcgagaccctatctggaaaaaaaaaaaanttttttttttaagattttctttcacacacacacataacttaagaattaccagaatgacaaatgttcacacatagttggtagcgttcgaagagtcaagaggagcggacgtattctctaaggagccaggagaaagtctgtttgcagtgtgttcattttctccctagtaggtcttgtcattgccaaccaatctggtgaactatctcctccttcccaaacccagaagctggattctttccggtatacctttagaattttaagccttaggcagaaaggaaaaacatccctcagtgacatgctattaagggagaggataaaacatgtgtagagtttgtggtatataagagaattaaggtgacatgtgttacagatcagtttgactttcactatggatgacactattgggcttagtctccatacttcatggtattatactgggggctaaagttacaaagatgtatttaaagaatagacttcaaccatatgtcagaagactgggaaattaatgtatatttatatattttaagttaaaattaaattttataggtgtgtatcaacttgtatcattctcaaacctaactgacttttgtgatttacttgcctggtta

SEQ ID NO: 216836 - DNA, 445 bp, Homo sapiens
agcaggtgagagattacaaccccttgagggtcaaggtaacaaggcatgttggaaacattcctgactcccagtatcttattgtttacaaaggatatttctattatttagatactcatatgacattgatttttgttataaactactattcaaaacagtaaaataaattcaaagcaaataattcatgatttgagataggatggacataattctcatcattgctagtgaatatagttaacttcagtaatagaaatggctattcttttatgttacagtaattttgttggcaatgcattatacacgaaataaaaatcacatttctttagaggcatgttagcattcaccaaacaataactgtacttctttttcttcttgccagcaccatgcaggatactgagactaccaggcacccactcactctctacagtactcttactaaagagaccaa

SEQ ID NO: 216837 - DNA, 341 bp, Homo sapiens
gttttctgtattgcataaaaataaaagctaatcgctttggaagtacacgacctcaaaagttatatgtgctgaatgtaacctacttagcgattttttttggttctttaaagtggatttatactctttagccatattttctgatatatttacttgtacgtttatattagatcaacatgtataagaataagtaattcagaagtattgcctcagtaaatttacctgctatctgtagcttttgacagtatactttctttttttttgtttgagatggagtctttctctgcattacttgagcccatgagttccagaccacctgggcaacatagcaagacctcatctca

SEQ ID NO: 216838 - DNA, 303 bp, Homo sapiens
taaaacacttcagatgtggcttgacctattttaaactacaaggaaagaaggaggaaactggatgaaggtgaggcaaggtaaatatattaaacccagagacactacacaaatcttttcattccactgagacatggatggccactgattcttgatctcctttgtttggaggtaggagggcagaagttcaaattacagatttgtccccacctttcttttgagagttccctaacttatgtgaagtatgatttgcttagttggactgtatattttgtcagtttcatggaaaaagcactgatttctttg

SEQ ID NO: 216839 - DNA, 386 bp, Homo sapiens
acttagcatgacttacttataaaaaatattatgatttgccatatataagtctagtatattgtttagtttagaaaatgttgcatgttgagtatgtattttattgttggttgagtgttcaaccaaccatcagttaagacaaactagtttgtagtgttgtttaagtcttctatatccttgcagattttctgtctagttgttgtatgtattgagaatagagtgttaaaatctccaccttctattgttgagctgtcattttctctcttcagttttgtcagttttcctttcatgtatgtagtctcctgtttttaggagcatatacgttcattgtagttatatttttctaattaacttgcccttttatcattaaataaatctctttttcttta

SEQ ID NO: 216840 - DNA, 162 bp, Homo sapiens
caacaaaacctgaaaccccatctctacaaaaaatacaaatattagctgggcatagtggcaagagcctataaacccagctactccggaggccaaggtgggaagattacttgagcctgagaggctgaggatgcagggagccaaaattacacaactgcactccag

SEQ ID NO: 216841 - DNA, 204 bp, Homo sapiens
aatgtaagtgcaaagaacttaaatatatgattgtgtaagatgatagtcatttagaacaacattttttaaatttctgaaaaagtgaggccgggcacagtggctcacgcctgtaatcccagcactttaggaggccaaggcaggtggatcacgaggtcaggagatcgagaccatcctgactaacaaagtgaaatcccgtctgtacta

SEQ ID NO: 216842 - DNA, 411 bp, Homo sapiens
acatagaaagaggaacatcactggggacttaccgtgtgtagggcttggctctaaactctccacaccttttacgtatttgatccttacaacctgagctggattctgtatgtaccctcattttacagcagggaaaactgaggctcagagagggtaagcaacttgcctgcggtcacacagccaaaaagagaccaggatgggagccagccaaggtagcttgactcagaaactcacacatgtacaccacagctgtcacacacatatgggcacataacagagtggacacaaacacacacacacacatttgcacgcacgcacacattaacacccagcgaaagtctgggtgcagtggctcatgcctgaaagccagcactttgggaggccggggcaggtggattacctgaggtcaggagt

SEQ ID NO: 216843 - DNA, 355 bp, Homo sapiens
aatctgccagcgccctggtattggacttcttagcctccagaactaaattcctggagtcaccagaagctgaaagagataagaaatggattctcgcctagagcctcaggaggggacacagccttgcatacatcttgagcttggacttctggcctccagaaataagcatgagaggcagctaagtcaagtgagggcgatggctgggctggaagcactggtgcctttccctgacaacaggaggccacaaaagccatttcatcatcatcatccacccaaacatcaaacataaatggataaggctgcatatcgataagtatcaaataacctgtaaggaatattaaagcataatcaactagca

SEQ ID NO: 216844 - DNA, 338 bp, Homo sapiens
tgacgctacagtgcctggagctgggctgttttctcctcggtttggagcctggtgaccgtgacttccccgccatgttctgtgtgttgctggctggagaagggtagttgacaaactccgacccagcacagtgtttctgtgggtcaaaactagaaaactatgtccgggctccgccgaggcggaaggatcccttcaggccaggagttaaagagcggcctgggcaacatggcgcgactccatctctgtagtccctcctcagcttcccagatacttgaaccccaaggttcaaggctgcaatgagctatgatcccatcacagcactctatcctgcgagactgaag

SEQ ID NO: 216845 - DNA, 521 bp, Homo sapiens
tgcctcagctagttccctctagccttttacaaggcactaatccattcatgagggctccaccctcatgacccaaccactaccccaaaggctctccctcctaataccatcacaatgggaattaagttgcaacaagaatttaggaggggccactttcaaaccgtagcaatgatatataatcagattttcctgtggttatataatgaagcagatattcagaccaaggaacacattgcatatctattttaaaactttaaaaccaattttattggttgtaaaactaattttgaagtggttgtaaagacacaggaggctgcaaatgtaatgtacagagaagtccatgtacccttcatccagttgcctttactgggaacatcttgcataactacagtacagtaagaaaaattggagaaccgacataagtaaaatacacagagcttactcatagttcaccagtttctatcttttaaataataattatgtttgtttaaactctactttagatcacaaccaatcaccctgtg

SEQ ID NO: 216846 - DNA, 460 bp, Homo sapiens
gggtgaggaactggcttatgcctgtaatctcagcactttgggaggctgaggcaggaggactgcttgagcccaggagttcaaggctgcagtgtgctatgatcacaccactgtattctagcctgggtgacagtgagattctgtctctatttagaaaataaatgaataaaaacatattttttaaagaaaagggtggccgtgcacagtggctcacgcctgtaatcccagcacattgggaggccgaggcgggtggatcacctgagttcaggagttcgaaaccagcctggccaacatggtgaaaccccgtctctataaaaatacaaaaactagccaggcggatggtgggtgcctgtaatcccagctactcgggaggctgaggcaggagaatcacttgaacccaggaggtggaggttgcagtgagccaagattgtgccattgcactccagcctgggcaacaggctca

SEQ ID NO: 216847 - DNA, 598 bp, Homo sapiens
ctacttaaagaatcagagttgacattgtttaggttttgctttaggagacactccttcaggtaaaactggggaatggagataaacttccttttctaaaatagttcaaatgggtttgtgaaaggaaaataccttgggcccccaaaatcactaaggaaaactcaagctggaaactgcttaggacaaacctgcctcccgttctattcagtcactcctctgctcactgagatagatgcatatctgatttgcctcctttggaaaggctaatcagaaactcagaagaatgtaaccatttgtatatcacctatctgtaacctggaagttccctgtccgcttccagtcttcctgttttggcttcaagttatcctgcctttccagactgaaccagtgtacttcttatatatattgagtgatgtctccctaaatgtctaaaaccaagctgtgctcagaccaccttaggcacgtgtcgtcaggatttaatgaggctgtgtcacgagcgtgtcctcaaccttggcaaaataaactttctaaattaactaagacctgtctcagattttctgggttcacattttggtaaccacaggggggatcctgagtggag

SEQ ID NO: 216848 - DNA, 202 bp, Homo sapiens
attccattagtatcacttacctgggaagtccaggtgccttcaatagttgaggggagtaaatgatatgactacctaccttcaaaacttgtagtttaaagtggtaacttgaatactcacatttacctctgtttccttcctctaaaagaatggttttttaaagggtaaatccacagggacaaagaaaaggagaggaaaaccagca

SEQ ID NO: 216849 - DNA, 923 bp, Homo sapiens
cgaactcctgacctcaggtgatccacctgccttggcctctcaaagtgctaggattacaggtatgagccagcacacctggccaacatgtttttgtcattgttcgtaatttttaaatggcttcccaaacattcagaagtgactaaaattatttattttgtggtgacagaggttttgttgtcatgccctaggttaggtgtatcccctcagagtatcactgcccgtgctgtgctgaagagcagtgagagtgagggcgaaattcacacctgtcttaaaaatgcataccctctgcaaaaagttgggttttcctttaatgtaatcggcactagcgactcagtttcactgtgaggcccccgggcgattgtgaaggtaccaggcgatggtgttgctggcccagggcagcttctgcagcagtgcagggagggctggccaggattgtttagcctgtgcctgtttcctcacgttttgtgtgttgacagagcatgatctaaacattttatcagtttctttttcatttacgtaaattaggcagtagggaaatctcagctaactaaggtctttaaattttatttggatgaacaaaaaatgtaatcagagggaagggaactcattttcctcgagggtcagaggcaggaatcagaaaggctttctagggggtgggcctggcctctccggttgtctgtgaaattgagacaggtatgggagtctagaaacggagttgcatgtgtgtgattcctttcagttactttaattggatctctggttatccttgaactatccccgaatttaaacagttcttcatgtttgagatatagaagcatcttaaggagcctggggactatgggcagggcctggcataagctatttgtatgtttaaaagtggtatataatagtattaaattgggatataaagtagtgttaaaaca

SEQ ID NO: 216850 - DNA, 544 bp, Homo sapiens
agttaatcacatctgcaaagcccctgcctccaaataaggtcgcctgcccaggtgcggagggtgagggtatggacagatctttctggagagccgtaactcaacctcctgggtgccaggttctgtgcaggcaccttatgttctgtttcctcctccgtaaatggggacacgggtgcatcccacgaggcttcgtaagcatcagaggagcgggttggggtgatggcctgagcagcgccctgcggctgcaataaacacctgcagattggatggttattcagagcagggcctcattctcctccaaggtgacccagggtccctcttcacaggagaggaaacagagactctgaagctccactcagcctggcgtggtggcacatgcctgtaatcccagctactggggaggcaggcgggaggatcgcttgagtttgaggctgcagtaagccaagattgtgccactgccactccagcctgggagacagagcaagacctggcattacaaaagagagagagagagagagagagaaagaaagaaaagaaaagaaaagaa

SEQ ID NO: 216851 - DNA, 707 bp, Homo sapiens
cctgtgcccatggaggctgcagtgcagttggaaaagcagaccaaagggaataaacgtgaacaagataattgcaaaatatagtaagtactgtgaaacaaaccaatagattctgggagaaactaaaataagaaggagcaacttttagtggagacatccaggaggcgtctctgaagaggtgacagcaaataagttacgttttgggaagcagaggggagaagagggtattgggtaggtgaagaagcgcgacagcccatggtgtgtttgggtgatacaagtgagccaccattgtctgatggaaagggactggaaaagaaactggattgctgtaagaatgattttgaatgacattggggtttttctggtttgtttttgtttttgagatggagtttccctcagttgcgcaggctggagtgcagtggtgcggtcctagctcactgaagcctcaaattcctgggctgaagtgatcctcttgcctcagcctcctgagtagctgggactagaggcatgcgccaccacactcggcgaattttttatctttttgtagagataggttgtcactgtgttgccgaggcttgtcttcaactcctgccgtcaagcaatcctcctgccttcaagcaatcctcctgccttagcctctcaaagtgttgggattacaggcatgagccttacgcccagcacataattttttttttttttttttgagatga

SEQ ID NO: 216852 - DNA, 878 bp, Homo sapiens
gtgccaccctgaacacccccgacctcgtctcatctcagaagctaagcagggtcgggcctggttagtacttgcataggaaagcaggagggtccccacgccagagggaggcctgcaaaggaagcgcggaattgggatgggctcgccactgctctgagccagaggaagggtctggacggccgagctggagggacccccttttctggtgttcttggcaaaaaaaaaggaagacagcagaggagagctccgcgaggggctgctgtggggtcgggggagagcgcgctggagattagaagaggagccatgtcagaagaaacagtaagtgaatcacagttttccttgaagacagcagcgctaagagtgtttgatcttcctctgacttggtactattctctctcccagatcaaattttctccggtggctaaaaagttgtttgtggtaactgcagtgagtgctatatctgtaatttttctggctcatcactttaaaagaaaacgtggaaagaagaaaggaaaaatattaccatgggaaccagagcacctcatacttgaatacactaaaagagcagcatcagacaaaggttcaagttgttccagtagcagacagaatttgacattatctttaagttctaccaaagacaaaggatctcaagtttgtaactatgctaatggaggacttttcagtaaatattcaggttctgcacagagtttggcctctgtccagagtgtcaattcttgtcatagctgcgcttgtggcaattctaattcctgggacaaagcagatgaagatgatattaaacttgttaatattcctgtgactactccagagaacttatacttaatgggtatggcagtgttgaagaggcattgcgtcgatgggac

SEQ ID NO: 216853 - DNA, 691 bp, Homo sapiens
aggactccgccttctccatgtcagactgctgctcagcgccaggcatcagctgggaagctggcgtgggcaggccagctgtacctggcctggagctccagattagaagaggagccatgtcagaagaaacagtaagtgaatcacagttttccttgaagacagcagcgctaagagtgtttgatcttcctctgacttggtactattctctctcccagatcaaattttctccggtggctaaaaagttgtttgtggtaactgcagtgagtgctatatctgtaatttttctggctcatcactttaaaagaaaacgtggaaagaagaaaggaaaaatattaccatgggaaccagagcacctcatacttgaatacactaaaagagcagcatcagacaaaggttcaagttgttccagtagcagacagaatttgacattatctttaagttctaccaaagacaaaggatctcaagtttgtaactatgctaatggaggacttttcagtaaatattcaggttctgcacagagtttggcctctgtccagagtgtcaattcttgtcatagctgcgcttgtggcaattctaattcctgggacaaagcagatgaagatgatattaaacttgttaatattcctgtgactactccagagaacttatacttaatgggtatggcagtgttgaagaggcattgcgtcgatgggac

SEQ ID NO: 216854 - DNA, 571 bp, Homo sapiens
gctcttaaccacaaccacacttctcctttcttactctcagatatgacctcatgaactccttcacttagaaactagagatgggaattcttgcacttttactctccttcaagtgtttctgtatattgttacctatctctctccttccttattcccaaggttaattggttacctctactcttcccgttcccttctgaacttttttctctgttatcttcacttcctcttatatctgtcttctgtctttccttcttcgttgactcaagtatcttctattctgaaaaataccttctctgctctatttccctgccattgcacatttgactcttccttctctttactgatggactttctaaaagagatgtacatagaaagttctacctccactttttttagccaactgcaactgggtcattagttggactctactacctcagctcaactaattttatatgcatccacttcttttcagcccgcatcctgtctgccaagttatgatactactgatcatttttcctttggcttccataatacgctatcctaatttttcttctaatttttgggttgctcttct

SEQ ID NO: 216855 - DNA, 404 bp, Homo sapiens
atccctggagtctctctgaatctgctgtgattctggaggctgcctgatttgtgaattgttcattgctcaattaaacccctttaaatttaattcggctgaagtcagtcagtctgtctttttttctttttctttcttttcttttcttttctttctttctttctttctttctttctttctttctttctttctttctttctttctttctctctctctctctccttccttcctttcttccttccttccttcctttctttctctttctttctttctttcttccctttcttctctctctttctttctttttctttctttctttttccttttcctcttttcttttcttttgacaaagtgtcgctcttgttgcccgggctggagtacaatagcacaatctcagttcactgcaa

SEQ ID NO: 216856 - DNA, 431 bp, Homo sapiens
ctgtgtatacatctgccccttgtcaccagtctttaatcttattttacttgaacatttccttgtgtctacgtagtttatatatttgtaaaatgttctcatatttctagcctcttcattctcagttctgtgtatttgagttgtttccaataatgtctcagtaatacaacagtgatcttactattttaaaaaagattttactctcttggggtatttcccatctttgaaactgtagggacaaaggttaaaaaacgtttctgtatcttctgtaacattttgacagattgcttgccagaaagattgggctatcagtatgtagatgtatctgtttcacaatcctcttgtcattttatttacttttgttcatttagcatgtgaaaattggcactagagactagtgttaattccattttctttacaaattgatattttac

SEQ ID NO: 216857 - DNA, 230 bp, Homo sapiens
ttggctactgtgcctccaaaaagaaagtaacagacttagtaaagacttagaagaacaattatgaaaattctaatagaatacttttctcactgggaaagcataaaacaatcctatctgtttatctagaaagatgaaggctgagaagggctataatcaaagtttataaaatcgagccagggaggaaagtactagttcattatgagcaggagcccttcccttcactttcagga

SEQ ID NO: 216858 - DNA, 510 bp, Homo sapiens
ggctggagtgcagtggcgtgatttcggctgactgcaatctctacctcccagtttcaagcgattctcctgcctcagccttcctagtagctgggattacagacatccgccaccatgactggctaattttttatatttttagtagagacagcatgttggccaggttggtctcgaactcttgacctcaagtgatcagcctgcctcgcctcccaaagtgctgggattacaggcgtgggccaccacacctggcccattttcattttatatgtaagaatcaccacatgtatgtgacgtatttattataaattatattgactttattgagcctcccagactcgttggtatttctcactggtcacccccaactcttaacttatagtgcccctttttattattttttgagacagggtctagctttatcacctagtctgggtgatcatggtggcgtgatcatggctcactgcagcctcaaactcctgggctcaagtgatcctctcacctcagcatcctaag

SEQ ID NO: 216859 - DNA, 469 bp, Homo sapiens
ctgtgctacagctcagtatgggtggtggtggggtcagcctattaccaccctgacacccgttaggttagaggactgggggtccaagcacatgctatggtataccatcacccagagaggaggagccgatgggcaggaggctcgggggcctggagcagccgtcccagctaaccatcagactcccaccagccctgaaattgggcccctggacagtggacccgagatggccatcaagaagagctccttcctgggaggaggacaaaggcccctgggcaggtacgatgtacctgctgcaatgtgtgagggcggccccacactacccacaggtactgatgtcacagagcaacggctgaccatggaggactgaggggatcttacaaaggaactctgggcctcatctgactttattaagttgattacattgttgtctggccaacgggcaagaagagctgtggtcagagaataggccatg

SEQ ID NO: 216860 - DNA, 114 bp, Homo sapiens
taactaatacatgagaaaaagagaaaaaaaagaccccatcttgcttaaggcactgttattttctattttctgtcacttacaactaaatgtgacaagtcccttctccagttaatt

SEQ ID NO: 216861 - DNA, 315 bp, Homo sapiens
gatctgcccacctcagcctcccaaagtgctgggattacaggcgtgagccaccaggcctggccacctctttgtatctttaaacaccagccagtgacctccaggaccctggggtggacttcagggagggaacacaccccaatttgtttggaaatttgggcatccactttttcctggtgctaagacccctttctaatgggttcccaaaaagacttcataatccctggtctaaatgtttttcgggaggcatttggcttagttggaggataccctgatgctgggaccccaacattagaggttgaaaggatggtagcccag

SEQ ID NO: 216862 - DNA, 421 bp, Homo sapiens
agtgccaggaagatgaaactgaatgtcctggatgcccgctttgcttaattactaattacgttcgttcactcgaagccactgcataagttgcccacagccacctgcagggcctctttagtgcagagaaaaacatgcctaaggcttttctccatttgaatttgttttaagtcatctgcatgggctgacgtgaaatagcaagtgaacaaaacaagttgcagaatggagtgtgtaaagtaatgccttctttgggagaaaaggtttctttctctacggctccactaatgtctgcaagtaaaaatactgatcagctctacggagtggaaatgaagatggggaacttacgctttttatttcattcacgtctacattgtttaatcactttaacactttaaaaaataaatatgttcacttagtatcttta

SEQ ID NO: 216863 - DNA, 992 bp, Homo sapiens
ctttgatgaaactgccactaccagttcatttaagttttattcttttccatgctgcctttgccctatgtctcagacttcaatgcatggaccaaaagacctttccagtaataaactcttgagatgcttagaattattgccaccctttgatgcctttctactttacttaaaaagaatattctcttttcctgtgattaattctttctcatttctcattttttccttatccttcaagtaaacatacccacaccttattcatcctcaaagcctagccagacactcctgaatctttagatgtatacatcttcagatcaggtggagaaccccatctgtacttagttataaaggaacacttcaaatcaccattgactgtcagctatttatttctgctaccaagaccaatatatgttttttatttcataaagatttttcatagcgagtataaaaactactttgtaattaatgccctcctaaatcaccagttcttcttctctttctgcattctgggctcaaaactttgttggggaaaatggagaaaaatgaagactttacctgccaaaaagcatggtgccaaaccattgatgtgtacctgccatagttacccactttttttttaatcaggaaagaccttattaacacattcatccccaacctctccattacctggtgatctagtttgtgaatgaagatgttcaaaggtgttgattgttttttagtttttgttacaggtctctcctttgttgcaccttaccaagatttccagaccaatggcttattcttattgtctcttttatttattgcttagtttctcctcatttcactgagaagtgccttcaaattctgttgaattccctgaaattctatgaaatctatagatttttcttaacttattctcctgatatttttgcatctgaaagaaaccaaagtacttagttaactgctagactacaaggtgaagtggccttcattgcatatcccagaaagaatccagagca

SEQ ID NO: 216864 - DNA, 411 bp, Homo sapiens
cagaccaaagcctcgtatccagttaggagcaggatcagaattcgaacccaaagccagctgactccttgttctggtcaacacggttggtgctctcccgtgcaggatttcactcgtccatttagtgtaataagatggagagacgacagatggaggttcgattcgctactccgtcatttactggcccggccaggtgctgtcaggagggttaattcatgtctcagatcttagtttcctcatctgtgcaatgggataacaatggttcctccctcgtgggtggatatgaagtttaagcggggtcatgtggacaaaatgcctggcacagcgagtgcatagtaagccctttttttgtttttgttttttttgttttgtttgttttttgagactgatttttaagactgtcttaaaaacaag

SEQ ID NO: 216865 - DNA, 417 bp, Homo sapiens
agaaattgcataggagggccgggctcacgcctgtaatcccagcactttgggtggcccaggtgggcagatcatgaggtcaggagatcaagaccagtcttgccaacaaggtgaaaccctgtctctactaaaatacaaaaaattagtcgagcgtggtggtgcacacctgtagtcccagctactcggaagcctccacctcctgggttcaagcgattctcccacctcagcctcctgggtgtctgggaccacaggcctactgccacaaaaccgcctgcctcggcctcccaaagtgctgggattacaagcgtgagccaccgtgcacagccctgtagtttttattttaggagattcttaagcaaaaaagcctgaagcccagagaattaaatctcttaaagagaatggctagattaaatgagaaaa

SEQ ID NO: 216866 - DNA, 467 bp, Homo sapiens
agtccatttttatgcatggaaaaaggtatcattctggttttatttttctgttctggttatggatattcagttttcccagcaccattttttgaaaagagtgtccttttctcaatatatgttcttggcaccattttacaaaatcaattttctgtaagtttgtggatttatttttgggttctctatttttccattggtctatgtgactctttctataccagtacatatggttttgatatagttttgtagtatattttgaagccagtaagtgtgatgtcactagctttgttctttttgtttagaatttctttggatattcttttgtcattccatacaaactttaggatttttttctctatttttgtgaacatagaaattgcactgaatccgtaaattgcttaggtagtatggccattttgataatattaattctttgaatccgtgaacatggaatattttcccaaaaaaaa

SEQ ID NO: 216867 - DNA, 427 bp, Homo sapiens
tttttttaaaaaaggccaggcgcagtggctcatatctgcaatcctaacattttgggatgccagtaacattttgggatgcccactggagtgggcaacatagcaagacccatctctacataattttttttaaaaaattagccgggcgtggtggcgcgcgactgtagtcccagctaccatggaggctgaggcggaaggatggcttgagcccaagaggtggaggttacagtgagcgagactgcctcagaaaaaaagaaaacacgagcattagaacaaatacctaatgtatgcggggcataaaacttagctgacaggttgataggtgcagcaaaccaccatggcacatgtatacctatgtaacaaacctgcatgttctgcacatgtatcccagaacttaaaagtaaaataaaagaaaaaaaattgaaatgta

SEQ ID NO: 216868 - DNA, 605 bp, Homo sapiens
atgcatcatctaccacgcagatcaaataagccttagagtggttttatactccaggcttgtgtttctctcatattcacccaagaaggccagaactaaaacctacatagcattcaggcaaatccttcttgcccccagagcattgaatgtcccctccaggttactgaaatcctctgcttcaccccattactttccctaattagggtcttatctcccactcagtagagctgctttctgagccccatgctggtcccccagtttcttcagcttttatatacaggacaagttttcaagtcttactaaattcatatatagtcaataagtatttattggacttttacctaatatgtgccaggcattgtggtaaatacgtagtaaacaagacaggtattgtctgtgttcttatggagcttacagtctagcagagaagacaggcattgagcaaacagttacaactgtgacaaacttcagaaaaaaagacaaatgcaagactgtgggcacataaaatgagaggagataagatgggggagcagggatcaagaaaggcaccccagagggcaagtaggatagtatgggacgtagtgacgcggaggacatgagcaggtgtc

SEQ ID NO: 216869 - DNA, 630 bp, Homo sapiens
ccgagctctgtgctttggagtcagatctcatttaaacccagcagcacatcccatttcacacgtgggaaggtgggggagtcaggatcagagagcagggtgtcgcatgggggagcagccgggctgcgatgtgaaccctacagtctgcccatgagccgcactcctgggctggacactccagagccttctcaagcagctttcttggggctccctgagcacctggctggatgctgctggtctggaactctggacgggggccccgggagctgacctgcaaagctgtagagcgactgtgaggcactggcagctttgcagcccctctggacccagggtggggtgggctgagcatctggccttctgggtctatctgggaggcagggctgtctcagatctggggccttctgagaaagatgtcgaacccaagcttccttggggaaggaggcagatggaccccagatcactctcctgggtgtgaaatcagctttgggggtgccttcggggtcgggcagaactgggctcacccagctctcgccttttctggctgtgtcacttgggtgagctcctgagcctctctgtgcctcggtttccctgttgattaggtcaggccaaggattaaatgatggcaaagtcgta

SEQ ID NO: 216870 - DNA, 212 bp, Homo sapiens
tctttaagacaggctcttactctgtgtgccaggctggagtgcagtggcacaatcacagctcactgcagcctggacctcccgggttcaaacaatcctcctgcctcacattcctgaagagctgggactacagttgcgtgctactatgaccagctaattatttttattttttatttttgtataaacaaaggtctcactatgttgcccaagctggt

SEQ ID NO: 216871 - DNA, 623 bp, Homo sapiens
tgtgaaaaggtgttactggtccatctgttggaggtggcacaagcctgaccagtgttaggggattcgggcctctgccccctcttcaggggagtgtgcactggtgccagagccacgttgtctcaaagacagcggtgcccctcgtgacagcgctgcctggctctccaaggccctgacccaagggagtggctctaagtctagtggagtctctgcttctttgaaaaattcagcttctaacactgccatcacacaccaggtactcttgccctcagctattccgctccagaaaagctaactgctgagagccaaaatagtaagagcactgctgagaaagaggtttttaaaaccagcgtgcacctaaaagaggggaagaaaggccagtcctttcttttcaggagcttcgtgttttatcatttctccctcccgcgacataatgaaatactagcatccgacggatcttcttagaaagcatactagagacccagagacgttattactctatttcaaagcagcaatgtgcatgtctgcacacatttcttagaatcatgtgatgaaaagaagacccttcatgaaaaatatagacccattaaatcaaaatgtgctttttgaaatacaaagatgctata

SEQ ID NO: 216872 - DNA, 403 bp, Homo sapiens
cagtgattttgaagattccctcattcccagtattttaggagctaatggctttggtcaacaacagtcttttcctttaggaactctttggagaaccatgatacctttagtggctttcacaagatcactgatgtcactaaatgtttccatagcttgctcacccctaccttagtccacatgacagaaccccaggacctcagtcctgatgtccgtaagaatcactggggagattgttggccaagcaggtttctggccaaattatgaagatccagatgcagtaggtatggtgctggcattaggggcaaaggctcaaaaccaaggaatcagaggaagaaactcctcagggcaggaggaagcagaaggcaccacgatggcacccccagaggctgcagtgacttccctgctg

SEQ ID NO: 216873 - DNA, 280 bp, Homo sapiens
gtattctatttatatcttatttttaacatcccctgctcccaaattagtcattactattatcatttaaaatagatgtatccatgttgagccaactgtctttgttccatatagttttttgtataatattgtttcatttaggatcaaagtacaaccttaaatagttctttcagagtctttgagtaatcaactctctaagtctttgcctttgtaaaaatatctttatttcttctttattataagacatatttactgttggaaaataacttagctgggtatagaa

SEQ ID NO: 216874 - DNA, 514 bp, Homo sapiens
ctagctacattttgtattagcttcaaaaattgtaatagattatttggaatattctatgcacacaattatataatctgcaaataggagcaggtttttttgtttccaatttgtattttgttttcttttgtgcgtgtacatgaaatctacaagcaatctgtatgcttttaatcattttttgcctgttgctttggcttgtattttcagtgctgtgttgaataagagtggtgagagtggacattcttgtcttcatcccaatgttatggttaaagcatagtcttttgctgttaagtatgaagttatctgtaaatgttttgcagatgttctttatgaagtgggaagtttttatttctagtgggctgtaagtttctgtcatgaatgggtgttggatttgtcaaatgctttttctgtgccaattgtatggttatacaatatttctgttatatatatatgttgatgtgatgaaatacactgattaagttttaaatattaaaacaaacttttgtactggaaaaaa

SEQ ID NO: 216875 - DNA, 111 bp, Homo sapiens
gaattttagaatttttatgctgtgttgtgggattataggattataaggtattttcttttctcctcaaaagcaagaccttaccgtttaattgaagagctcaaacagctcaag

SEQ ID NO: 216876 - DNA, 225 bp, Homo sapiens
gtgttcacttttacccatttttttttctttctgtattgcagtttggataatctcaactatcttcaagttcactgattcttctgtcaatcccaatctgctatgaaagcccttctagtgaatttttcatttcagttattgtagtttccaatgacataatttctatttggttattttgataatttttatctttattggtattttttatgatgagacattattctcata

SEQ ID NO: 216877 - DNA, 216 bp, Homo sapiens
aagtgttggaagtagtgggctagaaaaagctatccaaataaaaattctaaaagcaactggggaggttttattacaacagacaaattaggctttaaggacccgtatgagatggtagaaacattcaccaggaagaagaataattctgatcttatttgcaactaacaggaaagcctcaaagtgtaaaataaaaaactaagacccataccccacctccct

SEQ ID NO: 216878 - DNA, 460 bp, Homo sapiens
gaactctgatatagttgccatatttagcaaataaaactacaagatgtccagctaaatctgaatttcagataataaacaataacttattaaagtaatacattattagtaacttatttattatttatctgttctcgaatgtaactgggcatcttgtattttatctggcaccccaaatctcagagaaagttagacagcgagatatttggggaacacattccaggcagagggacagcatttctgctggggcagaattctcaggagcagagggaagagcaagagtgaagacttgagttctttgagaaacttctaggagggaagtgcagctggagtgaagagaatgagggaaacagcaggagaagatgagttcagagagattgtggggaactattaggttagtgcaaaagtaattgaggtttttacaatgcgatgccaccttactcccggaagaatggccataatc

SEQ ID NO: 216879 - DNA, 413 bp, Homo sapiens
ggggctcctgggcaggacctgggcttctcttcctcttttgctccctggcagcacctggtatagggtcagcacacagtgctgacatcccctttgcttcaaaaagcccaccccctacaacacagacaaacctcaaaaacatgatgctgagcaaaagaagccagacacaaaaggccacatattgcaagactctgttcctatgaaacatctagaagacgcaaatccatagagacaaagagtacggcagaggctactgggggtgaggaaaagggttgggagttgttagttaatgggtgcagtttctgtttgggatgataaaaaaaattctggaaatggataggggtgatggttacacacattctaaatgtacttatgccaatgaactatacgcataaaagtggttaacacagaaaatt

SEQ ID NO: 216880 - DNA, 1010 bp, Homo sapiens
gagacaaacagttgcattcttctgcgtttctgattagcctttccaaaggaagcaatcagatattcatcgatctcagtgagactctgaaaagaatggggggcaggcttgccccaagcagctgccagctggaattaatgctgacattttaatccagcaacgacaaacatcaaattcagacaacatgtatgctgacaattttgaaggcatttctatttttattccaccactaattttaaagctagcttgtttactaaagttatacttgagtcatgtgaagttgaaaattgcttagacttatttacttaatttatgagcactcttttacttataagccaatttggtagacacaacatataacaataagtgtacatacaaataaacacatctagacgtgtatacacacacataaatgaagacccaatagcttggaaccttagctgtgagattgcagtacaagctcgccggtttgactttgccccagtaggtaatccaaggaaggctgggaaccaaaatttcgggtaaagcagtctcaacaaaggctaaacctcccgagactccaaggagcactggagccaaacagtaccaaaggagggtgtcacgttaaccaggccccctgcttagaacagcagcacaaaaccctggatccatgcgacgccatcccactttcccattagacagtaaacttcagattctaaaaaatttgggggccaagcagcattgcaaccgtgagagaaaattctaaggagggcttattactagacctcagaacctctgctgagaatgtcctctttgaagagcttgaggtccggaggatcccctgaagtgtccttctgtggggtccaatcttagagctccaaacgtctctggccttaggtgggcaccggtgccgctctgcatgtgttccctccagcgcccactatgagctttcctttggtacctgagtgtaatccctgacttttagcatccttataatttcataaggccatgcttttccctgcttcctgttccat

SEQ ID NO: 216881 - DNA, 484 bp, Homo sapiens
aatccgattcagcaaataaccccacctctccaagccaggactccagagctgccctgtgtggtgtctcagcaaggaaagccaacaaagctggtagacacaggcagaccgtagcccaccgcctgtgagtggaggctccgagccgacttcacctcctcctcagagggaccggcccgatccgaaagggcggtctccaggggtccccatcccgcaccacgcacacagcctggcgcaactaaagaggaagtcggatgtcacatccaacggataaataaagacagcccggccacacaagagccgcattctgggcaggactcctgctaggtttggggaggggtcccagtctgcgatcctttctccctcttcgtgcagcgtcctcctccccggggcccgggccggcggcgcccacgcaacgcggcgcggtgcgagtcccgagagcacctcgagcccccggccccctccccagccccgccgggcccgcggccgc

SEQ ID NO: 216882 - DNA, 508 bp, Homo sapiens
taggtatatacccaagagaaatgaaaacatatgtccacacaaaaacttgtacacaaatgctttatagaagcactacgcataatggcccaaaactggaaacaacctaaatgccctgtgactaatgaatggataaataaaatgtggtatatccatacaatagagtatcattcagccataaacggaatgaagtactgtacatgctactacatgcattaactttgaaaacatgctgagtgaaagaagccagtcacgaaaggccacatagtgaatgattccatttacggtattcccccttatccatagaagatacattcccaaacacccactgaatgcctgaaactggatagtactgaaccttatatatactatgttttttcctatacatacatacatacatacatttaacttataaattaggaacagtaagagattgacaataactaataataaaatagaacaattataacaatatactgttcgtttcacagaagtataagatagttcttac

SEQ ID NO: 216883 - DNA, 508 bp, Homo sapiens
tgacatgaaaggccctgttggcctgtggacatgcgtggtggaaacccgggagacagtgtgaagcagggctctcacctttgtgtggtgcagttgacgttttgatggctctctttggcgggaggggctgtcctgtgcgttgcaggatccttagcagcacggtagcatccttggacctactcactagatgccagtagcacacacctcccctcactcgcggggtcgtcatgacaacagaagaagtctcctgacacagcccctggggagtgggggtggggaggctgcaaatcgcccccaggtgagagactcactggtatcgatggtggggacacaggctttggtcctcagagagctgggtttgtgttttaactccgctgtccactctgagtcatttggggcaaatttcttaacctctttgagccccccgtttccacaccaataaaatgggaataatggtaaccacacccacctcgtggttgctgtgagcattgaaggaatgagtgcacataca

SEQ ID NO: 216884 - DNA, 1924 bp, Homo sapiens
  misc_feature (1488)..(1488): n is a, c, g, or t
  misc_feature (1490)..(1490): n is a, c, g, or t
  misc_feature (1493)..(1493): n is a, c, g, or t
  misc_feature (1570)..(1571): n is a, c, g, or t
  misc_feature (1594)..(1594): n is a, c, g, or t
  misc_feature (1636)..(1638): n is a, c, g, or t
  misc_feature (1643)..(1643): n is a, c, g, or t
  misc_feature (1648)..(1650): n is a, c, g, or t
  misc_feature (1652)..(1652): n is a, c, g, or t
  misc_feature (1656)..(1656): n is a, c, g, or t
  misc_feature (1658)..(1658): n is a, c, g, or t
  misc_feature (1660)..(1661): n is a, c, g, or t
  misc_feature (1674)..(1674): n is a, c, g, or t
  misc_feature (1692)..(1692): n is a, c, g, or t
  misc_feature (1701)..(1701): n is a, c, g, or t
  misc_feature (1708)..(1708): n is a, c, g, or t
  misc_feature (1720)..(1720): n is a, c, g, or t
  misc_feature (1730)..(1730): n is a, c, g, or t
  misc_feature (1773)..(1773): n is a, c, g, or t
  misc_feature (1781)..(1782): n is a, c, g, or t
  misc_feature (1784)..(1785): n is a, c, g, or t
  misc_feature (1789)..(1789): n is a, c, g, or t
  misc_feature (1797)..(1797): n is a, c, g, or t
  misc_feature (1801)..(1801): n is a, c, g, or t
  misc_feature (1899)..(1899): n is a, c, g, or t
agcggacggcaagtcggaggtagcaagatggccgccgctgaggaaggctgtagtgtcggggccgaagcggacagggaattggaggagcttctggaaagtgctcttgatgatttcgataaagccaaaccctccccagcacccccttctaccaccacggcccctgatgcttcggggccccagaagagatcgccaggagacactgccaaagatgccctcttcgcttcccaagagaagtttttccaggaactattcgacagtgaactggcttcccaagccactgcggagttcgagaaggcaatgaaggagttggctgaggaagaaccccacctggtggagcagttccaaaagctctcagaggctgcagggagagtgggcagtgatatgacctcccaacaagaattcacttcttgcctaaaggaaacactaagtggattagccaaaaatgccactgaccttcagaactccagcatgtcggaagaagagctgaccaaggccatggaggggctaggcatggacgaaggggatggggaagggaacatcctccccatcatgcagagtattatgcagaacctactctccaaggatgtgctgtacccatcactgaaggagatcacagaaaagtatccagaatggttgcagagtcatcgggaatctctacctccagagcagtttgaaaaatatcaggagcagcacagcgtcatgtgcaaaatatgtgagcagtttgaggcagagacccccacagacagtgaaaccactcaaaaggctcgttttgagatggtgctggatcttatgcagcagctacaagatttaggccatcctccaaaagagctggctggagagatgcctcctggcctcaactttgacctggatgccctcaatctttcgggcccaccaggtgccagtggtgaacagtgtctgatcatgtgaaacacaacacgttttcctctctgagtcccagctatggggaacatctggagtcagcagaaccattgggacctgaggcaggagtgtcacctgcgggagaagtctgcccgctgccctctgtcatcccattcaagattgtgccataccagctgaggtttttcctctgtctctctaggaatagggtctgtttcacaggccatttctgtgaaccctactccattgtggtttctgccactatcaaagttccagctacctgcaaggtgaaggaaggcatcccttttggggcatgcactttctttcctttctcaaaataatgttatatgtggccacactgatgttcacctttacgtccagggtctttgtgccttgtctctactccctctcttggatctggggaggaggggcagagacctgggactctgtatttctatagttctcctggcagagcctttgagaatggggagaaacagcctgggctggggctacaggtctgtcactatgctctcttgccttcagacagaccattctgaattctctaaagggaaagggcttttgcaactaaananaanagagttgaaagagaggccttaggattctcctctctctaggtgctgagccctcacctccctgttccaggctgagaacnnaaatggttaccctgcttcttccnacaatgctgtgtgatatgggtgaacccagcccctgaccaacnnnaaacnccaannnanccancnannaaccacctctctntattaaacacctgtttancccaacctntttgagntcaagctgtganaaagaagggnccaaccaatttcccctcaactagtccatttacgattctcactnactccccnncnncctngcagacanaaanaaacccagtgtcaggtctaggaaattaatggctattcttccccagaaacattctggcttatttgagatacatgattctcttagaatcctgtcccttgnttcaggaaagtagcttggaaaagga

SEQ ID NO: 216885 - DNA, 2314 bp, Homo sapiens
  misc_feature (1878)..(1878): n is a, c, g, or t
  misc_feature (1880)..(1880): n is a, c, g, or t
  misc_feature (1883)..(1883): n is a, c, g, or t
  misc_feature (1960)..(1961): n is a, c, g, or t
  misc_feature (1984)..(1984): n is a, c, g, or t
  misc_feature (2026)..(2028): n is a, c, g, or t
  misc_feature (2033)..(2033): n is a, c, g, or t
  misc_feature (2038)..(2040): n is a, c, g, or t
  misc_feature (2042)..(2042): n is a, c, g, or t
  misc_feature (2046)..(2046): n is a, c, g, or t
  misc_feature (2048)..(2048): n is a, c, g, or t
  misc_feature (2050)..(2051): n is a, c, g, or t
  misc_feature (2064)..(2064): n is a, c, g, or t
  misc_feature (2082)..(2082): n is a, c, g, or t
  misc_feature (2091)..(2091): n is a, c, g, or t
  misc_feature (2098)..(2098): n is a, c, g, or t
  misc_feature (2110)..(2110): n is a, c, g, or t
  misc_feature (2120)..(2120): n is a, c, g, or t
  misc_feature (2163)..(2163): n is a, c, g, or t
  misc_feature (2171)..(2172): n is a, c, g, or t
  misc_feature (2174)..(2175): n is a, c, g, or t
  misc_feature (2179)..(2179): n is a, c, g, or t
  misc_feature (2187)..(2187): n is a, c, g, or t
  misc_feature (2191)..(2191): n is a, c, g, or t
  misc_feature (2289)..(2289): n is a, c, g, or t
agcggacggcaagtcggaggtagcaagatggccgccgctgaggaaggctgtagtgtcggggccgaagcggacagggaattggaggagcttctggaaagtgctcttgatgatttcgataaagccaaaccctccccagcacccccttctaccaccacggcccctgatgcttcggggccccagaagagatcgccaggagacactgccaaagatgccctcttcgcttcccaagagaagtttttccaggaactattcgacagtgaactggcttcccaagccactgcggagttcgagaaggcaatgaaggagttggctgaggaagaaccccacctggtggagcagttccaaaagctctcagaggctgcagggagagtgggcagtgatatgacctcccaacaagaattcacttcttgcctaaaggaaacactaagtggattagccaaaaatgccactgaccttcagaactccagcatgtcggaagaagagctgaccaaggccatggaggggctaggcatggacgaaggggatggggaagggaacatcctccccatcatgcagagtattatgcagaacctactctccaaggatgtgctgtacccatcactgaaggagatcacagaaaagtatccagaatggttgcagagtcatcgggaatctctacctccagagcagtttgaaaaatatcaggagcagcacagcgtcatgtgcaaaatatgtgagcagtttgaggcagagacccccacagacagtgaaaccactcaaaaggctcgttttgagatggtgctggatcttatgcagcaggtaaggcctcttgccttctgcccactggtgctgtccacttaggtgttcagtgaaggaagtatctgggaaggatgcaatactgctagacctaggtggaggagggatcctctcttgtgatctctctcagaagaaatagagagatcattcattagattcctcttctggatcctctgttgttttctgggcttttctctatttcatgttccattttccttattttctagctacaagatttaggccatcctccaaaagagctggctggagagatggtgagtatgtcttatttttccagattttaatttgagtccccaatttccagaattctttaacctctcaggattccacctaaggtgaaaattgtggctactggggatggatcttcacgtctgtcctaaaaaatgagcaactatctgagtcccttcatctcttccccagcctcctggcctcaactttgacctggatgccctcaatctttcgggcccaccaggtgccagtggtgaacagtgtctgatcatgtgaaacacaacacgttttcctctctgagtcccagctatggggaacatctggagtcagcagaaccattgggacctgaggcaggagtgtcacctgcgggagaagtctgcccgctgccctctgtcatcccattcaagattgtgccataccagctgaggtttttcctctgtctctctaggaatagggtctgtttcacaggccatttctgtgaaccctactccattgtggtttctgccactatcaaagttccagctacctgcaaggtgaaggaaggcatcccttttggggcatgcactttctttcctttctcaaaataatgttatatgtggccacactgatgttcacctttacgtccagggtctttgtgccttgtctctactccctctcttggatctggggaggaggggcagagacctgggactctgtatttctatagttctcctggcagagcctttgagaatggggagaaacagcctgggctggggctacaggtctgtcactatgctctcttgccttcagacagaccattctgaattctctaaagggaaagggcttttgcaactaaananaanagagttgaaagagaggccttaggattctcctctctctaggtgctgagccctcacctccctgttccaggctgagaacnnaaatggttaccctgcttcttccnacaatgctgtgtgatatgggtgaacccagcccctgaccaacnnnaaacnccaannnanccancnannaaccacctctctntattaaacacctgtttancccaacctntttgagntcaagctgtganaaagaagggnccaaccaatttcccctcaactagtccatttacgattctcactnactccccnncnncctngcagacanaaanaaacccagtgtcaggtctaggaaattaatggctattcttccccagaaacattctggcttatttgagatacatgattctcttagaatcctgtcccttgnttcaggaaagtagcttggaaaagga

SEQ ID NO: 216886 - DNA, 1814 bp, Homo sapiens
  misc_feature (1378)..(1378): n is a, c, g, or t
  misc_feature (1380)..(1380): n is a, c, g, or t
  misc_feature (1383)..(1383): n is a, c, g, or t
  misc_feature (1460)..(1461): n is a, c, g, or t
  misc_feature (1484)..(1484): n is a, c, g, or t
  misc_feature (1526)..(1528): n is a, c, g, or t
  misc_feature (1533)..(1533): n is a, c, g, or t
  misc_feature (1538)..(1540): n is a, c, g, or t
  misc_feature (1542)..(1542): n is a, c, g, or t
  misc_feature (1546)..(1546): n is a, c, g, or t
  misc_feature (1548)..(1548): n is a, c, g, or t
  misc_feature (1550)..(1551): n is a, c, g, or t
  misc_feature (1564)..(1564): n is a, c, g, or t
  misc_feature (1582)..(1582): n is a, c, g, or t
  misc_feature (1591)..(1591): n is a, c, g, or t
  misc_feature (1598)..(1598): n is a, c, g, or t
  misc_feature (1610)..(1610): n is a, c, g, or t
  misc_feature (1620)..(1620): n is a, c, g, or t
  misc_feature (1663)..(1663): n is a, c, g, or t
  misc_feature (1671)..(1672): n is a, c, g, or t
  misc_feature (1674)..(1675): n is a, c, g, or t
  misc_feature (1679)..(1679): n is a, c, g, or t
  misc_feature (1687)..(1687): n is a, c, g, or t
  misc_feature (1691)..(1691): n is a, c, g, or t
  misc_feature (1789)..(1789): n is a, c, g, or t
agcggacggcaagtcggaggtagcaagatggccgccgctgaggaaggctgtagtgtcggggccgaagcggacagggaattggaggagcttctggaaagatgccctcttcgcttcccaagagaagtttttccaggaactattcgacagtgaactggcttcccaagccactgcggagttcgagaaggcaatgaaggagttggctgaggaagaaccccacctggtggagcagttccaaaagctctcagaggctgcagggagagtgggcagtgatatgacctcccaacaagaattcacttcttgcctaaaggaaacactaagtggattagccaaaaatgccactgaccttcagaactccagcatgtcggaagaagagctgaccaaggccatggaggggctaggcatggacgaaggggatggggaagggaacatcctccccatcatgcagagtattatgcagaacctactctccaaggatgtgctgtacccatcactgaaggagatcacagaaaagtatccagaatggttgcagagtcatcgggaatctctacctccagagcagtttgaaaaatatcaggagcagcacagcgtcatgtgcaaaatatgtgagcagtttgaggcagagacccccacagacagtgaaaccactcaaaaggctcgttttgagatggtgctggatcttatgcagcagctacaagatttaggccatcctccaaaagagctggctggagagatgcctcctggcctcaactttgacctggatgccctcaatctttcgggcccaccaggtgccagtggtgaacagtgtctgatcatgtgaaacacaacacgttttcctctctgagtcccagctatggggaacatctggagtcagcagaaccattgggacctgaggcaggagtgtcacctgcgggagaagtctgcccgctgccctctgtcatcccattcaagattgtgccataccagctgaggtttttcctctgtctctctaggaatagggtctgtttcacaggccatttctgtgaaccctactccattgtggtttctgccactatcaaagttccagctacctgcaaggtgaaggaaggcatcccttttggggcatgcactttctttcctttctcaaaataatgttatatgtggccacactgatgttcacctttacgtccagggtctttgtgccttgtctctactccctctcttggatctggggaggaggggcagagacctgggactctgtatttctatagttctcctggcagagcctttgagaatggggagaaacagcctgggctggggctacaggtctgtcactatgctctcttgccttcagacagaccattctgaattctctaaagggaaagggcttttgcaactaaananaanagagttgaaagagaggccttaggattctcctctctctaggtgctgagccctcacctccctgttccaggctgagaacnnaaatggttaccctgcttcttccnacaatgctgtgtgatatgggtgaacccagcccctgaccaacnnnaaacnccaannnanccancnannaaccacctctctntattaaacacctgtttancccaacctntttgagntcaagctgtganaaagaagggnccaaccaatttcccctcaactagtccatttacgattctcactnactccccnncnncctngcagacanaaanaaacccagtgtcaggtctaggaaattaatggctattcttccccagaaacattctggcttatttgagatacatgattctcttagaatcctgtcccttgnttcaggaaagtagcttggaaaagga

SEQ ID NO: 216887 - DNA, 438 bp, Homo sapiens
aagagcaaagtaaacaaacaagaaaggccgtggatcttggttgatgccaacagatgccgtgtcgtgaagatgctctgaaggaaagacgttgacggggtctcctcactctcctgggcccttctgactagtgactgtcttctcactgctgctgctaccagtgcccagtttgttgcctgaagccaaaagctgaaagctcacataatcttttgaagagtactacataagtaaattgagttctcataatgaagaatagctgagtaaacactgccacaccatgtggctacatgcatttcctaagattaaaaacatttgcagtcacagaaacagacatgggataggaaacacaggtctattttattttgtgggttttgaaattaagccaattgtttacagtaaaggcgctgaagttctgcagattaaaagaatgaattaaatgta

SEQ ID NO: 216888 - DNA, 309 bp, Homo sapiens
ccagagtgagacaggagaggtaataaagccaggttgggcaggctttgcaggacactgtcaggcttttagctattactcttgaactcttttgagcagagaaacaataggatttaaactaacattttaacaatctttctttctttctttctttctttctttctttctttctttctttctttctttctttctttcttcctttctttattgagagggagtttcgctcttgttgcccaggctggagtgcaatggcaccatctcagctcactgcaacctccgcctcccaggttcaaatgattctcctgcctcagc

SEQ ID NO: 216889 - DNA, 205 bp, Homo sapiens
cctgacacttcctctggtcctctctgtcctccctgggctcagacccccaaccttgcaaggggacaatgccccctccccagcccattcctgctgagcagccatcaagactgagaaccaagggccgtggagtgcccagttctccgtacctcctctcctggacacggctcaccttcccagcagctcccatgggcagccctccagcctc

SEQ ID NO: 216890 - DNA, 329 bp, Homo sapiens
aataaccaaatgctattccttttggcctgttacctcaaacctaatatgctaaaagagcatcctcatcctctacggcttgaattccttaacaaattattataacttatctggcaacaaattatatcaaacccaggtaccatctctccacaactctcccttattggagtcaagagagaggtgagggccaagggaggaaggaaatttactttatgccaatgcattggaattaagaaatatcaaggtgatttgaactgatccaggaggcttgtattagtcttgttcttatgctgctaataaagacatacccaagactgggtaacttataaagg

SEQ ID NO: 216891 - DNA, 255 bp, Homo sapiens
tgatgtgtattacattgatatctcataatactttatatcaccttttagcatttattttattattttagattgttttttcaacttagagccacgtgctttagaagattattatgtaacttgacttaaattctggtaggttaaacctcttcaccatctttttatttgaaaaatgtcttcttgaaatgtcttattcgatcactgggctagaaaatacaagatgagactgagacatcttgcagtgctcaaaataagaaa

SEQ ID NO: 216892 - DNA, 485 bp, Homo sapiens
atggaagtgttaatatcatgaatgcatttattcaaacactttttcagctctcacaaagttttgttataaagacgattttatttcctctcacagcaacatacagaaggagcagctgttattgcccttagtttacagatgagaaagttgagacttaaagccattaagaattttgtggtagcaaagaaggatcctgtatttggtaaatttgggtgtaattatgagtttaatgtatgcctttttggcagtatcctttctggcttcatcatgctatatccccattgtccacaacattgactggtgcttagtaaggtgctcaaggacgcatcaaatgaatgaacaaagactagagacagagttgcctggccttattctttaaatacccacactataggactgcaacaaaatacagagccctagtgattagaagacttcaaaagtgtgttttctttttccaggtgcatgcctttgatttcttgagatgatga

SEQ ID NO: 216893 - DNA, 243 bp, Homo sapiens
tcagtttcataagtaataacttggcttatatgcattgaaaaagagtggaagggtgtatgctaaaatgttaataggacattagctcaagtagaagaaataactcttaaaccaaaaatagaaataactcttaaacaagagttattaagagttaagaaataactcttataccagtaaatagaaagtatttgacacttacatttatacatttgctcactcattcatttgttttttttactttaaaga

SEQ ID NO: 216894 - DNA, 430 bp, Homo sapiens
tgtaaaacaccgaggctcaggggagtgaaggaagacttgtcagcaaaaaggaaaacctagtgaagactatcgttggtcttgctccttttatcaaggagtagaggggctggggtcgcctcgggaccccacagcgacccctcttgctctcttcgcggatgaggcgcaggctgtcagccggaaggcctggcggcgtccagacgacttgtttgccttatgttgtaatcaataaggaacgccggcctaggaatcaggctgacctgggatccagctccgctcctgtgatgtcctatttaaatgtgtttaatcctcccttacaaaataaaaataattgcggctaccacttttgacatctgctgcattaaagatacttcagagtcggagttggtctgcaggaaggcgaagtaatgtttatggcagtattcatgtgtgt

SEQ ID NO: 216895 - DNA, 611 bp, Homo sapiens
tgtaaaacaccgaggctcaggggagtgaaggaagacttgtcagcaaaaaggaaaacctagtgaagactatcgttggtcttgctccttttatcaaggagtagaggggctggggtcgcctcgggaccccacagcgacccctcttgctctcttcgcggatgaggcgcaggctgtcagccggaaggcctggcggcgtccagacgacttgtttgccttatgttgtaatcaataaggaacgccggcctaggaatcaggctgacctgggatccagctccgctcctgtgatgtcctatttaaatgtgtttaatcctcccttacaaaataaaaataattgcggctaccacttttgacatctgctgcattaaagatacttcaggtatggtattacctcgtttaattattacaataattcataaaataggtattggtgttcgttttgcattagaatgcaggcttggagaggtgaagttacttgtctaaggcaagcaaataataagtataagaagagccgggcaccgtggctcatgcctgtaatcccagcactttgggcggggcgctgatactgagctagtgtgtgccgctggaggctgaatttggtgagctctcttaaccca

SEQ ID NO: 216896 - DNA, 192 bp, Homo sapiens
tgtatgtacacacatgcacatgtgtatatgtgtatataaaatttttgtcatgggagttttatatataattaagatagaaattatatattattgcacacatttttacacatatgtaatattctctaccatatgtatgtaaaatacacccatatgaattatgtataacataaatatttgtgttatcctgaaaca

SEQ ID NO: 216897 - DNA, 504 bp, Homo sapiens
gaaactgaattgtgttttgtccataaagaagatgaaattgtctacagagaacacattgccattcacaaggttgaggggataccacagagaggctcccactgtgatttgcatttgtcaaaagttctagagaattcttcaacagtacacacatggttgttttaaatatatcattgttataaaaattcgttttgagttctgtttcacagaaagtttttttgaatgaatgaatgtcatatatccttgctaaaggagctcagttaaaaaaaaagggaccatccttctcttttgggggttgtacagtaacacattcccaagaaagaggtaacagccacatacatttttcttcccaataaagagtgtgggtttttaatatgaatccatagtatgatttctgttatgttttgtgctgcttcataaccacactcatgcacttttcagaaaattaataccattcattagcataaatcataaactattcccttggtatgggtttgaaattggggg

SEQ ID NO: 216898 - DNA, 851 bp, Homo sapiens
cctgataggacccatattcccacagcactaattcaacatataccttactgagagcatgttttatcattaccattaagaagttaaatgaacatcagaatttaaatactccttaaccaaatacggcttggacttttgaatgcatccaatagacgtcatttgtcgtctaagtctgcattcatccaccagcctaggcctcctgtcttaatttcatacagacagaaatgactcccactggggaaagagcaaagcaatacatgtagcactctttttcaaacactggtctttttttttttcttaacaatccaacattgttatgtgttttgcgtctcatattgacaccttttggtcaaggtagaggacatgtttgttgtaagctttctttttcgtgtagaggatggattcttcactcctgatacacacaatcagtgcacagcagctctcttatacatccagttgatgccttcagtctccctggcttcttacaagcatcttctgggccttgtgtgtccctgggcacctgtccctggtcaattcccgaaagctactgtgctcctcttgcccatctccccttgcaaataatatcttccatcgggggaccggcttcctccaatttcaggagaggtggggctgaaggcacagacttgggcgtcactggcacagatataagtaaatacagctggagtctgcagagaggctggactgagtcagggagtcaggaaagagaagccacacacaaggacaaccaatcatgtttctcataatcttcttaacctagggaataggacacaatcattttttctttttaaaacatctttatccctgatcagcctcatttcctcaaaaactataaa

SEQ ID NO: 216899 - DNA, 873 bp, Homo sapiens
tttgtctttttgtcccatttggtggaagaatctgtgatccctccttagggtctgcttctctttctctctctccctatcctttttgcaatggctcgttcattataacccgtgggggatttagaatctgtggatcatgtaatgcatttcctgattgcctacaatttttatcttctttgctgttgattttaattgtgaatatctgaaaaagtatagtgctcaacaagtcagaagttgaaaatcatgtttggtatatgtgatagacctgtccatggctcctgaaagttgaagccaaagggctaccttctgagtcaaaatgtgccctgagaaccaggtcctttccctggtgcaaccagggccttcccctactcataagctgagaaagacctggggtctgaggaagaactgctgacccagagcaactccaaagtggtatctcaagcatctctggaaggtagtggggagaggcttatatgttgaagttattccattgctctcagcataagactatgtgaggggagggaaagtaccgctgtaagctctgtatgaaacaaatccctatcaggcaaacgctcccgactcgcatttctgcaaccccacgtttgcatctgtctcataagcatgtatcatatcaggatcttattgacatacgcccagaagaacatatgtggagagtgtagctctgaaaatttatcagcaaaggtgtgtttccgataggagtctcagttcctctggagtcattatatttgctgtagattcaaaaggtaaaaatgaaattcaatttttaaaaagatatgtgatacaatagtaagtcctaatgcatgtatgttgttttggacagattagaacaataaaaatcttaatatcttgaaaaaa

SEQ ID NO: 216900 - DNA, 533 bp, Homo sapiens
gagcaaccaacatttattaaggactggcagcgtgcagggccctgtgtggagcctttccatacactgcctcattcgatcctgagatgtggtagcattggtggtgtgtaattttcataccctccgagcttctccgaggctgccccaggcccttggttcctcgccctcagccctggtggtggcagtggccctggagggctacccatgcggcaggggagcggccagcagatggctccaagccaaggcagaacggctcaggaggggtggccagccaggcttgccagtgggccttagtttcccctgctgagcccacagtgcccttttggctgggctcattttccctggagcatccatgcagccaggctcctgggcagatgccggatgagtttcccggggctgccataatgaatcaccctaaaccaggggcctcaaaacaacacacactgactctcccacagttctggagacgtccaaagtcaaggtgtcggcaggacgcgttccttgtggaggccctggcggaggatctgttccagcct

SEQ ID NO: 216901 - DNA, 543 bp, Homo sapiens
gaattggattaatcataatgcgtggtgcatgatacactggcatttttggtccatgaaaaaaatattcatctatcataatgaacagccgttagcccactgtttgcccaagaacttgaatattaccagtaacttacatgtacctatgtggtacttcccattcactttcctgcctgctctctcagaagtgaccaccatcttgaattttgtgtttattattctttgctttaaaagaatgatttttgaactttatcaaaatatggctgagtgtggtggctcatgtgtgtaatcccagcactttgggaggctgaggcagcaggatttcttgagcccaggagtttgagaccagcctgggcaacatggcaagacctcatctctacaaaaaaatttttaaaaattagccaggtgtggtggcatgcacttgtggtcccagctacttaggaggcttaggaggaaggattgcttgagctcaggaggttgaggctgcagtgagcctggttcgtgccactgcactgtagccagggcgacagagtgaaaccctgtctc

SEQ ID NO: 216902 - DNA, 99 bp, Homo sapiens
gcttatgatttctaaatttcccataatgaacacattaaagtaaaaaatacatttaagtatcactcattcgtcttcttccccgattgtcggtgacttcag

SEQ ID NO: 216903 - DNA, 342 bp, Homo sapiens
tgtggctaggagaggctgggcagtgagcctggactagagacctggccttggccaggctggagaagaaagtgacagtgaacagtaaccgcggggatggcagttgtggtgatgacactaggagccaggtgtggtgcaagtgctttacacttatttattctattaactgacacaacagtttcctgaggtaggaacactgtcacctccattttccagggaagaagatgaggccctgagggcttaaatgacttaccttaagtcagacacttgaagcaataatgaaacactgagacataaaaactgtgaaggtgccaggcgcggtggctcatgcctgtaatcccagca

SEQ ID NO: 216904 - DNA, 342 bp, Homo sapiens
taattttaggtaattaatgctgtacctcacatagttaacatttttgtggtgagagcacatgacattgtcctagcattattcaaaaatacattattattaactatagacaccatgctgtacaacaagtcttttgaatatattacttttatctaactataattatgtattattctttgacaaacatctttctaaagccctcttttagataccttggcatctggtggttacaattttattctgtgcttcagtgaatttaagttttatatcattcatgtttaggtgaaatcataaaattttctttctgttcctggcttattaaaagataaatagataaattttata

SEQ ID NO: 216905 - DNA, 337 bp, Homo sapiens
cagaaaggggagagggacctctctgagttctctttataagggcactaatcccattcacgaggactccaagttcatgacctaatcaccttccaaagtttctacctccaaatatcatcacatggggcattaggaattaatctgaatttgaagggtacacaaacattcagtctattcacctagtttcctgatacctagtcctttgatttttctgcttaaagaaggaccaaatgttttagccatggacctaactctttccagcattttattctaaggagaagaaacaaaaagagagtacctgggccacattagattaggatacatggtaatttaaatgggc

SEQ ID NO: 216906 - DNA, 169 bp, Homo sapiens
attctctggagttccacatttccctggagttccacatagaaaacaggcccaacttgtctctattttcagattccataaacctaggtgggggttggaggcatagtcccttttcttgtttttgtttgtttgattgttttaacaaacattttattctggaataattttagtt

SEQ ID NO: 216907 - DNA, 429 bp, Homo sapiens
cgggggaggtcctgcatgaatattttcagtgctgattcagaaagagcattgggcatacacttcaggaaaccctacctggaagctacagcagcactgctctatcctagactgaccacttcagatatttccaacgcggagctggatgtggctaggaaccggctcccagctgaatagcttgtgctgagtcattatcaagttgcatttcctggctcaaccaaagataagcagggaagaacctaaatgaaaaatgactttcagactgtgatttgggttagtataccacctcagggcagcaatggagtcatgactgcacagacacgggaaaggatctggttgcagaaaccaagtgagtcagtgatgatgtatcatcattctaaaaaacgtacctgtactttcttttttttttgagacgagtttcactcttattgc

SEQ ID NO: 216908 - DNA, 136 bp, Homo sapiens
gcttgataattgggcagcgttccaagtttcctccccttcttgaggtactttgagctcttttctgttggtagtctacatatgatcatctctgtgtaggtggtctgcataagactattggtttatatcttctgccatg

SEQ ID NO: 216909 - DNA, 231 bp, Homo sapiens
tgtggcatcctctgtgcatactgattttgcaaacctcttgggaaacacttaaagtgaaattctttgaacacatcaaaaaagtcagcataaacaaactaaaatccctgtgattcccaaaccctaaaaatattctgtgaccaatttcaaagtccccccctcccctccactttaaggttggtataatcctgcctggtcatagggagtgagaaaggagggtttcacacgttcgtt

SEQ ID NO: 216910 - DNA, 493 bp, Homo sapiens
aggctttgctccagtgtcatccttcacagtgaggcccaccccagtcattttattgaacatcgtgcctcactccagtattgttactccttatcctcctcctatgattgattttcctccattgtacttatcagtaaaatattatatattcctctttctatttattcctctacaatggaaggtttatgaaggcagggaagtttgttcactgtaactcagttgcctagaacagtgcttggcacacatatggttatcaataagtattagttgaatgaaaacaatgggctgggctagggctgtatttttgaacccaagttagttgaactagaaagttcctccttcccactaccccatgtcatttcaagaagaaccacagatataaactagactcgtgggaaccattgagttagaggcttttctaggggtatgagtgggagttcaaggaagggattccataaaacactccaaatgtgggtgattgacaaagtagtaccaa

SEQ ID NO: 216911 - DNA, 396 bp, Homo sapiens
ccactgcgcccagtcctggtagcgactttttatttctgcgaaagagaaatagtaggacacaaatagacacacacttggaactacttgaattttctaaacataccactgtagagactattatagtaataatgatgggactctcttatatttggggtgcattaggcagtttacagcatggtttcaagcaaattatgtctttagaatctcacaatatttctttgaggtcgtcagagctggcattgttactcccttcctccactccatttatagatagaaaaactgaagatccaagggcttatgtgagttgcctgggaactcatggccagtaagttgcagagctgtgattcaaattgaaatattgggatcggtcttatttgaaccctggtctggtgctct

SEQ ID NO: 216912 - DNA, 493 bp, Homo sapiens
tattctaggtacctcataaaagtgaaattataacatatatgcccttccgtgtctggcttatttcactaagcataaagtttttttatttttctctgagacggagtttcgctcttgtcacccaggctggagtacaatggcgtgatcttggttcactgcaacctctgcctcccgggttcatgcaattctcctgcctcagcctcctgagtagctgggactacaggcatgtgccagtatgtccggctaatttttgtgtttttggtggagataggatttcaccatgttgaccaggatggtctcgatctcctgaccttgttatctgcccacctcggcctcccagggtggtgggattgtaggcgtgagccaccgtgcctggaagcataaagtttttaagatttatccatgtcataacatatattaaagttggattcttatggctgagtaattgtatgtatataacacattttgttcagttgagagacatttaggttgtttc

SEQ ID NO: 216913 - DNA, 369 bp, Homo sapiens
accatgaggagctgagaagaaggtatatccttttgctttaggatagaatgttctataaatatccgttaagtccatttggctcatgacttctcttagtctgtcgacatcactgtttaatttctgtttccatgatctgtccattgatgagagtggggtgttgaatctcccactattattgtgtgaggtgcaatgtgtgttttgagctttagtaaggtttcttttacgtatgtaggtgccttgtatttggggcatagatatttaggattgagagttcatcttggtggatttttctttgatgaatatgaagtgttttccttaatcttttttgatgacttttagttgaaaattgattttatttgatattagaat

SEQ ID NO: 216914 - DNA, 336 bp, Homo sapiens
ccagcctgggcagcagagtgagaccctatctcaataaaaaacaaaaaacaaaacaattaaaagaacaaagaaccctgttacttggaaagtgttaggattttgattgacattgcattatatctgcagatttattcagaaagaatgcacctcgttaaaattctgtcttctatttcaatcatatccctagtctaatcagtactcatctagggaatgggagactcactggactagggatatgatgaatttgttattgatgcttgataaatagtcataagtatgttcatatacggttcttaacttgctgaaatatattattaaaagcatgtattaaaattg

SEQ ID NO: 216915 - DNA, 469 bp, Homo sapiens
tatatacgtgtgtatatatatatgtgtgcttatatatacatatatatatgtgtgtgtgtatatatatataactaatcccatcatgatggggaaataccctctttacttcatctaaatctaattacctcccaaaggcttacctccaaataccatcacattggaaattcaagttgaaacagaagaattttgaggaaacattaatagtaagcctatagcaaatggcaagacattattagtgagcacagctttcagacatgagtaagttttgaaagtttcaaaactattttgatgagaaaccttcccaaagtatttatatttgtgtacgtgggtaaggcagtgaatttaccttactcattattctttctaacattccacaagctgtttccattggaaatgcaaggtagttcattttcttttttctgagacagaaacattctggaaaagcaaataaagtatcatgttgaggatg

SEQ ID NO: 216916 - DNA, 621 bp, Homo sapiens
agagagagagagagaaagcaaggaaggaaggagggagggagtcagtgagtgagtgagttagttttcagtttactataaatttagtggtgggcacagtagcttgtgcttgggacactgaaacagaaggatggcttgaagtcaggagtttgaaaccagcttgtccaatggcgaaaacccgtctctactaaaaattacaaaaaattagctgggcgtggtggcaggcccgtggtcccagttactcgggaggctgagatgggaggatcacttgagcctgggaggtcaaggctgcagtgagctgtgattgcaccacagcacgccagcctgggaaacagagcaaaattctatcttaaaaaaaaaaaaaaaagacagtggtatttattgcagactattatggtattgtaggccagaggtggtaagggcttctcaaactgttgttttaagaacctgtttccataagacatagcaaccatacttgtcccgtggaaagaggttcctcagataacagttccaaggttgtttaaaatcagcagattgacttttttttaaacttatacttaacagtattaatttacacttaaaacaaataatacagaaatacattctccttgtgaaagttttacc

SEQ ID NO: 216917 - DNA, 430 bp, Homo sapiens
ccaccttggtaaattgcttaagccaaaaacctgtcatccttggctgcatttatctaaagataactacatccgataccatcagcaaatcctgctgactctgcattataaactgtccctttctgtagaccctgccatccaagccagaatcatcttctgccttaaccagcgcaaaatccttttacctggacttccagtttctgtgctcatccaatacacactgtactgatcacagcagccaaagtgatggttttaaagtttgactaacatgtggctgctctaagtactttaaggctacctgtggcaagtgggatgaaatccaagctccttagtgtgctttctttctttttttgagacagagtctctgttgcccaggcctggagtggagcggcgcgatctcggctcactgcaacctccacctccctggttcacg

SEQ ID NO: 216918 - DNA, 513 bp, Homo sapiens
aatatttgtattattagtagagatggggtttctccatgttgtccaggctggtctcgaactcctgacctcagatgatccccccacctcagcctcccaaagtgctgagattacaggcgtgagccaccacgcccggccaaaaaacctttttttaattaaaattaagaaaaatatatgaatatatgagaagtgcttatcctagcacctggtacattccaactaccccttcagagttcaccttgttttcatttgataagtttgggattcgatcgcagttactgggtccccaggtctccctggctctcacttttcctgaagagaacacggaacgtaacctgccgcctgctgcatggcagccagaggcgctgtccctcccggcccacctcagacagtcttgttttccttccagccccttcccaggttcaggttccagcaacatccagttttaggcagcagagttctaagacacgccagctccagggtgtcctcaacccatgtggacatctccctgggtcc

SEQ ID NO: 216919 - DNA, 159 bp, Homo sapiens
tgggaggaagcagagatatatacacttgttcagtttaccagaagcctgctgaatgggaacttgcagcttagcaagaagacccccccaggtgactcacatgcatatcaaatgtttacaaacagatttacagttagttgccatgtctcataccattttttt

SEQ ID NO: 216920 - DNA, 133 bp, Homo sapiens
aggattcttcttgtcactccattttaatagtgtgatggtaagtgatagtagaccattatccacggtaagaaacattataattccttatgactgcaaggagacactttttccctaatagtacacatagatttcc

SEQ ID NO: 216921 - DNA, 713 bp, Homo sapiens
actttgggaggccgaggcaggtggatcacaaggtcaggagatcgagaccatcctggctaacacggtgaaaccccgtctctactaaaaatacaaaaaattagccgggcatggtggcgggtgcctatagtcccagctactcaggaggctgaggcatgagaatggcgtgaacccgggaggcagagcttgcagtgagctgagatcgcgccactgcactccagcctagggacaaaacaaagaaagaatggtgtttcttactgcatggtgaatagtgttagaatcacctgggatgcagattcccaggtccactcatgcctacaaatcagggactctggggacatggctcagaaaggtgaattttaaaatagtgccccagatgtttcttgtgcacatcaatattttaggccctctggcataggataatggaggcagatgtaaagtaaaattcatttcctcactttgcatgttgggagaacatatttatatctcacctttctgtcatcccctttattaccagtgtgagatcatacagtcctcaagaagtattaatgaaatgacttacagaaaaaattttcttaaataacactcttgcctgacacctcttatataagcagaaaggagtctgggacctcagcttctaaaatgggaaccatgctaaggatcaaaaagtgaagacacctggggactccctgtcttgcaaatacaaccaaccacag

SEQ ID NO: 216922 - DNA, 1313 bp, Homo sapiens
taagatagacctaggaaagcatctccacacagaaagagctcttcagcctggtaagacgttcctgcctggggtgtaagcccctctctttgaaagtctccaaataagcaacagttctatcatctattgaagctgatcgtcagcaagacgacttccagtgccaagactactttaccatctaattttagcaatccctcttggcaaaggaagagtttcccctttcctccggctatctggtgttccacacaccatctcctactgcttcctttgatgttgggggattctgtggactcaaggccagatacaacacaggaagagacacactcataggcattacactgccctatctcactgcagcaataagaggcctatttttttttattgtgaatttgaggcactcagtttgaaaaatatgggctgtcaggtttgggattaaaactcagtattgatcattatgtctacagccatgcaaaagtttcttttacttttaagtgctaggatgtttaaatcatgattttatttcagttgttcatttaaagatttcattcatgcttttaattcactgtcagtgaatgcaatttaagcccatcacataatgatagaaagtggctgaaagccatgagaatatgtttctcattgtggaaactacaagttaagtcattttcttctcccgagtaaatttcttcagtttggctaagggaatttttttaaaaggaatcataagttctgaattagtttttcatctcagatgttaaccctatggagcgccaaggttctggaattgcaatggaatggactatgcctaaggctaagacttaaccttatatctgggggtaccagctgctccgctcctacctcgcgtccctcacaggtctccactcatcaagtctctgtctcaataccctcttcacagccaatctacctcctactataccttctctccgacttctcaccacatccactcctctaccccgttctcctcattacccttcagatctccttcctcgactcttccatcttaacgctccgtaatcataattgctatactctaccctcatctcccttctcacatatattccatccacactcacgccgcagcatccttcacgatccgtcgtatcatccttaccttatctcttcttacctacctcttaccctctactatcttcctactctctccattaatgcctccacatcctctcactatccactattactctcctcctcccactgatccagtgtttactgcatcatctcttcgtcacacctatgccactgaccataccatcagcgctcccgatcttcttctctcctcc

SEQ ID NO: 216923 - DNA, 365 bp, Homo sapiens
cctccctccaccttcaaagcagcattgttcagtagagcatttctcatgctgtgctactgaccctcctgttccctctctcactctctcacctacacggatacttgtgaccacattggacctacctagataatccaagacaacctccccacctcacatccttaacctaatcatacctgcaaagccccttttgctaggttaggtagcacattcacaagttctaatgattcacatgtcaacatgttggaggggggcacgttatttggctgccacagaaagtaggttagttgctttttattgctgtataacaaattgccccaacatgtcgtgacttaaaacaataaatgtttatttcctcacagtttctt

SEQ ID NO: 216924 - DNA, 431 bp, Homo sapiens
gatcacttcaccagatgcctctttgcccctccctagttattatttttttgcacattattacatttcttccctgctatataaacccctagttttagtcagtcagggagatagatttgagattgagcttcatctccccagctgtagcacccaattaaagccttcttcctaggcaaaacttgtttcagtgattatctttccaggcggccagcagtaggatctagactgaacccttggtattttggtaacattttagtcaagatgaacatttgagtggatttttataaaaatgtgcctatatacagtttaggaaggtgatagtaacacaagttaaatgtttaagtggattattaaaaaattatgcataagagctgtgcctgctttgacgtgaataaacacagctttaaaaatggaaacaaaatacctttacaact

SEQ ID NO: 216925 - DNA, 544 bp, Homo sapiens
gatggacttggtcagactggggttaagtccagcagtgtgacctgctcatcacttttcttccctgaacccatgtccacctctcataaggttgtatcgaagttccaagaagaaaagcagagcgagtgctttgaaaggacataggaaggaaggtggccctgcccctcaagaccgctgtgctggggtcttggcaaaccccttgcccctggaacagagaccggtacaagacctctggagtggatagtgccagctaggggagggcagagtgaggaaaggccttgttccccaggaggaagagaggtgctgagctagcagcgagggcttcttggaggaggtgagatttgagtttttctggatgggcagaggtggggaaggggtacgctgggaatcagggagcagaaaaggttgggctgctttgggcagtagaactccttgcccatccagaagatcctaaaatagaccagcagagagagggctgcttccatcctctgtgtttaaaagaaagggttacttgggattctgagctgttcttcctaccccatcaaaa

SEQ ID NO: 216926 - DNA, 517 bp, Homo sapiens
agtctagacttaaggtgcattcccttagagatttgattttgttgttgttgttcatgtacctgacagcaatattggcatgaaaccacattaaactcatttcttagtgtgatgtttttctgggcactcaggaaatgtgaatttgggcaataaatccatatgagtcagcttatagttacaaattcttaagatttttttttcctctcaccactcctattgtgaagacaaaaaaattttcttgcagtcctctagttgaggatgaggggaagggaagggacttttttctagtatgcccctctactgagtgtgtgtgcttttggagtcctagctctgtacagaggaagccaaattctacctgcccactaccatcctcattcagtaaaaaataaaactccataaaactctaagcacatttgaaagaagttgaattttattaagaatatttaatattttttaggtactcaaatgtaatatataaataccaaatcactaatgacagttatagtatgacatttcaacc

SEQ ID NO: 216927 - DNA, 502 bp, Homo sapiens
gagaatagcttctagccaaagatggctagcagtaaaacattttggcctcctttccctctgttgcttagcctctaagccattggaagtgggtggtggttcccagtctactggctgcagggttagtgcaaagggactgactgcagatgcttctgtgaaccaagcattgcatgtggcacgcagggccctttaaatgtccattatattgttgttattagattaaataggccaggcacggtggctcacgcctatagtcccatctttttgggaggctgaggtgggtggatcacctgaggtcaggagttcgagaccagcctagccaacatggcaaaaccctgtctctactaaaaaaaatacaaaaatcagccaggcatggtggtgcatgcctgtaatcccagctactcaggaggctgagacaggagaattgcttgaacccaggaggcagaggttgcagtgagcggagattgtgtcactgcactccagagcaagactctgtctcaaaaaa

SEQ ID NO: 216928 - DNA, 225 bp, Homo sapiens
aatatataccatctgtgacacttcctaagctcctggcttcagagtagccatcctgataattattatttaaagtccacattataaatgtgcaagttaagtgagttatggaaatcattccagatactggttcaccagtaacatcagtttagccctaaatattgtcataagttctctgataggctcatgtgatttaagctggtgctctgtcaagactagacttaggcg

SEQ ID NO: 216929 - DNA, 315 bp, Homo sapiens
tcaggtgacagcagatgctggcaaggatgtggagaaagggaacactcctccttgttttgggattgcaagcttgtacaaccactctggaaatcagtctggcggttcctccgaaaattggacatagtactaccggaggatcccgcaatacctctcctgggcatatatccagaagatgtcccaaccggtaagaaggacacatgctccactatgttcatatcagccatatttataatagccagaagctggaaattacccagatgcccctcaacagaggaatggatacaaaaaaaatgtggtacatttacacaatggagt

SEQ ID NO: 216930 - DNA, 568 bp, Homo sapiens
taaggccaagagttcaagaccagcctgaccaacatggtgaaaccccatctctactaaaaatatttttaaaaattagctgggcgtggtggcgcgcgcctgtaatcccagctactcaggaggctgaggcaggagaatcgcttgaacccgggaggtggaggctgcagtgagccgagatcacaccattgtcctccagcctgggtgacagagccagactccgtctcaaacaaaacaaaacaaaagacatcagctagctggtccaagcacagtggtgttcacaacgaattgatcacagccaggtagaattcttcattctttctccagttccactgctttgcttgaccagccttaaagacacacatacacatttttgtctgggcgcgctggctcacacctgtaatcccaacactttgggaggccaaggcaggcggatcacttgaggtcaggagtttgagaccagcctgaccaacgtggagaaaccccgtctctcctaaaaatacaaaattagccaggcatggtggcacacgcctgtaatcccagctactggagaggctgaggcaggagaatcgct

SEQ ID NO: 216931 - DNA, 398 bp, Homo sapiens
taaggccaagagttcaagaccagcctgaccaacatggtgaaaccccatctctactaaaaatatttttaaaaattagctgggcgtggtggcgcgcgcctgtaatcccagctactcaggaggctgaggcaggagaatcgcttgaacccgggaggtggaggctgcagtgagccgagatcacaccattgtcctccagcctgggtgacagagccagactccgtctcaaacaaaacaaaacaaaagacatcagctagctggtccaagcacagtggtgttcacaacgaattgatcacagccaggtagaattcttcattctttctccagttccactgctttgcttgaccagccttaaagacacacatacacatttttgtctgggccttatttggctcttaattcaa

SEQ ID NO: 216932 - DNA, 460 bp, Homo sapiens
cgccggtgactcacacctgtaatcccagcactttgggaggctgaggcaggcggatcacctgaggtcaggagtttgagactagtctggctaacatggcgaaaccctgtctctactaaaaatacaaaaattagctgggcatggtgttgaatgtctgtaattctagctactcgggaggctgaggcaggagaaccgcttgaacccaggaggcggaggttgcagtgagctgagatcgcaccactgtactccagcctgggggacggagcaagactgtctcgaaaaaaaaaaaaaaagaagtagagaagcaatagggattaaaatgtaaacaagccacccaggtgccatggctcttccctataatcccagttactcctcagatagctgaggtggaaggattgcctgaggccaggagttcgagaccagcctgggccacatagcaagaccccgtctctaaaaaaattaa

SEQ ID NO: 216933 - DNA, 250 bp, Homo sapiens
gccaccattctcagctgatgccttccattacttgttcttgttgaatagctctggttagaacttccattacaatattgaatagcagggcatccttttcttgttcctgatcttagggggaaaactttcagtatttcatcattgatatcctgctagctgtggctttctcataaatgctttatatcgtgttgggaaatggtctctttattcctagttttcttaatttttatcattaaaaggttagattttgtta

SEQ ID NO: 216934 - DNA, 536 bp, Homo sapiens
atttctagtgatattacagagatctttatacatttaacacatagatttaggaaatgtaggaagacattctaaaagttagaactgctagttcatggagtatacgtttatagttttggttatgttaaaaacgaaaaccaagttaactgtctgtggaagctgagccaatttatggctgtacctacaacctgagattaatttccaattttccagcatttctaccaacatactatacgtttagataatttctaccagtctgataggtgcaaagagattctcttggttttattttgtattatttttattagtaaggctgaacttcccttcaagtgtttgaaagccatttgtgttatcttttctctgactgctcagatccttttcctttatccctgttatgtatgttatagtccttaactaatttgtagaatattttatattaaggaaactatctcactgtaatatgaattgcaagttttttttttttttctgtcttgacttcatgttttttgttatgcttgtttcttatttatttatttatt

SEQ ID NO: 216935 - DNA, 416 bp, Homo sapiens
actcttcaccattatgcctcatcttcataggaaaagcatcgtttactgagaggatatattaaaggtgccacattttagaaaaattcaaagcaagggacaaatggtttagttctgcagaaaaaataaatcaaggctgagcatggtgacttatgcctataatcccagtgctttgggaggctgaggcagcaggatcacttaaggccagaagtttgagaccagtctgggcaacagagtgagactttgtctcttacaaaaaataaaaaaacttagctgggggtgatggcacgccttgtagtcctagctacttggaaagctgaggcaggaggattgcttgagcttgggagttcaaggttacagtgagttatgattgtgttactgcactccagcctgggtgaaacaacaagactctgcctcta

SEQ ID NO: 216936 - DNA, 491 bp, Homo sapiens
aaggaaattacttattctctctaggaagctattaggaatgctttcagagagtagggtaagccagactcttcttcaagttatttgaggagagtagtaacttagaagtgaaattttgattttgtgccatcattaaatctttgaataagagttttctgaatgactgacagaggttgatggaatattttatttttgaagaacttttattctaaaagttaggattagagaagtttttgctgtttctattcattattcctttttgcatacaaaaccgtccttgttgggattattcttgaagtatattctttagaatttcttttagagctggttttgaaggtaaataccatcagtgtctctagaaaaatctctctggcgggagggacaatgatcgggatataaacccaggcgttccagggggcaacggcaaccccctttaggtcccctcccatttatgggagctctgttttcactgtattaaatcttgcaattgcaaa

SEQ ID NO: 216937 - DNA, 588 bp, Homo sapiens
ctcctgacctcaagtgatctgcccaccttggcctcccaaagtgctgggattattggtgtgagccaccgcgcctggatgctaatttgtctttaatataatttatgggctgaattatgtccacacccactgccaaatttttacactgaagtcctagcccccagtatctcagaatgtgactgcatttggagaaaggtcttgaaagaggaggctaagttacaacaaggatggagtggggcctaatcaaatcaactggtgtccttagaagaggaaatatggacacacagagggacaccagggatgcccacacacagagcaaagaccctgtgaggacacagcaagaaatgcttcagaagaaaccaaacctgtcgacaccttgatcttggactttcagcctccagaactctgagaaaatacatatcagctgtttaagccacctagtctgtgatattttgttatggaagccctagaaaacgaacgtatttctctttaacatttgaaaggtcttaagtgtttttggatcacgcacttccctaaaatctgatgaaaccgaaggtcatcctcctctgaaaatacacatactgtacctac

SEQ ID NO: 216938 - DNA, 716 bp, Homo sapiens
atctcattgaatgaatcattccttcttgtagggtctcaacctacatagtaactggatgattgcaaagtaatttaaggattaggtactgacgccagaatctcttaagcaagtatgccctagcaagaatctacatgtctaacagggtcccagagaattctcaggataaccaaaatttccaaaccactggagcaagtaacgaacaagaaaaacatataagtacatacatggggtcttcattgacaagtacaaataaggggaaaatatttgctcaatttttttgtacttttattttgttaggcaagatcttaagagaccacaacaccaaatgtgttctcaattatctcattttatcacatgaaagatataattttggaatttcaaaaaatataaatttagttttaagaaggaccacattccaggccgggcgtggtggctcacgcctgtaatcctagcactttgggaggccgaggcgggaggatcacaaggtcaggagatcaagaccatcctggctaacacaatgaaaccccgtctctactaaaaatacaaaaattagccgggcgtggtggcacgggcctgtagtctcagctactcgggaggctgaggcaggagaatcacttgaacccgggaggcagagtttgcagtgagctgagattgcgtcattgcactccagcctgggcgacagagcaaggctccttttcaaaaaaaaaaaaaaaaaa

SEQ ID NO: 216939 - DNA, 476 bp, Homo sapiens
cagttccctggaagtctgtgaatagcaagaaatggggcaggctgggctgtgcttgctgtcatctctgggtggggggagatggaggcctgggcaggagtcctaagaatgctgggtgtccatggctgcctagtcgctggggtctctccagcagaggacggtgtggctgtgcaccttgtccaatgccaggaagccagcagccgggggtggaactcggtattctgcagggatgttgtgactgacacagtaattatgggtttttgcattgtttatgcctctctgggagcagagccaaatgctatgagccggtggctgcaaggcactcagtagatttcatgacagagtatcattgtatttactctttcaggcctcccggactattggcgcctcatgaagctttaacactatttgctgttctcataattaaatcactgactaaataaaaaaaaaaaacaataaaagaaataccaaatcattct

SEQ ID NO: 216940 - DNA, 397 bp, Homo sapiens
gctcgggccttccaggtaccccggcgacccgggcacgcggcccggcgccagttcagtgtgaagatgcctgagaccttcaacccgcagctccccggcctttacggcagcgcgggccgcgggtcccggtacctaaggaccaatagcaagaccgaggtcaccgtgtgaagcggggccgcggtgccctcgaggcatgggctggggtcctgtctgcccgtcggagcctcaggccacagggagaggagcgcctgccgtaaggccagctcttctgtctgcctcaacggcagtggtgtcttggagcctgcaggccgcgggttcgtcttgtaaataagcccttttatgtggttcctgcccctgagaataaagaagccccagcgtggctgcgaggcaccattggtca

SEQ ID NO: 216941 - DNA, 318 bp, Homo sapiens
tatacaccaatagaatagaatagaagccccagaaataaattctcacatatatgttcaattgatttttgacaagggtgccaagaccattcaatggggaaaggacagtctttctaacacatagtattggtaaaatgatatctacatgcgaaagaatgaagttggacccttcccgtattatatataataacctaaatggattaaagtcttaaatataggagcaaagattaggataaactcttagaagaaaacaggtgaaaatcttcatgacactggatttggcaaggatttcttggatatggcaccaaaagcagaagcaac

SEQ ID NO: 216942 - DNA, 406 bp, Homo sapiens
tagtctgttcacacaattcagctgcattttttgccctgcccacttgccacttctgttcgggggaggctgacccctgagatgcatctcctggaccccttgcccccagctttctattggatttggccaatgaaaggctctggtggcagactgagggctggaggaaagggaggccagggatttttctctgctcgctcctgcttccccctccctgcccacagaccctgcacagccaatcatcctccagaactcagccatccctggggttggtaacacttcttccccatgccctttagcctagggctccaccctccccaggaccctgggccggcccatgggtgcctcgccatgctttattggttctgttcattaaagtctcttcatgtgaaccatctggggtcgtcgacgc

SEQ ID NO: 216943 - DNA, 627 bp, Homo sapiens
gcattctgtttgcttaattattgtcagcatcacccacgctggtatattgttgaagggaactgtagtgcctgtcagagcaggcacccgccattctcctttcctcctcactctactcctgtcgttgtgattacagtttaggcattatctatctttgctgcgggaaatgctttattaatcttgcagtcctgtgtccatgtggagatgtggttctgccatccaaccagataggaagacagagcagaaaaagttgctggagaatttcatgaaggtcaaatttagaaaaaggacaatttggttcagttaggtgctttgcacactgaggaacatgcagagaaatcacttgctttatgggtttggattgggaaattatctatttatgtaatcacactgctttgaaagggaagggaattaattgctttaattaactccagtaaagactagattgtcacagggggagtgttgataaaatgtgctttgagtgatctgatacgctcttggatatagtggctggaaataatagctatctctgtaatcaatcattttcctttctctgggacctcactgatgatgttcctgccataaactaggctgcctagagggtcaaaaaaaggaaaggtcaaaaaaaaa

SEQ ID NO: 216944 - DNA, 367 bp, Homo sapiens
cactattacccctaaggaatgagactgcaaagaagctcccgatctgaaaaggtggcatttgctaagttagaaaatggaagtaccacccagtctgggggatcccataggcacccaagagtgcaccaagccactaggaccaagctcacctgagagtcccaccctgctcggaatatgcagacttggtgtcctgtcgctttaaagcactccatgcctggaaatgccacggcccacatggaatgggcacagccaacaactctccaaggagccccagcaatgaatgatgagcatctcccctgaacccatctccccatgtccggtgtttaaagtgaattgaaatgaatatctgataaatgaataaacctgtaaa

SEQ ID NO: 216945 - DNA, 155 bp, Homo sapiens
cagagtaaatgtgaaacggctttagcaagtgggctgtgcggtttgaaatatgaactctgtaatctcttcagtggctcccacatcccagggctgcgctttgggtaattcaggagtgggcaggaaacttcagaggaaacactcctaagaccatgggg

SEQ ID NO: 216946 - DNA, 292 bp, Homo sapiens
aatcattgtattctatctgagtcttttttttctccatatattgtataaggataataaccatttcacagatttgtaatagtaattagtgtgattgtctaaaaatgacataaatatataaaattatagtattaataatatcaacagctattaatatgattgttattgttatattctatactcaaagatcatttaggatgcaattacagctttacctgtatttatgagaaactatataaattcatcttgggtgatgtgggtggctgagcatatttaatagagaagaatatttact

SEQ ID NO: 216947 - DNA, 493 bp, Homo sapiens
ttttggatcttacgatgctgagcatgttctgcactggtgctaatgtctaatataattttatatttacaaacatacgtgctacccagagattaatttagtccacagaaactattgacccctcttgagatgacaacatatacactcctaaatcagtgtgtttagacttttcaggtatctaactcatttccaaacatgcagcatgtttataaacctcttgatttccagcaacatactatagaaaacacctgctattcaaaacacaacttctcagtgtcatccattgctgtcgtgagagacaacatagcaatatctggtatgttgcaagctttcaagatagcctgaacttaaaaagttggtccattagttgtatctgatggatatataaatttgcctcctagttcactttgtgtcaagagctaaaactgtgagcctaactttctcttactggtgggtaataactgaaaataaagatttattttcaagctcaaaaaaa

SEQ ID NO: 216948 - DNA, 316 bp, Homo sapiens
tgcactccagcctgggtgataagagcaaaattcaaaaaaaaaaaaaaaaaaaaaggaaaagagaaaaacccgggaacattatgtagggtcctgaattgggtcatggacccctggaccagcaggacaggagagagaaaactggcaaaaatagaagactgtacgttacttagtattataccagtgttaatttcttggttttaaaaatgtttttggtggttacataaagtaagatgtcaacactggggagattctgggaagagtatatgggaactctacatattttacaacttttctacaagtctaaaattatttcaaa

SEQ ID NO: 216949 - DNA, 1174 bp, Homo sapiens
ggctggagtgcaatggtgcgatctcagctcactgcaacctccacctcctgggttcacaccattctcctgcctcagcctcctgagtagctgggactacaggtgcccgccaccatgccgggctaattttttttatatttttagtagagacagggtttcaccattcacaggatggtctcgatctcctgaccttgtgatctgcctgcctcagcttcccaaagtgctgggattacaggcgtgagccaccacgcccagcctatggtaaatatattttgaactacaaaggtgctgtggtactttaaagaaaaactatttttactagtttatctgaatggtctgtggactttatttagaaactgtttttcagtttagttttttggacatatcctttgctcagtgtattttgttacttctctagtaaaggtagaagtgaagcagatgccattgtaggttttaccagcatttaaatatattatgaattgcttagcaatgaaatgcaagtatgcatcttttacttaaagatactatttatgtattcagctacagagatgaaatagcattttatgtgttaattgttttggctataaaatttaagtccttacagcatttggggattatacacttggatttcaaaattgataaaacccttgtgaacatatctaatagatattctgtttacttgtagaaataatataatgtgtctggttctgttttgttagacattttttatgttctactgaatcagaatagtcagtgttatattccttatttcaagaattcatctattttatggctacatctcatatgtgctatgaggacttctagccagtgggtggcgctgtaataccgaagtactgcactgctttgttcctgtttccttgtgctgattcctttctagtatttaggtaacattaccggatggcatttcccttaaattccaccaactcttaatctttattttaaaaatggctactttttttgggtggttggggtaagggttaaaaccttaaattagtaaccgctgtttattttccagtttatttgttttctgtgattatttataataattgatatttgtttttacaagtcccctgaccctgtaataatgaatgcagctatcttaggcaaagcaaataaataaactgggcatttttaaaataaaaaatttaggaagtca

SEQ ID NO: 216950 - DNA, 441 bp, Homo sapiens
agtgagatgcacctaaaatgtggaagattggctgaaagtctgtttcaaacgccattgacctctgggttccttctcccaccacactcagccagaagactgtccttctcctatccaaccaaagatgggaggtctctggggacactaaaacagagggtgtctggcacaattgagaattaagtgaatgatgtgcactttgtagtgaggactcagccctctttttccagtggattcccagaactcactggatagccagggcttcaccactctgccggagttagggaaagtgctttattgggagtctaaccagcctgagatataaaacttacagatattaactttgaagcttctctaataaattacccagccttatttatctaactaatatttactgaaagcctatgatgtgccaaggatttttctaagtccaagggtttcagcaga

SEQ ID NO: 216951 - DNA, 151 bp, Homo sapiens
gcctggcatgcctgcttcaggagctcagacttttactatagtggtggaaggaataacaaccccagccattttttgagggcctgtgcatgcctaggccctcaaaaacatgtcccatgttagctgcaaactgccagctaccctgcaaagcaca

SEQ ID NO: 216952 - DNA, 659 bp, Homo sapiens
ttgtcactgcatgattaagtagtaaaggatttcagataaactgtggtcttgtggcatgattatagaatctagaaaattaataaaataagcaggcaaacgttttatgtgtttggctgtgtaaaaataaccaattacagtcatttatgtaaacaatttaacgtgtagggcctaattatcatgcaacaccataacaattacatatattattaaatatgcatcagattaaccttgttgttaagttttgattacaataaaagtactttgtactctaaggaacagtcttatagttaattgctaataatgcataagttggttcactatttgcattaattaaatgagacatagctcctgagtttgctctccatttgaggcaaggctggatcctccatcctatattgcaactacacatttgtcctgcgacctgtgagataacatacactttccttagtattctatagtgaggaaaatgctgaagaaactgccagtaaaaaaaaattctgtttaattggctgttgttcctgaaacctacaggtttccagtagataagagtttttgatttaaacaatgaaaaattctatgctgagcactagttaacctatgtagaacaacttctaaataagccccaggatcatcctgtggagcacttctataaataaaat

SEQ ID NO: 216953 - DNA, 399 bp, Homo sapiens
catcattttcctcttcttagatatgaaggcccctttcctgttattcactgggttttgcttagtacggcttcacactacttattccaggtactcccagcagtggcgcagagaccatcctcagttctgtgtgtggatgggaccagagaagccggccggccgagctaatgttcttcccttcctggaagagagtagtttccaaacaacccgatctctgttcctctactggctccacatatgctctaagttcctgttacactgttgagaggctcttgaattagaaactatcgagtataaatggcagtggaatatcactctatagttgtcaccgatatttcccttaccttgagattgtgacaagaccagaaagagaaaaagagtaaaaacaatgtaaactataat

SEQ ID NO: 216954 - DNA, 416 bp, Homo sapiens
agctgtgcatgttcagggcaagattctcagcacctgaatggaaagcagcagctgtgaagctaaacagttatgcaaagactagcagtctgatggtgctggggagtcagaggctggaggtcagggcctgaggaggtagagcaacccttgtaaataaacactgaaacactaggaagctttgaaacactagaagggctgtactctaggagtaaggacaacccagaaaaagatcaacgctagcactagcaaaagttaagcgtcctctcagatggatcaagatctgccagtacccttatctgcctgaattctttctagagaaacgtaacagtttcagagaacagagtctctaattttttcatataaaatcactatccattcacactcacacaccaagcatgccaagaaactaccaaataagt

SEQ ID NO: 216955 - DNA, 1072 bp, Homo sapiens
gaaagaatacgtgggactatgttggattcacatgtgaaatgagagaatgtttgcacaaaggaggtatacaggggaaaaccctagaaattgtatgctataagtaagatcatgcctacttcatctgggcctctggatctagcagggaccagatttgtgtcactgaaacactcttcaggagtggagatactggtaagatgtcaagctaatgagacaggacagagtacaacctcctcatgaaatctctctgactataaggctactgctttcttcataagcactactttgtgacattttactataattttagtagaaacctcattagctggaaatgtagatgacaggaaacagcaggaaaaggtttaattaatcttatacatatcaccatactctttttaaaagaacattaggctaaccacttagctggaaggaatgagttgtcttaaattataaatgtattgaataggctgacgttggtttaaaacgttacctagttgtaccgaggagctagcagttctgcaaatcttgctctatatggtgtattctattgagacataaagttgacatgatactagtaagacagggctctttctttgaaatagtgacttctattttccacttctgttcttgcctttagcttccttcaggcagctgacggtcaggctctgtgattttttggtctcaggggaggtttgtggccaggcagaagtggagatggctccagacatatactttgggattttttgtttttcaaaagcctgatccattaaggcaattatgcttggtgtaccctcccaaagagtggacaaggagagtgcttttgagatgcaacaggtgaggaaaggagctttttggagtccttgggttgtacccacagtacccttgggtgccccatcagcaatcagaaatgaagacttgggagaagaagggctaatgacgcttggctttggcaaagatgacggagttcccaggtgacccagaagctgcaaagccaatggacctaggggaacagtgtaggcccagggtgatgtgtgttctgctatcaggctggtgactatctgagtgaccctaggac

SEQ ID NO: 216956 - DNA, 328 bp, Homo sapiens
gaggcggattcttgctctgtcacccaggttggagtgcagtggtgtgatctcggctcattgcaatctccgcctcccaggttcaagcgattctcctgcctcagccttctgagtagctggactacaggcacccaccactacacctggctaattttttacttttggtggagacggggttttaccatattggccaggctggtctcaaactcctgaccttgtgatccgccgatctgatggtttcataaggggctttcctcctttgctcggcacttctctctcctgccaccttgtgaagaaggacaggttttcttccccttctgccatgattgta

SEQ ID NO: 216957 - DNA, 895 bp, Homo sapiens
tcttgtgatcaacaggtctccctgaaatgtatagagtgagaccgcaccattatggacggacactaaactattcatgaggactctaccttcaagatccaagcacctcccattgatcgcctacttctacaacactgggggtcaaatatcaacatgaagtttggagggcacaaacaaaccacatccaaatcatagcaaggtgtttggctgtgaacaaacaaaacaaaacaaaaaaaaacagaaaaatggggcagtaactagaggagatgagagatcaaaagagagcctgattttttattagacaaagtagagattgtgtattgatgaacaatccattgactgatgatattaactgattgatatggattaatatataattaatatcaattgagtgagttgggagtctgtggcaggtggatcgcttaaacccaggaattcacaactaacctggacagcatattgagacctcatctctaaaaaaagaaagaaagaacaaaagaaggaaggaaggaaagaaagaaagaaaagaaagaaaggacggaaggaaggaaagaaagaaaggaaagaaagaaaataaatcactcaaaaaaaaaactatatgattacatggaaattaaacaatgtgctcctgaatgacttgggtgaacaatgaaattaaggcagaaatcaagaaattctttgaaatgaatgagagagaagatacaacataccagaatgtcagggatgcagctaaagcagtgttaagtgggaagtttataatgctaaatgcccacatcaaagttagagagatctcaaattaacaacctaccatcacaccttgaggaactagagaaagaagagcaaaccaaccctaaagctagcagaagacaagaaataaccaaaatcagagctgaaatga

SEQ ID NO: 216958 - DNA, 646 bp, Homo sapiens
ttgggccttttctaaggctcattttcctacacatcaagaaaaaaaactctctagttaatgttagtgggatgatacccacaagcaggagattcaaagatggcccttttctttatccctggctcacctgaggaaggaggtcagaggcccaagtgacttaattctatgcagatctatgcctaatggaaacaataaattcaaatgggcagtattactttttcccttactatcttactatttatgaaatgtatttctcactgcatttaaaaatgtatttaacatataaattatttcatgatattttatcaggttttaaaaatctgatatttagctgtagtatggaattacaatgctaatgggtttacaaattaatattacaaatgactgaaaagttcacactctgcaacttgttaaacatgtcaccttcagagcttatctcatttttaattaataaatatgtggtcatagtgtgtaaagaagaaatctttatagattaaagatttgtcaccttttggaacagtggactctgttttttaacatttgtattatagaaatttagaatagtatagtatttttccctgtgaactagctatgcagcttaataagtgctcgctgcaagtccttttaccctcaagaatcagctatgacc

SEQ ID NO: 216959 - DNA, 514 bp, Homo sapiens
ttagatttgttaaatgaatagaggggatatggcaatcagaggaaatgcaatcttctgctgagtgtcagaagtactattatatgcaataacaacaaaattaaaatgtctaaaatcagtccctgtatctataaaaatatgaaactatttccaatattattcctatcaaaatttccaatgaaaccagtacttgtatgtgctattagttctaatcatgctgctagaacattgttgagtttgaaattgttagcatcattcaactaatatgcgtatagctgtcacttccgtttgaattattatgacaccaaaagctcaggcaacaaaagaaaaacaaatgagactaactcaaacaaaaaggtttttacacagcaaatgaaacagtcaacaaaataaaaaggcaggctgggtatggtgactcgcacctataatctcagaactttaggaggccaaggcaggaggatcactgaggccagagttcaagactagtctgggcaacatagtaagatccccatctcta

SEQ ID NO: 216960 - DNA, 492 bp, Homo sapiens
ttcatgactgtattttcttatggttagaaacaaaactaaacaatttaaataactctgcttaatggaagtcaggaaagagaaaaggcagctatgaagtgttgttgttacagactgtgcatggaccctaatggtcacctaaatgtgagaggaggctaggcactgagaatgccatgtgcaaggaaataataaaagcaagtcctccaagaacatttcccacagactcaaatattttcgaagtaacaaaaataagaagagtgccctttttgagtcacaaaattggcatgaagtgaactggttctatgcttgctgtaattggtggtcaaggaggcaggggggaagccattgaatgtgttcagtgagctagaaaggtaactttctttcctggaagaaaatgatcaagggtgagaagtcaggaggaaagagatgtttttgaccaggtctcattcttctccctctgtgtctgaccttgaaaaggagagattgcagaatagg

SEQ ID NO: 216961 - DNA, 372 bp, Homo sapiens
atcttaaaacacttttataagaatcccagttcatgtaaaaatctgcattatgcatgtaaaacaccagttacttaacacttattacactcattatttggtatgtttttggacagaatagtgtggaaactgtacagtatcagttatttcttctacactgctccaaacacgtaccataatgtaaataagcaatgagaaaatatgttaaagatacatgatgaatgcaaataactcttagtgaataaccaagaccacgtaaaaaaaaatgtactgattaaagagttgcctgagttagatttggtggtgagaagtgggagaaggggctgttatcatggttgcggttcagtggtgagtcaaaatgtatggaaagattct

SEQ ID NO: 216962 - DNA, 553 bp, Homo sapiens
tcatgtgacaactgctggacaatcaggaaactgccaagtcatcacctgatggtcgtctgacattcctggtgggtggggggagccctctcttgccctgctcatacctgaccagctacctattgtaacagttgtatatatgtgtggtacagtgcattatctcagatattcctttaaaaatggccaggttaggtattgttcctgttttatagatgaagaaactgaggccgagagaatgtcatacagttaataagctgtttgctggtataattcaaagtttgtatgatttaaaatactttataccacactgctatgataaagaaccatgatatgtggctgaactgacattcattcagcagtttttacagtatacatttatagagtacctaccctataccaagtcctgtgctcaatccatgctgtatttttttctgtagtaatcccccctcatctgcagttttgccttctatggtttcagttatccagtattagccatggtccaaaaatattacatggaaaattccagaaataaaccattcataagttttaaattgtg

SEQ ID NO: 216963 - DNA, 404 bp, Homo sapiens
ggagataatacagcaaaattgtaagactgtagtagtataaaaggatataataagcttgatgcatagtaagtgcttaaaaagtatttgcagtcgctatatttatatgttttgctttgatttttattttggaatgggacatgggcatggtgacgagggtcataaaggataacaacatggcacactggaaaatatggggccagtatgaatccaagctgacgtgttcaggggaacccatgtctctgagcccctgtatcattaagaagtctttgtgactaggattgagatcctgtgtatagaattgctttactccatgcctgggatcttagaaacttagtctttgagttgtcgcaatcacctcattcaggacccctgaaacagaccttaggtgtgctcaaaaccacctc

SEQ ID NO: 216964 - DNA, 229 bp, Homo sapiens
cttagaatcttgtgaggaaggcatggtacttaaataagtctagtgtaaggcagcttgtaataagtagtactaagactgctgaagaagcacaaataaaggagatattctatcttactaggaaccagggagtttcacaaacttggctttgcaaggtgggaaagattttcacaggtggaaggggtttgaaatagggaattcagtcaaaaggaatagtgtgagtgaaggaatg

SEQ ID NO: 216965 - DNA, 496 bp, Homo sapiens
aggaaatccaggcaatgcatcccattgagatcggctccttgggtacagagcagggtggaaaagaacagaaaataaataaagggtaaagacaggacagggacctaaacaggattgttcaatcttgaatgcctggcacttccaagaggcccaggacacatagaaaagaaatatttattacatgagtgaatggatataagtaggagcaagtctcctgaccctcacttattccaaagactttttcatttcaacatttctgcatgttagcctgttgcaaaaccacaaatctgctgccaaaaggtaaggctggatgtttggttctcttatgaacaggagaagactggcctataactgtggacacaagggaaagcattttctgacattcagatcatttggaagcatataaaagttaaatctgttctacattgtgttggaaagaaagaaaaaataaacaaacaaacaagcacaacaacaacaaatcacagagaggaaggaaaaa

SEQ ID NO: 216966 - DNA, 298 bp, Homo sapiens
ctgggaggctgcagtgcaatgcagcagttaagaaaatccattgtgtagccaactggatacactaaagttgtgagacagcagacacagttatttcacctctctgtaccttagtttcctcaactgtaaactagagagcactatacttgccttataggatcattgtgaagagtaaatgattacatgcaatataatgtgagtatgtaacataggtaacatatgttagcaattttttgttgttgttttggagacagagtctcactctgtcgcccaggctggagtgcactgcagccttacacct

SEQ ID NO: 216967 - DNA, 558 bp, Homo sapiens
ttcaattaatgttctttgggttttcactatgtgaaaggcaccatatttaggacattagctccctcctcagtctcaaatgttagtaggatcttcctaattgtccaaccaaagataattcttttttcattttatctaacttttattttaagttcaggggtacatgtccaggtttgttatacaggtaaacttgtatcatgggagttggttgtacagattatttcatcacccacatattaaactgagtacccattagttatttttcctgatcctctccctcctctcaccttctaccctccaacaggccccagtgcgtgttgttcccctctatgtattctcatgatttagctcacacttataagtgagaacatgtggtatctggttttctgttcctgcattagtttgctaaggacaatggcctccatcttcatccatgttcccatacaggacattatctcattcctttttatggctgcatagtattccatggtgtatatataccgcattttctttatccagtctatcattgactggcatttaggttgattccatgtctttgct

SEQ ID NO: 216968 - DNA, 884 bp, Homo sapiens
actattcatttacttacaggaaactttcttcatgaatatatgaagagaaatttctgcccaaactttaaaattattataaacttaagataatgacatttgggttgactttctggttattgctgagaatttggctgtgtaaaaaggagaggttagaaaaatattatcaaagcaaaaggagaattcttttgataagtgatttgaattaaattatatctccctctcaattattttctgtgcacacttacagtttctacaagatgttggacaagtgattttgttctgtgcctcagttttcccatatgcataatgcaaagatagttattcttgcagctaatatacttcctgagaccatgtcagcatgcacgttgcatacatactgaaacagaagactcaaaggcctttgaagaagagcaccagtatcacaaagtttcatcattttattttttaaaaccaaatatatcttttcatcatttcatagtttgaagactgatgaagaaaatgacagaaacttgtaattagggaaatgtaaaatatttaaagttaaaaactgtctatgtagcagaaaataaagaagagagattactttatactctctttttaagtttgaaaacccacatcaaaaaatgaaagaaaatctaaccatggatgccagagtttgaagactgtaagaaaggccacgtggaggaagaaatatggacatactttaagctgttttaaaagataaagagattagccaggtgtggtggtgagcacctgcagtcccagctacccaggaggctaaggtgggaggatcaccggagcctaggaggtcaagactgcaatgagctgaggccgcaccattgcactccagctgagtgatggagtaagaccctatctcaaagaaa

SEQ ID NO: 216969 - DNA, 390 bp, Homo sapiens
ataggttatattatcatatgtttaaatgtaaattggcatgacctagtagtagagaggaagacatttacccacttgaacatactgtaggctaaatgcatattaagatttcatgcaggccaggcacggtggctcatgcctgttatcccagcactttgggaggccaaggtgggtggatcatgaggtcaggagattgagaccagcctggtcaatatggtgaaacccagtctctagtaaaataccaaaaattagtcaggcatgatggtgtgtatctgtagtcctagctactcaggaggctgaggcaggggaatcgcttggacctgggaggcagaggttgcagtgaacagagattgtgccactgcactccaacctggcaacagagcaagactatct

SEQ ID NO: 216970 - DNA, 1066 bp, Homo sapiens
acacaacagcagcagcagcaaacttatttatactagtttttgctcattccctcatttcccactcattaacctacctgataaactttggctctgtgtccccacccaaatctaatgttgaattgtaattcccaatgttgggggagggacctggtaggaggtgattggatcatgggggcagatttcccccccttgctgttctcatgatagtgagtgagttctcctgaaatctgatggtttaaaagtgagtggcacttacccctttgctctctttctctcctgccaccatgtgaagatgtgcttgcttccctttcgcccttctgccacaattataagttagctgaggcttctccagctatgcttcctataaggcctgtggaaccttgagccaatgaaacctcttttctttataaattacccagtctcaggtagttctttatagcaatgtgagaacagactaatatactaccctaatctggatctggcccaatcactccatagtgaaacagcttttggtaatgttaccaacttattgcaatagattttttttttggtccttatctcatgtaacttctcagaaatattctatccacctgacaaatctttcctttagaaatgctctccttggcctctatgacacagcattctcctggttctttccctaactctctggcttttgtttattttctcatcacagacttatattctttctttagttgacagaatctggagttcttcaatggttagtcctagacagcttctttcctgctatattctaaatgtttgcttccccacaaattcatatgttaaaatcctaaaccccaaggtgattgtcttaggaagtagggtcttttgggaagtgattaactcacaggatactattttatttgtgcctaataaaataggctgaagggagctcctttgccccttcaactatgtgaggaaacagccagatggccttgtgtgtgaactggaacatggaccttacacagacattaatctgccagtgccttaatcttgatttttctccaacctctagaacgtgagaaataaatatcttttatttata

SEQ ID NO: 216971 - DNA, 514 bp, Homo sapiens
cttgtaagaatttagaagtgctcatatgtacacatagctatataaggttacagtgtatgtaatcataagtatgcacatatacattgtgcaaatccatgtagcaaaaatttggctgtgctaagaaaaaattcaaaggaatatatccttcaagaataaattgaagagataaagagatttccattctctgccttttctgaagtcctttgaatagtacatttttctgagagagacattcttgtccccccacatcattccaagtagaagcagagaaacctttaactcttcatcagtgaagttgctgagcctcaataagaggacagattttacaagcttagaacatgtatttgatgtctgtgtagtgtatgtttctgacgttaaggtgtttgaggatactctcatagttaaatgtgtagagtactgccctgttacatcattttctgtggttgtcttggacttcaaattgcaggatttcttaggttgtggcacttttaacttgcatagaaaataatagtct

SEQ ID NO: 216972 - DNA, 152 bp, Homo sapiens
gagacataaatgtggatgtctgggtcattttgccccattttaaagtgttaattcatataagtttaattcatattatctagcatttgatgcacttgatgcaacattacttccaagagttttgttaaatcagaacgtaaataatgaagttaata

SEQ ID NO: 216973 - DNA, 707 bp, Homo sapiens
gcctgcagaggcctaggctttgtcgcctgtggctcccagtgtctgcagagccagcattgagctaatcctgtgggaggatgagagctgatcggcagttgtatgataggttggtagggggcttgtgatctgtgaaattccaggtgatggatgcatccagtgtgcatcactaagaggccctttcccagtggcctctggctggctgcaggctggttccagtgtgaaagattatactgccttttcttttttttattttccttttgaaaacagacaacaaaagacaactgaaaataacttccccagtgagcaggcaagaattctcttctgaaaaatgacgtttgtagttctttcccaagttggccttcaaagagcctggctgcagttgagccagaaggagatgtcttgtgtgaaggctaaagtggaggctgtctctgaaatctccgtgagcaggtggccctaagccatggtggtggatagatgtgcagctttctgcatctctgccccttggtctgtgcccacaggtggccggcgtcagcctccatcccgagcacatgctccgcgggtctttatgtctcactgttcttcacacataggaggaaagagataggagactgaggaagggatggaccctgagaaagggcccctccagcctggctctcacacagtattttgtctttgattctgaataaatttttttttgtggttaatct

SEQ ID NO: 216974 - DNA, 798 bp, Homo sapiens
cagaaggctatagagaaactttaaatgctttttaacccccgcccccccaaccccgactttttgttttacaaaaaagaaaaagtagaagttattccaaagaaattcaaggtaactggaaattcaagaggataggaaaaaggtgattgcatcattgatcaggatctaaactttatctgtttaatttctcttccattttattagtgctaaggatgagaataactgttatttctgatagatatttgcattttattatagttgaaattagagatcttaggaggtgtttactggtaacgttgggggtggttccagtctacagaaatgtacatgcaaggagcacagaagcagccatgcatgctggagtccatgcgcatgtgacattggatgtggaatctcacaggaactgctgcaggaagcccagtggggcagcgtgtgaacaggaaggtgatcaggaagtttctgtccatgccgtggctcccctgcctccaaggctctcacctccagccatctgtgaatgtaaacatctagaccctagccctctctgcgcatcaggattccttgcttctacctggcttgaccagtttatagttgattctcattcttcacactagttatcctctataaagttgccatgaatgctaaattagtgaatactaaataactgcttccaggaaaaatagaagggtatcttcctgtgaacctccagtcacaagattttttcattaactggtaagtaataaacttgctttatgtgtgtttctgtttcacgacaccatatttattatgtattcgctgattcat

SEQ ID NO: 216975 - DNA, 393 bp, Homo sapiens
cacctcttacccctaggacctccttgtatctgtgaggattcagtaatatttgtaagagactttgtacctaggattatctcttgtaagtgtgaagttcaggtcatttggtttttctgctctatttaaggatttattcccttggatcaaacctggatttgacctctcagaggtttaagtttctatcgtgcgacattgtgcttgaatcagaaacactctacttctgtgttttgtcaaaggccaatcctatgacctttttcataatcaggtttgatactgtccatcctactttccatttcggtttctatcacctctacaatcggggtaatatctgaaataagactagaaatttgctgttctaattcttggttgagtgctggctcctgggcctatatt

SEQ ID NO: 216976 - DNA, 389 bp, Homo sapiens
  misc_feature (8)..(8): n is a, c, g, or t
ctgtcccncttctatctcaaatcatttgttcttcagtagcaataatatttctgtagatcttcatgattttctgcactgtttttgtgtcctgaattgagttctattaacccctcatcttcattttatttgcttgtttatttagtaagtaaatagttttcaacatctcctgtagttctaacaggaggtaagtgattcccacttgataatttacctgccttacaggtaatgcattctttgtctaccccaaacacaagctgctccatctccacacccaactcccaaacatgacagtttcctgaaggtaaatgtgaccttgctcataaaagtgcacttctttttatttataaaaatatttttttataagagactatgctctactagtacttttt

SEQ ID NO: 216977 - DNA, 234 bp, Homo sapiens
agcccaattcttatctgctgccagatccattcaatctctgcttaacacctccagggacaacatttcaggttgtatacagttggccctctgtatccactcgttccacatccacggattcaaccaaccattggtcaaaaatatttggatcccaggactttgggaagcagaggcagcaggattgcttgagcccaagagtttgagaccattctgggcaacacagcgagaccccatctc

SEQ ID NO: 216978 - DNA, 145 bp, Homo sapiens
tcttttgacagggtctctatattccaggctaaagtgctgtggtgcaatcatagctccctgcaacctctaactcttgggctcaagggattctcccaccccaacctctcaagtaacctctcttaaattgccctttcttagtcttctc

SEQ ID NO: 216979 - DNA, 734 bp, Homo sapiens
acaagtgacagccccacatacccctccaccaaaagggtcagctttcctgttttctgtgcagatcgataggtttggtgtgtacaaaaagtgaccaggttatgctgacagacagccatgaggatttataacttgcttttaggatgagtgccggtctctctcccatgagcagtgagtcctgatagcagggtcactgtggtctggtgatgttaaggcattccaggtttctttcatctacactcattcttaaactgctgcagaaagagatgtcaagatatcactgggtggggacattagaaaaggattcaggaatctataaacaagaaaagcttaccttccaccaccctctgtgctttgggtgtgttctgcccctgactcagtgcaggatcagaatagggcgatcttgataacaatcatgtgtaggcaaaagcctttgtaccttagcaggatggaatagtaaatatctgggtaggtgattccccatgtgtttccaacagacactcatccgtgcagagttcagtgtggcaggcttttctgtagcacagtccctgtaacctgaacggaagactacctgaatttgcacactttagcttaaaactctttctggggcttgaggattctgttcagagtttatttcatcttagcctgtgcagctgtcagtgtgctcacaggaccagggaacccaccaaagaatctgcttcctccgccatcattaaatctggttaatttagagccca

SEQ ID NO: 216980 - DNA, 444 bp, Homo sapiens
gatgggagtcaaggcagagttgtttcaatgtgcttgtgaatactgcatgttgctaatttaacatttagtgtaagacaaagatgacatttcagattttcttgtgaataattggcatacttaatactgagttttaaaatcagcaaatccaattatttgaacacctgtgtttttaattctgtgctattttccaagaatgtaccatttctttatatagtttctgtagatactttacattttgatttattgtgcacatttcaaaatcacataacatttctattctaaatttaattctctctaaataaattcacttatcgaaagcaaattctattgggaggctgaggcaggacaatggcgtgaacccaggaggtgaagtttgcagtgagccgagattgcgccaccaaactccagcctgggcgacggagcgagactccgtctcaaaaaaaa

SEQ ID NO: 216981 - DNA, 403 bp, Homo sapiens
aggtgatgaactgtctgagcctgaccttgtagaatggaggcaaaaaaactgatttaatgagcctgggcaacaagagcgaaactttattccaaaaggatgtcacattgcttttggagaggtactaaggtgctcaagcagtctctgcaataggatttggttccctgtcttttctatcccttgtctgatcagccctgaaattttactggtacagagactggagaaagaggggtgggtggacaggacatgtaggatgggggaaactcctgcaagtatgtttgccttatgggctccagatggggagccgggacatacctgtgaccatggtgggtcattaggtcttaacatagttctgggaactggtgaaacctgaggtcattagatagtgcatgtttgacctttgggc

SEQ ID NO: 216982 - DNA, 443 bp, Homo sapiens
aatctataaatcactttgggtagtatggccattttcacgatattgattctaatgtagacgacaggttggtgagtgcagcaaaccaccatggcacgtgtatacctatgtaacaaacctgcatgttctgcacatgtaccccagaacataaagtataataaaaaaagaatgaaattaaaaaaaaatttgtgggtacattataggtatattctagtactatgctgaataaaagtggtgacagtagttttccttgtcttgttccagatctttgaagaaagtctttctgtttttcccttttcagtatgatactggctatgggtttgtcatatatgattttttattgtgttgaggtatgttccttctatacccagatttttttagtttttaacataaaaggatgttgaattttattaaatgctttttgatatctattgaaatgatcttat

SEQ ID NO: 216983 - DNA, 598 bp, Homo sapiens
ttataacatggaaattaagttttaatagtcctaggtttgatcatccataaataccatattttaatataatattcttttcaatgacaagctaaaatgccatatgatgttttttgtctttttactaaatgtgcctacagaccacttctggctcactgaaaccaaaataaaacaataccaaagtcccaaaattcagacctaataaggaaagaaggggagaatggtatattactcataaagaacaattaataatcaataatcaattaatgaaagtggaataataacaacagttcccttatatggctgttacaaagattaaagatgttaatacatgtaaactgactcaaacagtggcataatatgataattatcattcaataagtgatggcttttactacagctatcattattcatagcttcttcaacacacacattcaaatacattagtctttatctgaaatttgctctccaagctcaactcccacctccaacattcttattcttgtctaaataaatcttattcaccttttaggtatcagcttaaatatcccttcctccattaaaacttttctcacctggtccccaaccaagatagcattag

SEQ ID NO: 216984 - DNA, 472 bp, Homo sapiens
agacatcggactttgatttgatgctgaaacaagttaagtctttgggaaactattgagaagggatggttgtattttgcaaagtgagaagaacataagatttggggccccaggggaagaatgatatagtttggtttggatgtttgtcccctccaaatgtcatgttgaaatatgatccccaatgttggaagtggggcctagtgggaagtgtctgggtcatggggacagatccctcatgaatgtcttagtgccctccttgtggtaatgagtgagttcttgcaaaatctggttgtttacaaagggtgtggcacctccccactctctctctgtcttgctacatggtatgctggctgcctcttcactttccaccatgattgtaaggttcctgaggtcctcaccagaagccaagcagatgttggtgccatgtctgtaatagcctgaagaactgtgagccaaataaacctcttttctttat

SEQ ID NO: 216985 - DNA, 530 bp, Homo sapiens
ggacaacggagtgagaccctatcgcataaaaaaaactgcacttgcaatgacccagtttccaaataaggtcacattctctaaggtattgaggattaggatttcagcatatgaatttggggggttctcattcaacccataataatcaccattgctctactctccaactattacaatccccccagagtgagagcttctaggggcagggaatctgttttactttgtatccctactctgcccagttccaggagtgaaataggcactcaatagatattgattgaagaatcaatgaagaaatggatgagagtaacatttatttagcacttactaatttccacctttatgataatcattttaaccactttaacagggttttccatgtgccacccccccccccatctctgcattccagccaccaccgtgcctttgtggagtttctcagagctaccaggctcctcccaccacagggcctttgcacgtgccactgtcatcaggacactcttctttggcctctttacccttgcaacttctac

SEQ ID NO: 216986 - DNA, 525 bp, Homo sapiens
ggaaaatacttctatgtatatttcacagacatggcagtacagcatactaggtaagagtataggcactggagccagaaatttgcatttatagtttgtgccagtcatttcctagttttgttaccttgagcaaactgttcagcttttctgagcctcagtttcttcatctctaaaattggtatgtacttcagaaattattgcaaaggttaaaaaagatgatgcttgtttagcaatgtgctaaaaatactgaacatcatgcctagcacatagtaagcacataataaatgctggttaattcataataacagtaataacaatgatggggataacaacaaatattctatgcatattctataatgctttaacatcaggaatgtcttcagctgtaagtaacagaatacacaactatggtggcttaaacagataaggatttattaatctaacaagtctgacataggccagattgaatattaattattcaacaatttttatcaataatctatatgccagctactattctaggcacaa

SEQ ID NO: 216987 - DNA, 426 bp, Homo sapiens
cacggtagctcacacctgtaattccagcaccttgggaggtcaagaggggtgatcacttgaggtcagttcaagaccagcctggtcaacatggtgaaaccccgtttctactaaaggtacaaaaagtacaaagaaaaaaaattagccaggcttggtggcagttgcctgtaatatcaggtactcaggaagctgaggcaggagaatcgcttgaacccgggaggcagaggttgccgtgagccgagatcacgccattgcactccagcctgggggacagagtgagattctgtctccaaaaagacaaatctccagctagtttatgtaaatactccactgtcaaggaagaaagagtgtaactctctctttcttaggtgtaggctgcatgtagtgactcctttcaaagaacagtgtggaaatggggaaggagtaact

SEQ ID NO: 216988 - DNA, 597 bp, Homo sapiens
aaagttcctgggcggtggaaagcgacagttcctgcacttgcagctctttgccaagcccgattgtccaggatgtgttgagcaaagactcctgtgacccaaacgctggcagccagttgacatttgaccctgagcagcctcccacccctctaaggcccaccacacccaagccccagagccctcagagcccccagagccccggggcaggaagtgccagctgtcacagcaatcacagtgccctgtccgcgaattcagaggaaagtgaaggaagggcagaagagcctgctcagagagagccagggcctgtgtccttgcaggatcccctggaagccacacatggtgatgagggcagcaaggaccttctggtgaacattggtgtggcagccggcccagaagaaaaggagaaggaggaggtcgtccctgatggcccctggaggcgaagctcatcacaggatgaggaaaggacagaggcacagagaacccccaagaggagatggggctctgggagacggccaaggcctcggccattctctgactacggccagctggccagccgcagtttgtctattcctgaagactcggttgctgcagacccccaga

SEQ ID NO: 216989 - DNA, 639 bp, Homo sapiens
aaagttcctgggcggtggaaagcgacagttcctgcacttgcagctctttgccaagcccgattgtccaggatgtgttgagcaaagactcctgtgacccaaacgctggcagccagttgacatttgaccctgagcagcctcccacccctctaaggcccaccacacccaagccccagagccctcagagcccccagagccccggggcaggaagtgccagctgtcacagcaatcacagtgccctgtccgcgaattcagaggaaagtgaaggaagggcagaagagcctgctcagagagagccagggcctgtgtccttgcaggatcccctggaagccacacatggtgatgagggcagcaaggaccttctggtgaacattggtgtggcagccggcccagaagaaaaggagaaggaggaggtaagggcagcggcgaggtccctcatgtgggcgaccctcctgcgggaagggagcttgcacaggtgttgcccttggtccctaacctgtcaaggtcagtggccctctgctgaccttgttgcccttacagtattagtgggaatgggagttgtcaagttgctgtttaccaagttcagaagtaatctctatctcctttgaaataaattgacaatgtacgagattcattgagatg

SEQ ID NO: 216990 - DNA, 400 bp, Homo sapiens
gcaaagtccaagatgaaggtactggctggcaactaaactgggtgactaagtcaggtgacccaatacatacataaaagctagttgagccagtttgaggacatacctgaaagaaacactagtcaccaatgcatctgtggctgtttttttcttttttcaaagagattctcaggaggtttagtatttattcattttcctttaaaaaggggacagcgatgagacaaatgtttacatacctgtgagactttagatagtgcccattaaatctacattttacataaggcgaatgtttgaagaacaggagaaaagaagaaaaagatgtctcagggagaagcaaaggcatgattaatctcatgttttctttgttctgtgcctaggaagataagctagtaatcaatattat

SEQ ID NO: 216991 - DNA, 575 bp, Homo sapiens
gatgctacgctgcttccttataatttggctacagggcagtcttcaccactaactcctgtgtgttcctggtctttttgcttgacctctcagtttctgaatttatcttattatcagagagtttggcagctactcatctcaaaagattgctagtaagcccacttggagcatagttaaggtcaaggcactactttaaggagtttattcaattttgaaaccacctgaggaggtaggtaccatcacccctgccttacagatgaggtgatgaggcacagagaggttaagcaactagcccaaggtcacacagctagtaatagtgggctgggattccaatgcagggagtgtggctccagagtcccggctctctgaggttcaaatgagacgacgggtcttgaagtgttctacaaactgtctagcggtcacatctgacctgctgttttcttgaagacctgcatacatcaagggtgagagttcgagaccaattttcctacagatacaaatgttttaacaagtttacgcggtttccattttttgtacctgaagactagtgggatttttaggtcacactatttcaaatc

SEQ ID NO: 216992 - DNA, 473 bp, Homo sapiens
ggttttacatattcttctctattgtgacaatgtcactctgtcatcagaaggtggagtcttttcacttccttgaatctgagtggatccttcgactgttttgaccaagactatgtggtagaagcgaagttccagttccaggtattgctcttatttcacctgacaagtttggtttcctgccttttggaagctgaccactatgttagaaatgtaatcaccctgaaatcactatgtcgtgagaaacccaaaggcaagtgaagaagccctggaggatgcgacatcaagtgtagaggcaaaagagcaccaaggaagaggccaaagaacactaagtgaagaagccattttgaaaatggatcctccagccccagctgccctagttgttacgtaaatcagataaattgcccagtggtacccttcccaatttctgccccataaaatcatgagccaaataaaatggtttgttttaagcttcaaaa

SEQ ID NO: 216993 - DNA, 628 bp, Homo sapiens
agcacctccctttggctgtagtccccaaccaggcagccagacatctgtctttcttaccccacaaccacaaacccgggatgtggctctgcagacaccctctacatggctgctgtctgtagggctggggctgaggtgggatcccagctccagtcctctctccttccctcactttctggagcctgtcagtcaacctaaaatctctggtatctgaaagcttcgatgttccctacttaatttatattgtggtttcaaaaaagccaagagtaagtccctgcccaaggccatagaggggaagttatggaaagcttcagggtgaccgccctgaacccagtctcgtggttgaaggctaggagtccatgttctatgctagagaagtgaaacgttagccctcatgggtactgtggagatggtggggactctgactccagattaaaggtccatttcagctaccctgggccaaaggttgtcttaagacattttggatgtggaagttgccaggcctgggggtaagaaagcaggtcacaggctaccttactgaggtgactattagctacatggcatgagtagattaaaaaaaccatagactgcactgtactccagtctgggtgagacagaccgtgtctcaaag

SEQ ID NO: 216994 - DNA, 467 bp, Homo sapiens
agcacctccctttggctgtagtccccaaccaggcagccagacatctgtctttcttaccccacaaccacaaacccgggatgtggctctgcagacaccctctacatggctgctgtctgtagggctggggctgaggtgggatcccagctccagtcctctctccttccctcactttctggagcctgtcagtcaacctaaaatctctggtatctgaaagcttcgatgttccctacttaatttatattgtggtttcaaaaaagccaagagtaagtccctgcccaaggccatagaggggaagttatggaaagcttcagggtgaccgccctgaacccagtctcgtggttgaaggctaggagtccatgttctatgctgagacaggagaatcgcttgagcttgggaggcggaggttgtaatgagttgaggtcatgccactgtactccagtctgggtgagacagaccgtgtctcaaag

SEQ ID NO: 216995 - DNA, 473 bp, Homo sapiens
caccttctcatacctgcactgaaccagctttgtcatcctgccagtaacctcacttatgagttaaataaaatcctaacatatgctcccattacattaaacattcacactttcagaagtcagtggtagacaagaagccttttattttaattcactgacagacaaatcagcaagcaattgatatgggggcgagagaagggagttgataatgggctgaacattagcatcccccccaaattcatatgttgatgccttaacccccaatgtgatggtatttggaggtggagttgttgggagataaacaggtttagttgagatcgtggggtgagcccatgagaggacacagtaaggaggcggcagcctgtgagccaggatggggaccctcacaatgaagcaaaggtgccagcaccttcatcttggaattcccagattctagaactgtacgaaataaatgtctgttgtttaagccaaacagt

SEQ ID NO: 216996 - DNA, 419 bp, Homo sapiens
aaggaagggcaggcagggtttagggtaactctggttaaagcctattacatggccttgtttcaaacagtgccaggaaaatgttcttttcttactaagatattatttttctgcacttttagattttatttttctttcatttttttttctcctctggtctcttaatgcagacttatgctaaaactgattacaaatgaaatcagatcaatgacctacaaaattaaaattaaatattacaccattgttgaattgattaattctatttaatgttaatgaaagattattaacttttgtaaggtagaacaaaaatgtgtatagtaaataatatccaaaaaagtacctgatgaattactgttatcttagtatatagttttggttcctgtttcacaaaattgtaattttttgggagatagatttctagt

SEQ ID NO: 216997 - DNA, 503 bp, Homo sapiens
  misc_feature (184)..(184): n is a, c, g, or t
  misc_feature (222)..(222): n is a, c, g, or t
  misc_feature (380)..(380): n is a, c, g, or t
  misc_feature (489)..(489): n is a, c, g, or t
agagagcacagaggacagaggaaaaataatatctggatggtttctgagaactttccaatatgataaaatacgataaaagatgtgaattcatacatacaggaagtacaacatattgagcagaataaatagaataaataaacatctagatacattgtgacaaaactacaaaacaccaatgatatcnttaaaagcagggagtaaaaagagatcatctacacaacnaatgaggattagactgaggagacttctttacaaccaacatgtatcaggcctattatatgcccacactgtcctaggtacttagaacacaagtatgaacaagccaggcccagcccctaccctgtggagctacagaacctctaacagggatcgaagatgtngcagtaacaattatagtgtgatgagcgatcctggttggagggcaaaagaatcggcaagaaaacaataccatagaacagcattatgaagattttcctatcccacgtaggnatccacacagggac

SEQ ID NO: 216998 - DNA, 454 bp, Homo sapiens
ccacgcgtccgcaggtgcctgtagtcccagctactcaggaggctgaggcaggagaatcacttgaacccaggaggtggaagttgcagtgagccaagatcctgccactacactccagcctgggcaacagagcaagaatccatctcaaaataaaaaaaaaaaaaagaaaaggaaaaagaaaaaaatctcaatgcaatcccaatcaaaatcacaacaggcttcatatatatatatatatatatatatatgaatcctgttgggatgtctggaaatattgagggctaattgagcatcttctctctctctctctttctctgtgtgtgtgtgtgttgtctcttcatgtagtgtatccccatggctagttgggcttccttaaaacagggtagtcagggtagttggactataaacgtagcaggtgacaggtgaccacctccctcaaggcaagatttccaaaaaa

SEQ ID NO: 216999 - DNA, 537 bp, Homo sapiens
aagtttgtactttaatttctcattaaatacttaatagatatctcttttttcaagttactcaatttatatgggaaaacagaaacataagcaagtcattgagatgcaatgtgataaatactataggggaagttaatttatcatgtcctcaaatatatgtatattactctaatgataccactctataataagtgctgcagatttaactgcgagcaaaatatagaggacctgccctcacataatttacaggtagaaattaatcaagcaatcattcaaataaatgtaagtgcaaagtagagaaaagaaaaaagagagtaattaaattatatggaggagataatatttgagctagaagaaatagcatctgcactgtattttgaagatctgaaaggaatttttcaggcacacaagaggacaaaagagattccagatagaaggtacagtgggcacaaatgcttggaggtgtaagatgtttgtggagcaataaagtaaggagagctagtgcatgtgttgtgtttagggaaatggagggtgagcctg

SEQ ID NO: 217000 - DNA, 257 bp, Homo sapiens
catcatttaccaccgcagatccgagcgctgatgggcaggcagatagccctctgctgggggcacgcgggctccccgtgcccgtaccactcgcctgcctgccggggccactgagtgtgcgccccggtgtgcccggcgtgtttggatggacacgtgggtgtgccagtgcatgggctaacgccgatgcaactgtgcgggtgtgtcaaacaagtgtaccacaaaaaagtgcaggtgtgcgagcccatccatgcacacgcatg

SEQ ID NO: 217001 - DNA, 405 bp, Homo sapiens
aaaaaaagcctgaaccttcctaattccttctccccctcactaagatagtaggctgctgaagaattaaaagacacctacagaatgtatcctaggagaaggttctattctgagagccctagagaataggctggactgagaagtaatttctactgtccagcctcttagttgaacagatccagcagtgggaaggcaaatttctccttcctactcttcaaataggatcgaagaccatttatagccctgctgcaaagctgacactaacttttttaacaatgaagtaccatcccaggacagggggtggtgctgtactgggccgatcctcaatctcaagttcaaagaaaacgagccctgtgaagaaagggtccaactggtgtggaggatgggagagacctataacctacacag

SEQ ID NO: 217002 - DNA, 356 bp, Homo sapiens
cccgacacagcactggcctcctgggaaaagggcccttgaaaacctttgacctcccactcccttcccggccatcagtctcagaaccacagaagccagttcatgaaggtcttggttctctctgtgacccaggcgtgggaccccatgaaagacccctactcttccccagaactctgcccagttcccccagcaaatcactgtcccagctctctccttcagccctcattcttctccaagaagcacttttcattcttttttcttctgtctcctccatattccacgttctgatgatctttttctctaaatgctgctagtgtctgctcatcttttccatttctaccccaccctctacctcagca

SEQ ID NO: 217003 - DNA, 1447 bp, Homo sapiens
tcatggccgccccgccgcgccccgcgccatcgccccccgccccgcggcgcctcgacacgagcgacgtcctgcagcagatcatggccatcaccgaccagagcctggacgaggcacaggccagaaagcatgctctgaattgccatcggatgaagcctgctctgttcagcgtgctctgtgagatcaaggaaaagacagtggtaagcatccgtggcattcaagacgaagatccccctgacgcccagctcctgaggctggataacatgctgctggctgagggcgtgtgcaggcccgagaagagaggaagaggaggagcggtggccagggccggcacagcaacaccaggtggctgtccaaatgacaatagcattgagcactctgactacagggccaagctgtcccagatccgacagatttaccactctgagctagagaaatatgaacaggcctgtcgtgagttcaccacgcacgtcaccaacctcctccaggagcagagcaggatgaggcctgtctcccctaaggagattgagcgcatggtcggcgccattcacggcaagttcagcgccatccagatgcagttgaagcagagcacctgtgaggcagtgatgaccctgcgttcgcggctgctcgatgccaggcgcaagcggcggaatttcagcaagcaggcgacggaagtgctgaatgagtatttttactcccatctgaacaacccttaccccagcgaagaagccaaagaagagctggccaggaagggcggcctcaccatctcccaggtctctaactggtttggcaacaaaagaatccggtataaaaagaacatggggaagtttcaagaagaggctaccatttacacgggtaaaacggctgtggataccacggaagttggggtcccagggaaccacgccagctgcctgtcaacacctagctccggctcctctggacccttcccgctgcccagcgctggggacgccttcctcaccctgcggactctggcctctctccagcctcctcctgggggaggctgcctgcagtcccaggcccagggtagctggcagggggccaccccccaacctgcaactgcctcacctgctggagaccctggcagcatcaactccagtacatctaattaagtttgggggataagcaggaaagagcgctgcgtgagctgccatgtatcgccagccgttgctttgttactgaacgtgccgccgacgacctcagaaaacccagatgggtggtggtgcccatgagcccctgctcctcagccaggcccgtggcgccggctcatgtgtctgctgcgactcgagatggcctgaaacgccactcattctcccacttcagttcgtttttttgacagtaattttatggtaacgctatgaattgaattgtctgttctaggactgggcacagattttcccattaaaatttttgacttattttaaaaaaaatg

SEQ ID NO: 217004 - DNA, 622 bp, Homo sapiens
gatggtggggggagatggggaggaggctcagcctccacgatctgattgattgtgcacaggaggccctgcctctgcttttgaggggccagcttcttgctgatttgagacagcagggagagcgtgaggtgagtgttttgcttagtcccataccctgatgggctctgggccgggcctgcggttctatgtaattccatccagtcagttgcctggggcagctccgttcacaactggggcttgcggccagcggagtgaccactgacagccacatgactggaaagtggcagacccgaggggtcagtcagggcatctgatttaatccatgggttagccttctccctatggggctggggtcccagagatggttcccacttgctgtgggaaggaggcgggagcacagcccgctgccaagtgagagcactgctgagtgggtgagggggcaggtgagcagcttggggaagtcagggcaaaggagggttccctctgagccttctgcttttccccacgtctttgttcctggggagaaaaattaaagcaacttggggttatgttactgtcttagtctactcaggccaccctaacaaaatgccacagactgggtgattttttttttttttgagacgga

SEQ ID NO: 217005 - DNA, 1701 bp, Homo sapiens
gatggtggggggagatggggaggaggctcagcctccacgatctgattgattgtgcacaggaggccctgcctctgcttttgaggggccagcttcttgctgatttgagacagcagggagagcgtgagaaaatgaattgtgacttgtcccggtctctcttatctagtggtaagcatccgtggcattcaagacgaagatccccctgacgcccagctcctgaggctggataacatgctgctggctgagggcgtgtgcaggcccgagaagagaggaagaggaggagcggtggccagggccggcacagcaacaccaggtggctgtccaaatgacaatagcattgagcactctgactacagggccaagctgtcccagatccgacagatttaccactctgagctagagaaatatgaacaggtgatctttctgcatggaagagtttctgtcatgtgaatgcgcatttgtcaaagcgaaacacggaacgctaaccacctttctttcgtggcgcagaacagggagtccatgcagttggtcgctgcagaggtggtccattgttactgaaagccctttccatttacttaacagtcacccgccggtgtgtgaactacagggggtggcaggcggctgctccgctgtggaacctgctgccctgtgccaccctgctgcctagtcacaggccggcgtgtctgtgctcccaccccaggcctgtcgtgagttcaccacgcacgtcaccaacctcctccaggagcagagcaggatgaggcctgtctcccctaaggagattgagcgcatggtcggcgccattcacggcaagttcagcgccatccagatgcagttgaagcagagcacctgtgaggcagtgatgaccctgcgttcgcggctgctcgatgccaggcgcaagcggcggaatttcagcaagcaggcgacggaagtgctgaatgagtatttttactcccatctgaacaacccttaccccagcgaagaagccaaagaagagctggccaggaagggcggcctcaccatctcccaggtctctaactggtttggcaacaaaagaatccggtataaaaagaacatggggaagtttcaagaagaggctaccatttacacgggtaaaacggctgtggataccacggaagttggggtcccagggaaccacgccagctgcctgtcaacacctagctccggctcctctggacccttcccgctgcccagcgctggggacgccttcctcaccctgcggactctggcctctctccagcctcctcctgggggaggctgcctgcagtcccaggcccagggtagctggcagggggccaccccccaacctgcaactgcctcacctgctggagaccctggcagcatcaactccagtacatctaattaagtttgggggataagcaggaaagagcgctgcgtgagctgccatgtatcgccagccgttgctttgttactgaacgtgccgccgacgacctcagaaaacccagatgggtggtggtgcccatgagcccctgctcctcagccaggcccgtggcgccggctcatgtgtctgctgcgactcgagatggcctgaaacgccactcattctcccacttcagttcgtttttttgacagtaattttatggtaacgctatgaattgaattgtctgttctaggactgggcacagattttcccattaaaatttttgacttattttaaaaaaaatg

SEQ ID NO: 217006 - DNA, 1665 bp, Homo sapiens
agtattcctttctcccgaagggttctatgcaaaaatcttcagacataacaccagtgctcacattttctcatggtttgttttctctccagaaaatgaattgtgacttgtcccggtctctcttatctagtggtaagcatccgtggcattcaagacgaagatccccctgacgcccagctcctgaggctggataacatgctgctggctgagggcgtgtgcaggcccgagaagagaggaagaggaggagcggtggccagggccggcacagcaacaccaggtggctgtccaaatgacaatagcattgagcactctgactacagggccaagctgtcccagatccgacagatttaccactctgagctagagaaatatgaacaggtgatctttctgcatggaagagtttctgtcatgtgaatgcgcatttgtcaaagcgaaacacggaacgctaaccacctttctttcgtggcgcagaacagggagtccatgcagttggtcgctgcagaggtggtccattgttactgaaagccctttccatttacttaacagtcacccgccggtgtgtgaactacagggggtggcaggcggctgctccgctgtggaacctgctgccctgtgccaccctgctgcctagtcacaggccggcgtgtctgtgctcccaccccaggcctgtcgtgagttcaccacgcacgtcaccaacctcctccaggagcagagcaggatgaggcctgtctcccctaaggagattgagcgcatggtcggcgccattcacggcaagttcagcgccatccagatgcagttgaagcagagcacctgtgaggcagtgatgaccctgcgttcgcggctgctcgatgccaggcgcaagcggcggaatttcagcaagcaggcgacggaagtgctgaatgagtatttttactcccatctgaacaacccttaccccagcgaagaagccaaagaagagctggccaggaagggcggcctcaccatctcccaggtctctaactggtttggcaacaaaagaatccggtataaaaagaacatggggaagtttcaagaagaggctaccatttacacgggtaaaacggctgtggataccacggaagttggggtcccagggaaccacgccagctgcctgtcaacacctagctccggctcctctggacccttcccgctgcccagcgctggggacgccttcctcaccctgcggactctggcctctctccagcctcctcctgggggaggctgcctgcagtcccaggcccagggtagctggcagggggccaccccccaacctgcaactgcctcacctgctggagaccctggcagcatcaactccagtacatctaattaagtttgggggataagcaggaaagagcgctgcgtgagctgccatgtatcgccagccgttgctttgttactgaacgtgccgccgacgacctcagaaaacccagatgggtggtggtgcccatgagcccctgctcctcagccaggcccgtggcgccggctcatgtgtctgctgcgactcgagatggcctgaaacgccactcattctcccacttcagttcgtttttttgacagtaattttatggtaacgctatgaattgaattgtctgttctaggactgggcacagattttcccattaaaatttttgacttattttaaaaaaaatg

SEQ ID NO: 217007 - DNA, 1924 bp, Homo sapiens
gatggtggggggagatggggaggaggctcagcctccacgatctgattgattgtgcacaggaggccctgcctctgcttttgaggggccagcttcttgctgatttgagacagcagggagagcgtgagaaaatgaattgtgacttgtcccggtctctcttatctagtggtaagcatccgtggcattcaagacgaagatccccctgacgcccagctcctgaggctggataacatgctgctggctgagggcgtgtgcaggcccgagaagagaggaagaggaggagcggtggccagggccggcacagcaacaccaggtggctgtccaaatgacaatagcattgagcactctgactacagggccaagctgtcccagatccgacagatttaccactctgagctagagaaatatgaacaggtgatctttctgcatggaagagtttctgtcatgtgaatgcgcatttgtcaaagcgaaacacggaacgctaaccacctttctttcgtggcgcagaacagggagtccatgcagttggtcgctgcagaggtggtccattgttactgaaagccctttccatttacttaacagtcacccgccggtgtgtgaactacagggggtggcaggcggctgctccgctgtggaacctgctgccctgtgccaccctgctgcctagtcacaggccggcgtgtctgtgctcccaccccaggcctgtcgtgagttcaccacgcacgtcaccaacctcctccaggagcagagcaggatgaggcctgtctcccctaaggagattgagcgcatggtcggcgccattcacggcaagttcagcgccatccagatgcagttgaagcagagcacctgtgaggcagtgatgaccctgcgttcgcggctgctcgatgccaggcgcaagcggcggaatttcagcaagcaggcgacggaagtgctgaatgagtatttttactcccatctgaacaacccttaccccagcgaagaagccaaagaagagctggccaggaagggcggcctcaccatctcccaggtctctaactggtttggcaacaaaagaatccggtataaaaagaacatggggaagtttcaagaagaggctaccatttacacgggtaaaacggctgtggataccacggaagttggggtcccagggaaccacgccagctgcctgtcaacacctagctccggtgagtgaggctggcccagggacagtcatctgtacccatgtggacggccactgagctgcatctggggaggccacagtgggaccacatctcccttcccccagtggtcaactctgtgtaactctttcttctgtttcaactgtgagagttctgttcctcttggccatgatcccaaccaacagatacctgtgctttggggacagaatggcgatactaataagaaaagacatgaaaggtctgggtgcggtggctcacacctgtaatcccagcattttgggaggccaagatgagtggatcacctgaggtcaggagtttgagaccagcctggccaacatggtgaaaccctgtctctactgaaaatacaaaaaaaattagccaggcatgggctgggtgcagtgcctcacacctgtaatcccaggccgaggcgggcggatcacgaggtcaggagatagagaccatcctggctaacacagtgaaaccccatctccactaaaaatacaattcacaatagcaaagacttggaaccaacccaaatgtccaacaatgatagactggattaagaaaatgtggcacatatacaccatggaatactatgcagccataaaaaatgatgagttcatgtcctttgtagggacatggatgaaactggaaatcatcattctcagtaaactatcgcaagaacaaaaaaccaaacaccgcatattctcactcataggtgggaattgaacaatgagaacacatggaca

SEQ ID NO: 217008 - DNA, 563 bp, Homo sapiens
gcagtcaaaatgcttcagctgcaggtaataggaagtccagctcaaaccggtttaagcggaggccaggggctgcagggtgggcatctcccatggcacctgctctggtccctcagtccccctgagtggtgcacacttccctccacaaggtgtgttgccgggtggccacggctgtcctgggctcgcatttgctcatgacagtgtctggagagctccgcctttgagggctcttcctggggcctctaacgagagaggactggggggaccacgacaaaaaatatctgggttcttgagacagcagaaaaggtggtggaagctgggtgagtagccagacagtatctactagaatttttttttctccaatttaagtttctccctggtgagttcttaacccgccgctgactggccaatgctagcagacggacacagggaacaaacaagtggcatattaatcttcatggaaaagcctagaaacgggcagtcctttcacagcagttctgtgtctacagtgaacacatgggctgtgtttaactgtgtaaacacaataaagttgtgttatggaagtg

SEQ ID NO: 217009 - DNA, 221 bp, Homo sapiens
gtcttgcaggaggaaatggcccatggagagagagagaagccaaggatcacaaggcaccagacccagaacttttaatattacagaattttaacaatttctctgattctatactgtatctctcctatgcttaaagtctagaatcccaatggcattcattaacataatcactgatcttacaatatatatacaataaatttatatacgataaataagatcactga

SEQ ID NO: 217010 - DNA, 472 bp, Homo sapiens
ttaaaatatattacattttgtttagggtcaaaaatgttttctgcttcagtaactactgccagtttatgtaaccccatgttattatctagatattccatcattccaatttctcaaggctagtatgaggattccttggttagtattttttacaaagcaacattgtatatagttccagttaaccacattaagtgctaacttcaggttctaccactaggaattaaatatttctttgttaaggttacttttcttgtattaaaaatactgccctgtggctcctctcatgcctgtaatcccaacgtgctgggattacaggtgtgagccaccgcgcctgtccctattgctcactttttaagcctgttccccagataggattggagaaatatgccaattatcacaaatgtttttactacatttcttcttgctttatgaattgctgtattaactgcagtaaagctatgaaaatatttcctag

SEQ ID NO: 217011 - DNA, 470 bp, Homo sapiens
tataggatctaacttgtgtcctgaagccagacacactacaaagcaaaccattaagacagtgagtcccaagaatttttgactcaagattttcatgtaatggctcacttagaaaatactgaaggaaagtcagctggttgaactgaagaagctgctcctggctggagatactcggcatcagaacttcagcctcatgcatccataccttaacccctctgcagttcaccagctgggaagctcccaattaataacattaagtggaaaaagactaaaaatttcattattaccaaaatgagtacaacaaggcattcaatgaactctaacttctgtatttcattaagattttgggaaaataaacttggaagttttatttcttaatatgataatctgtgggtattttaaaacagaaactaagagtacacacaaaccaaaagtgttccctttataatacaataaagatgcttcttgcctct

SEQ ID NO: 217012 - DNA, 544 bp, Homo sapiens
gctgtgtgatcttagattaggcactgtttctctctgcctcaacattcttgctcctaaagtggggttaattatatataccttgcagggctattctgagaattaaatgagttaatgcagaagttctgagcctttttggtctcaggactcctttatattctcaataactactgagaatcccagagagtttttatttgtgtaaattatagctactcatgtttattgtattagaaatcaacttaattcattaaaaaaccgattgtggccaggtggtgtggctcacacctgtaatcccagcactttgagaggccgaggctggcagatcacaaggtcaggagatcgagaccatcctggctaacatggtaaaaccctgtctctactaaaaatacaaaaaaatttagccaggtgtggtggcaagcacctgtagtcccagctactcggaaggctgaggcaggagaatggcgtgaacctgggaggtggagcttgcagtgagccgagatagtgccactgcactccagcctgggtgacagagcgagactccgtctca

SEQ ID NO: 217013 - DNA, 482 bp, Homo sapiens
ccgcctcagcctcccaaagtgttgggattataggcgtgagccaccgcacccggcctgaaatctttcttcacttaaaatattgtggccatctttccatatcgatatatcagaaccaccttccaaagaactggctcaaacagaaaagaaagcaaagagtcaagaatgatgccaaactttcctgactagattaggagcctggagtgtactaagaaagaaatgggcaatttcacaatggaagaaagaggattccacttttggaacagatatcagaacaaggaatgcacatttatgattcataagcatggatctgagaaagaatgatctaagtgcagaaagaaaaaggtaacaaatacttattggacacctagtgtatacctggactgcaacaggagccaggagacatggaagaaacaaaagtatataacgtaaaaggcagaactaattctaacgaacaaatagctaattgcaagtgtgaagagctc

SEQ ID NO: 217014 - DNA, 416 bp, Homo sapiens
caaagccggaagcatcacattacccaacttcaaactattaatagaagggtagaaataaccaaaatagacatggtactggtacagaaacacaaacacatagaccaatgtaacagaatagagaacccagaaataaagctgcacactaacagccatataattttcaacaaaggcaacctcagcaatggtgaaaagactccctattcaataaatggtgctagaatagctgtctaggcatatgcagaagaaggaaactggactcctatctttcaccacatacaaaaattaactcaagatgaattaaagatttaaatgtaagatctcaaactctaagaatcttagaagaaaacctagaaaacaccattctgaaccttggccttgggaaataatttatgactgagtcctcaaaagcaactgcc

SEQ ID NO: 217015 - DNA, 517 bp, Homo sapiens
cgttagccaccagggggccgcctgcttggaacaagtggtgtagacgccacagcttttctccaaaccaaccaaaacattccggggcagctttggagcaaagcccaggaacttccctgcaaaggagaacagctctccaactacagaagcctgcaagtcctatggtgcagacttattaagagtagagaagaaagcacggacttctcaccgaggaccaaagggaaatggggtctctggggcctgcaactttcttaaaagtgcatcagtgaaaccctgcttatccagcggggtggttgttaatgctgtcagcaggggtggggggcctctcacccctttccctgggacgctcagaagaagcgagaataaaacatacatgtcactggctggaaatctagagaaccttccaataaataacctatacattgtcaggcagctgaggatccatatcgtcataactctattatactgcgtgttacacgaatagatgtgaatattaaattatgatgtcggaattatttta

SEQ ID NO: 217016 - DNA, 401 bp, Homo sapiens
gtattttattctgtgactggtacagagctaataaaagttcttagcaaaggaaggagtgatgattgggactgaagaagaatagcactcctaggctgggtgcgatggctaacacctgtaatctcagcactttgggaggccaaggtgggcggatcatgaggtcaggagttcaagaccatcctggccaacatggtgaaaccccatctgtactaaagatacaaaaaattagccaggcttggtggcgtgtgcctgtaatccaagctacttgggaggttgagaaaggagaatcgcttgaacttgggaggcggaggttgcagtgagccaagattgcgccattgcactccagcctgggcgacagggcgagactctatctcaaaaaaaacaaaaacaaaaacaaacaaaca

SEQ ID NO: 217017 - DNA, 495 bp, Homo sapiens
aggggactccagtgggagggtctcattctttaaggtctctggcgtgctgttccagagtttacccatcaacaattcttactttaattttttggagccagggtctcgctctgtcgcccaggctggagtgcagtggtgcgatcatggctcactgcaacctcgacctcccgggctcaagcccggcctcctctggcttcagcctccccaaaaacaaaaagttattttaacttaacagaaattgctcatattacattctaatcccctgttttctggattggactttagaggagaagaaggagatgcaaagagaaacttgctgcattctagattaactcatagaacaaattatttctgtcctcctaaagataatccttaaactttactggcttaaaactggtgtgacatttcgcattatatgtgtattttgctttataaaatatgtgcattcctgaaagcttgtgtataaattgaattgtaataaacgactacagagagact

SEQ ID NO: 217018 - DNA, 434 bp, Homo sapiens
ccacacccctcagacagcaccgtctttcctctgcttggaaaggacccagagagcagggatgagcgtatagttcctcagatgctggtggcttggcaccccaagacacaggcattctatgttggcatccactgaaggacctgtgtggtctttggggcactgtgtggcactagctgccagcccatgaggtcacttatgtctaaatcgtctctctctctcctgatccaagccccactgcagtcagccctgaagggcttgacgcctccctgtgtagtcagcagggccctttctcactgttctctcccactgtggtcacgtctctgaactttggtccatgatacataaaaacacattagcccttttctactcttgagagcttgatttctcatcttgctatgagtaaagagagtcactttgaaactcaagctgagcagtgt

SEQ ID NO: 217019 - DNA, 512 bp, Homo sapiens
caaaataattacttgaattgccatagaataaccgaaagcaaaaagatattgtttggaaaccactgatatttatgagctggccataagagctactataagtattaaataacttcaagatataacctacagggtcagtgactcagaggtatgatagtaaatcgtatttataacaaataaaaaaccataatggtggtgaaacaatggagaacacattcatgaattcattatctgtcaatcgttttggaatatgatatatgttcttgctcctcctcaatttccgattttcttttttcaaatctttattgggtattccatatattgtaattttatataacatttctttttttgttgttttttgcatttctagtaaaaagaaagaattggaaaaggctgtagtcaaaaattttatcagaaacttggaaggaaacaaagtgatgctgggcatggtggctcacccccataatcctagcagtttgggaggccatggtgggcagatggcctgagctcaggag

SEQ ID NO: 217020 - DNA, 482 bp, Homo sapiens
cagaacagggaagagttaagccttctgctcacaagtattctgagatgctgacatgccccctgggcaagccagatgcatcttgagcaatgccaatgattttataaatatgctggagccttgaatgaatgtaaaaggctagatgtataactcactattcaagtgattattattcccccaaattgccctccactgcattccagtgggatgagtcacaggaagcagtggccacacttaacatttatttagtctagaacattttaatgacaagaccacaaatatatgctcttttttcattgaaaattaatctaagttgcacagaatatatttgttcaacataaaaaatttcaaataggatagtctctcttgacatttccttcaattccaatccctgtccctgaggcagtactgtttgtgttcacccttttatgtgtgtaagtgtatgcatatatgtgtcaaggaaaatatacggaattattattttt

SEQ ID NO: 217021 - DNA, 393 bp, Homo sapiens
gaaatttaagaatatgagaaattcataagtgtttatactttgaaccagtaaaattcaactgttggaaatctattatgaggaactactctaaattcagaaagccttcaggtataaagttggctaccctggtgctctttttagcaacatataatcaaaagcaacctatcataatatcacaaaaaagtgaaattgtctctggttcaacaataattaaagcaatgcttatgaagattaataatttggaaaaataatcaagatataaaacagtgggccgggcgtggtggctcacacctgtaatcgcagcactttgggagcccgaggcaggcagatcacaaggtcaggagatcgagatcatcctggctaacatggtgaaaccccgtctctactaaaaat

SEQ ID NO: 217022 - DNA, 809 bp, Homo sapiens
ttttgagacagggtcttgctttgttagccaggctgtagtacagtggtggcttagcttactgcagccttgatctcctgggcacaagcaatcctcagaaagacctagtctgaaaaaagtcctttctacaacacttcatcttatagcaattactacattctgtagattctctttttaaaggtctatctctttgactagaatgaagggaagggagaaagactgagaaggaaaggaaggagggaaggggaaactggtccaactgggaagccatgcaaatgctatcaatcacctttgctaaagagcttcattctggaggtttcagatgaagaaatctgccaatgccacctttaagggttcatgacaggagattctctatcagatctaagagcttcatttatcttgtacctatgttaattcaccctattttctgttaactcaggtctctctccgtcatttacatagcatttgagatgactgagtaaagtgtcataaaaatccaccaccattaccttaattttgagtgtagcagtgtttagggtgagaattaaaagatgaattgtgcgtctgcacttagagtagagacaaaagcattccaggcagaaggaactgcctgtgtgagggccctgaggcagcaaagaggttcctccctttatcgttcttctgcctctcagaactcttattagataacactaataaaatgacatctggattgtctggtacattatcagacatttaataaatgctagtttgattcccttccttctctatgccattctttactgtgtagaggtcaacccttctgtcgtcttctc

SEQ ID NO: 217023 - DNA, 1031 bp, Homo sapiens
tatgtgatttgaggcaaaaaagaaaatataatactttaaatatttttacaaaggcattcgcagaaccactgactttcccccattctgatctgctggttatctatagccctgcctacttcttccttcccttaattttttcattccaaaaaaatacgtgatgcctcctacgtgcaggccctgtggtacctgccagggacaaacagtaaataagagaaagactttatgctggggaagctcccattttgggagtagatacaaaaatggactagagaatgacagtagagtgactgtcactatattagtcacaagtacagaattctgtggaagcacagtgaaaaatgacctaactcagccttctgggggttatgaagagctgtccagaaaggcaatgtttcagccaagatctcaaagatgaacaagtagtgttagcccttcacagggacaaggcaggtgaggaaacgagggagggtatcccaggttaaggaaacaggaggcagcaagagaaatgtctgggctgttttctgacaaacacacaaggttccgtaagattgcaggacagaaagaaacaaggtgagctagaaccagctcaggcatggacttgtgtgccgtgcaggataattcaaaattgactgaggaaattgatgacccagagaggggcttaagcatacaatgaaaagatcagtttagcttaaaattttttatttttgctttgtaagaataaaattaatcatgtataataaaaaattcatcaagtaaggaaaggcttattgaggaaaacattaatttctggctcccgccccctcatcttccatctctgaatgataagaaatcatctttagttctttcagttgtttttttcttgtagttacctccatactaatttttaagctatgttgctggttctgcttgacatgataaaaccctttagctttttctctgaacagtttaagatcagaagttcaaagatgtacaagtaaagtttctagtaattagggcaataaaaaagccaaaagtaacacaaatacattttc

SEQ ID NO: 217024 - DNA, 406 bp, Homo sapiens
tcggataagtcccagggctcctggcgctctcagcctggcatgcgaggccctctgcgcctgccctgccctgtcctcaaactctcccctgagagctgcgtctccgtcgcccaggctgtgccctcctgtgcccgacttagaactgttcggaataacactcaaaattttaaggaaattaaacactcgaacaaaggatttttagcaaagcaattttacttctgtacagaggggtgcttgtccttggccagtcgccatgagagcacacctgaacaaagggacacgagagcctttattcctgatgcaagtcctgctcctgtaccctctccccattggccggggtcgggtcatacaatctaaaccaattttggttggctaaacatttgaatttttgtagataaggtgggcacgt

SEQ ID NO: 217025 - DNA, 350 bp, Homo sapiens
ggaattcgagaccagcgtgggcaacgttgggagacctcatttctacaaaaaaaaaaaaaaaaaaaaaaaaagccaggtgtgatgatgtgcaactatggtcccagctactcaggagactgaggtgggaggatcacttgtgcccaggagcaatgagctgtgagctgtgagtgtgccactgcactctagcctggggtaacagaacaagatcctgtctcagggtgcatctgttgttttccacctctattgtatgtgttttttttctctaagccaataggagtaagctacaggatatgacaccccttgacctcttaatatttcagtgtatttcctagaagcgaatgcattatcct

SEQ ID NO: 217026 - DNA, 316 bp, Homo sapiens
caatcctacaaataaatacatttaggatgatcccagcattccaattaactgatgtgaaggtgaaaccatgaagtgttgaaatctaaagtattaataagcaacgttttattctattaattaaaagtacattaatcaataatttctacaatgttgattaattcaccaaaatgctgcttctgagcattactgtcaaatttacttattacttaagactgtgtttactaaatggaatacattgttaggtactatagagtacctaacaattaaaatattccctcctcctctaatacataacttatataagacagataaaaaa

SEQ ID NO: 217027 - DNA, 491 bp, Homo sapiens
attgaaggaaatgaaaatgagaattattttatgctctatgttttataatgaagtaaaatttccgaaattcccagtatttccctatctatattaagtgtatacttgtgaattcatactgttgtacatgtgtcaacaataattaatgcttgaatagagttgcctaatgtaaagaagatggccttcatacagacaatcttattggtacttcatgcaaaccctgagagaggtcatgactggcttaagggaatacaaatgttatgtgtcaaacccaggcataaaacccagacattaactaaattagcactaatttaaagatgtgtgtctatgtatgtatatgtatgtatatccctaaagatagctcaatggtaaattatttcgccattcagtattgaatctaatgaaaactaagaatttgtagcaactaaatgatgctatacgcaagttcattttttagattgaaaggttatctttgctttctttctgtggaatta

SEQ ID NO: 217028 - DNA, 316 bp, Homo sapiens
gctgctacaattatctgactacaatctgtgaaggcatcacagaagaggtgacagctgttctgggttttgaagtttacataggagtttgccaggtgaagagaagagagaaagtaaaaggaagaagcctgagttctgaatgttccaaagcaaagtactttggggccagcagggtggggctgtggggatctttagtggggccttgatacagggaattacagtagccccagaaactgtggtaagtacttacatttttatgtaactctaaattcttccaaaaatggccagggctcggtggctcacgcctgtaatcccagca

SEQ ID NO: 217029 - DNA, 598 bp, Homo sapiens
tcccatatggcctctcttaaaaaagaaagtcctgattaagaagcaacttcgtattacctctgaagattttcatggctgctgcattgagatattattctaagctaatagattgtcaatcacattatttacataactccttcaatcatttgtccatccagtatatactgagcaccttcttcataccaagccttgttttaggtactggggatacagcagacaagaaccactgccctcatggagctttcactctactccttgcaaatgtacattctgctaggtccgtgcagcccaaacggcaggtgtaacatcatgaggctactgccgctgaaccatcatctttccattttatattcattaactcttttttatttagtccacattgagtcacatgttaacttgcaggtccagatattcagccaagagtggagtaaagaggagatagagtcttctgatgcatgatacttaatattagttcattcattggctcagcaagtatttatcaggagcctacttctagcacctattgtgctaagtgctagtaatgcaaaaattagtgagacattatttctgctgtggcccaggaaaaggaataaacagt

SEQ ID NO: 217030 - DNA, 315 bp, Homo sapiens
gaaattgaatggagagccccgaaataaacactagtttatacggtccaacagtgtttgacaagggtgccaagacgactcagtcaggaaaggatagcctcttcaccagatagtgttgggaaaaactgatatccctatgtgaaaaaatgaagttgtatatcttataccatacacaaagattaacacaaaatggattaaagacctaaagataagacctaaaactataaagctcctagaagaaaacataggagaaaagctttatgacattgagtttggcagtttcttggatatgacagcaaaagcacagacaataaaagc

SEQ ID NO: 217031 - DNA, 121 bp, Homo sapiens
ggtgtgttttggtatttatcttgattggtgttatctgaggatctatacttcgcttgcttctattaattttggaaaattctcgggcattatttcttcaaatatttcctctatttttttcttc

SEQ ID NO: 217032 - DNA, 482 bp, Homo sapiens
tcttaaatgttcttattctagagtttgcattaaaagcaaaggaaaagctgcaaaaatagttgattagatacatctgagtccacattttagatatattgaatttgaaaagaatcaatgataaaaataggacttgacaacataactaatagttgaaaattttcttaacaatgaaaatgagaatttttgttcaattttgagggttttttttgttgtttctgtttttgttttgttttgagtttttcagttggcctatgggaagaaatatttgcagcagcatataatacccagaataatcttgaacttgccctgaggactgtagggaaaacccctacttgccttagcatgttcttggaaacaataccacaaagtgatttatgtttttctatgagaacaacattgtgaaagcagcatcttttctgaccaaagacttggcatcatataaaccatcttaccaacagtacgccataaaaacagatatgaat

SEQ ID NO: 217033 - DNA, 507 bp, Homo sapiens
ttagaatcagaagtgccatctgacccagcaatcccattactgggtatatacccaaaggaatgtaaatcatcctattataaagatacatacacacatatgttcaaaacgttagattttaaagtaaaaactcagggatagcacggcccccagcagtagattaagctggataaaaagagccaggaactggaaagggcatggggaggcgcagagctgaggccaagggtcaagcacctcgccgggaaatgccactgagcacagttctccagccgctgcccaagtccctcttgaaatgggcaggacagggagggtgcggccgcaggtgctggggttcatttcttaggcctgcgtcatggctatggcccttagctgggtggtgtgtgggctgtgtctatgacaccaccgaggacgtgggtatccctggggtcccttagaataggaggtggatcctgtggcactttggtgaagccagcggtggtcccatctggccctttgctccgaccctcacgg

SEQ ID NO: 217034 - DNA, 408 bp, Homo sapiens
tgcttcttcctagatgctgtctacagcctccccagacccacatgagacagactggggtctcaccttgtcgctgacctgccttgagacctcagacaacaccaataattaagcaagcccgagtgagcacatgctccgtcctcacctgtttattcacatgtcaactccgctcatcccattgcagccctgtaagaggatgggtgggtccctagtgaggggactgaggaccactgtggggaccccagagccctcagattcctggtgacagcagctggtctgccccctgtctgccagcctctgagcctctgctaatacaccctggaaggcaggagaagccggatgaccctgaggtcttttgcacctggtgccactgagggcctcagttgtgctgtcctggttgctctgcaaaag

SEQ ID NO: 217035 - DNA, 410 bp, Homo sapiens
tatgttgctctatggtgttttgatggaaggacatgaagaaaatctagctcacacagatacatagttggaaatgggtgaagtattttcatcatcttttgataactgtggatattctctgattctacaccagaaatcaacaagtggtagcttttaaatgtggagtctgaaatgtggtacctgaaaatctgtcaataaactttttttactttgttaatattaaaatctattggtctatcttgcgctttgaatggatttttcacctgtgcataattttataacattacccatttggtcatttggaaatacttgttcactaagttcggagatctttgagatcttttgaatgtttcacatttcatgatccaataccaaattctccacattcattaatatcaccatcaatctcgtca

SEQ ID NO: 217036 - DNA, 617 bp, Homo sapiens
tgagacagtttctcctctgttgcccaggctggagttcagtggtacagtcagggcttcctgcgacctcagactccggggctcaagtgatcctccagtgtcaacctcctgagtagctggaactacaggcatgtgccatacccaactacaaggcatcttattgatttcagggcagctgctttacaaagcatctctattaataacatcactgcatagcacactgagtggcctaaaacacttataatctcatggtttctgaagggcaggaatccaagcatgacttagctgagcccaccagcttagggtggttcacaggctgcaatcagctggggctgcagttatctcaacttcaactagagaaggatgggcttccaagctcacccacacagctgttgttaggagtcagttttttgctagctgttggccagaggcttcctgcagccacttgccacgtgggcctctccacagggcagtcacaacatggcaccatgcttcactagagggagcaaacaagaggagcaagaaccagagtgagcaggagaaaagggagtgactctttctataacctgatcacagaagtgacatctccttagtcttgcctattcaattcataataaatg

SEQ ID NO: 217037 - DNA, 571 bp, Homo sapiens
ctggtcttgaactcctgacctcgtgatccacccaccttggcctcccaaagtgctaggattacaggggaaagcaggctttaaacaggatgtggaaagctttgaatgagaggctaagaagtttagatttaatcctagaggcaaaaggaagcactgaaggtgtggcagggtcatttcctgaaatatgaatttgtaaggcccccaatgttaataaagacacaaaatgtttcagattacatctcaaaggaagtatgcaaaatgcatacgaagaaaaccttaaaaggctcctgaggcaggcacaagaaaatctggacaaatggaaaggcacgctgaggtcttgaataaaaaactcaacatcatcaagatatcaatttaccctaaatcaatatatatttaatagtgttttaaatatatttaaattatacaatttgaatttgtgggaaaaaagacaaatgattaaaaacttcattgaaaaaacatgcaaccacaaataggaatattccaaaaaataagagtaataaagggctaccaacctttccagatgttttgtctatcaaagaatagtgtaaactta

SEQ ID NO: 217038 - DNA, 298 bp, Homo sapiens
  misc_feature (38)..(38): n is a, c, g, or t
  misc_feature (48)..(48): n is a, c, g, or t
  misc_feature (67)..(67): n is a, c, g, or t
  misc_feature (72)..(72): n is a, c, g, or t
aggagctgatacttcggcagaataagacaatcagcagnataatatatnatgtatcagatggtgatanatgtngtgaagaaaagtaatgtttgtatgttgtgtgtatgtattgtgtgtctgtgtgtgtgtaagggtggagccccaggtgaggatgggagagtgggcagggcagtggtgtgtgtctcaggagaaaaagaaaggccgctggccctgacctgttctgcggggatcactgctgtgtatgttgtgtgtgtgtgtctgtgtgttgtgtgtgtatggtgtgtctgtaagtcgtatg

SEQ ID NO: 217039 - DNA, 403 bp, Homo sapiens
ctacttatgaggatccggattgagatagcacggtgacatggcagctgtggtggggctctgaggctgaggaggtggggactctgaagaactgaaagaaggatgaagacagctggaagtcaggagcacgaggagagtgtgtgtgtctatgtgtatgttgtgtgtgtgtacgttgtatgtgtgtatgtttgtaatgtttgtatgttgtgtgtatgtattgtgtgtctgtgtgtgtgtaagggtggagccccaggtgaggatgggagagtgggcagggcagtggtgtgtgtctcaggagaaaaagaaaggccgctggccctgacctgttctgcggggatcactgctgtgtatgttgtgtgtgtgtgtctgtgtgttgtgtgtgtatggtgtgtctgtaagtcgtatg

SEQ ID NO: 217040 - DNA, 462 bp, Homo sapiens
ttaataatacgacaggcacctctcagatctgctgcatccgtatttcttggaggacaacaggacacctaatttttagtctctctcccagggaagttttgttcaataactctgtactttgtgccactcgggttagatctcgtttgtatatgttctcagagctctctgcattcattctgtaccactttttcttagcaccagaattgcacttttgcagttattagtgtaattactagtttaaagtcacaatacaggctccatgtgggcatggattttgtctgtcttatttatttgttgtatttccactatcagtttcaaagcctgagacctagtagtagacactcactaaatatttatttaataaatgagtgaatagagggtgctatgcaaagcataccaaacaatacaatatagtacttaagagcatcaattttagagggagaaatttttgattttgagtctttc

SEQ ID NO: 217041 - DNA, 1090 bp, Homo sapiens
ggtaaattgccatttttacttaccacactggattctccaagtcagactaggatttgggttacaatggggatcattggggttaaattacttaagggataatgagatttacacagacccattaatctttctaagctattgagaaattttacacgtactgtgactgaggagaacctgatactgtaaaagagcaattcagtacagtttcaccatccaaggacttaccgatgcaaattcaaatacacgtgctaagtaaaatgggagagatagagcaagggagatataaaaattccaatagagcaattccagatgccccatctgccaccacgtgcaatggatctatgttcactagtaagtgtgattgaggtaggagatgtggatctaccactcttcccatctcagttcctttggtgaactgttgagtgtgaacattttgccttacattgggtgattcaaggggttctccacggtaaaagtgactatgtcagattcttgccacataatctaagagatgactccactgaagtttgtgttactctaccatcaaaagatgtatctatgtttacagacattcttttattcaatttgaaaagaaatttcaatgtcaataataaatattagcctcatttgtgaattaaacagatgttaagattgcatgcacgtcagtaaaaaaactgttgtacaggaaactctatgcacaggagcctcctaccatgtcatccagctcagctacctttttctattcagctttctgcaagtatttattttatataatgcacatgtaactataaggatacaaacatggatcatacaaagaacctgccctcatggagcttaaaatctaaagacagatgataagtgctaaacataaataactgtccacaacattaagatatcagtaaattcattcattcatttaattcactcatacattcacttgtgcagcaaacatttactgaataggaactgatttcaaaattttcagctaggaatgcaaaactgagagagaaaaattcttagccttcaaaaaaatcaaagtcgaactgctcagacaaaaattcaaagggaaaaataaattataactacataagga

SEQ ID NO: 217042 - DNA, 272 bp, Homo sapiens
ggctgagtggtactgctgtgacatgtgcgcatgttctcgcagccctgtgtaagctcaggacgtccctggtacccaagagcagcaggccaggcctctacgggaagcctgtggccatgagcatccctgcacagattgactcattcaaagcccatgggatgtgccagtggcaagccgtaaagcacaagtgaacacaggtctccctgcaccactcttgccctcccagccttgttcccacacgtggtacagaaacaccactctggcctgtcactccc

SEQ ID NO: 217043 - DNA, 1049 bp, Homo sapiens
agtgaccaggcagaacatgtcaccagctagttcatgccagggagagcctgtctcagttcattgggatggccagagtctgttcaccaacagtcttggagaaagtgttacaaataaccctgtcagtactcttagctactgtttactcaacatgatgtgtgtgagacagctggcaaacactgccattaaccctggtgtgccccatattagtgatgagaacactgaggctcagctcaggtggcttctacaaagtgattcagaagtggcaggagacagtcacatctgtggtgccgaaagccagtgcctgtgctcactctctctctgccagatgctctagccctggctgtgcttcagtgggtgtgcttcacctgcagatgctgggctctgtgccaaaccttcatgagaatctcgaggggctggctgcacagatgacttcaatgtacagacaccgttgagaaccactgcaggagagttatttgtctccccttctggcttgtttttaaaaatcacattctgttcctctaaccctgtggtttggtagtgacaagacttagatctgttacctgtatttttctcgacctgtaggtgctggttacttcccagctcggtaccctaagcaccagctgctttggtttttttggaatcagagacttggttttctattaccatctcccagtccattcatacctcctcctccagtgccccagccacagaccattgctcagccaagactctgtgtcacgtggattcatggtaataaccaacttgtaattccactgtggttttccctctgttgctgtcgccctgcctggctctgggcggctcctcccactgttgagggcactcagaaactgcaagattactgtgactgttgctagagccagctagagctagaccttcctggaccagcaaagttgctgccacaaaaaaagagagtttcattcacctagcagccctaaaccaaacatagggcaggcactgcctccattgttcttccacagcagggaggatggcatcatgtctatggtgggtctggggggttctgtcacctg

SEQ ID NO: 217044 - DNA, 473 bp, Homo sapiens
ctgggtttatgccattctcctgcctcagcctcccgagtagctgggactacaggtgcctgccaccatgcctggctaatttttttgtatttttagtagagacagggtttcaccatgttagccaggatggtctcaatctcctgacctcgtgatccacctgccttggcctcccaaaatgctgggattacagacgtgagccactgtgtctggccggctaatttttgtataattagtagagatggggtttcgccacattggccaggctggtcttgaactcctggcctcaagtgatctacccaccttggcctcccaaagtgctgggattacaagcatgagccactgctctcagccttcattcactttttataaagcctttagtgcaggagctgtcaacaagctacacagaaggccatggagttgcagtatcacatctcagtaccagcaggaaaacaaacaaacaaaaaagcacatttaac

SEQ ID NO: 217045 - DNA, 625 bp, Homo sapiens
tgtattataacagaatgtcagtgaataagttattttatatgaagttttgattttttttaaaactctggatcacaggttctgggttttaattttcctctatcactagttagcaaacttgacaaattaccttagcatctttaagtagcttcttaatttgagaaggtttgattagatattatgattattataataggtctcttcttgtgttgtactcattaatgttattatgaggttaatgttattattaggcttttaacaatatgactgtgtacacatgactacatagattatcagagctgggagggatatcaagaagctgtgtggcctgtttttacattttttatttctttttgctttttgttttgttttttcatatttgtaggggttgtgaagtccctagaaaacagagaatccagttgtaagaaacatggctttaaagttgaacattaccactttaggtgatcacttagtgtcagtgtagttgtaaatgctgatgtaagtatggcccataaatttgtgtgagaggaggcttttataagattgtcatctagatcataattaatttttaaatattttcattacaaactcatgaaatttagagattgttaaagacatatcatcatcg

SEQ ID NO: 217046 - DNA, 387 bp, Homo sapiens
  misc_feature (31)..(31): n is a, c, g, or t
acatggtctgtccctgtgagccagtggaacnaatctaaccagtggcttgactgcagacaagggccattgataacgcagcctggatggggttgctcagcctgaccagcgccaccgccgcccagcccacatgggacgtgggttgctgcttccagctcttgttccggatttcttttcttttcttttttttttttttaagacaaagtcttgctatgttggccaggctggtcttgaactccaagtctcaagtggtcctcctgcctcagcctctgaaagtgcggagatacaggtgtgagtcaccacatccggccccacagccccgtttctggagtggcagtgcaggattctcgtctacctcataaccatgggggttaagaaggtggggaggag

SEQ ID NO: 217047 - DNA, 408 bp, Homo sapiens
accctccttattgtctctccaatgccagtttcacttcacccattttaggtagtttgatccctatggacattggagttcacactctgctgtagtcagatgtatgtgattctacctaatgaagatgattacactgatgaatcatatgatttggctcaagtgtcaaaatcccagacattttcctgtctctggatggcaaactccacaggctgggttacagagtgattgcaggatgggcttgtagcttcagaccttgaacaagaagctaagaaggactgaggtcatagcatgtgtaccgccacccttaaaacagaatatttcactagccaagacaggattatgtaaattatattgtgtgttagtccattcttacactgctaataaagacatacccaaggatgggtaatgtat

SEQ ID NO: 217048 - DNA, 261 bp, Homo sapiens
tttctaaagaataaatagaaaaagacaactcgtgtggataaaataagtagagaagttgcctcaaaaatcacaagtagcctggttgtgtccaaacgtatgaaaataatatctaatgtaaaaagaaaagaaaaatctttcctgtttagctgtgcagtcccttgccctattcctgtagagccttgtaagattccttgctttctctcccgttctacatccagtttccaagtcttacatctttcctctgtctctttcttggtccat

SEQ ID NO: 217049 - DNA, 333 bp, Homo sapiens
gcggtggccgtgatctcgctcactgcaacctctgcctcccaggttcaggcaattctcctgtctcagcctccctagtagctgggactacaggcatgcaccaccacacctggctaattgtatttttggtagagacaggatttcgccatgttggccatgctggtctgagctttcatttttaaaacacttatctctgacccatcttatttcccttactttatttttatgtcaacttcttcagggattaattagtattattttatactattttttttcagacatggtctcgctctgtcactcaggctagggtgcggtggcaccatcatggctcactgc

SEQ ID NO: 217050 - DNA, 565 bp, Homo sapiens
attagtgaagcaaataataaaattgttgtgtactaccatttgacctacatgttgtgatattaactggaacttctggctttacaagacaaattaaatatgagataataagcattttctgtagacagaggttccaaaccccaagcttataggagcggggtttgtagtctcttttgtatccctagcacttgaaaccgtgcctggtttatagttagcacttgttaagttaatcactttaaatgtttgaataagtgactattttgcttttttttagagacagggtcttgttctgtcgcccaggctagagtgcagtggggccatcatagctcactgtagcctcctgggttcaagcaatcatcctgccttagcctctcaagtagctgggactacaggtgcatgccagcacagccagctaatgaatgaatgactttttaagaagaaaattctgtttttgagggggaagatcatgagcaaataccatttttgaattccacattaaaaagtcaggacatttccattttgcagttaaaaaaaatcttctggagatggatggtagtagggatggttg

SEQ ID NO: 217051 - DNA, 447 bp, Homo sapiens
gtcagaggattttactatgttggaactgaatttattaacatagttatagaaagagtctgtcaatgaaaggagaattagttgcctatggaaactgagctacagatgaatctttaaggcataaatctcttttccacctaagtggaagtccaattcctgaggcaggaagtctgggcaagtgaaattgccagttaagttggtaagccttcctacaataaaaataaatgcatgtgcacatttatattagcttgatggtgttaaatattctaatcattgaactttatttttctgatctaatacatacccagctatcatgtgactacattttgttttcccatacagatgtgcgtttgggtggaaagtatgtactgtttatgctgaagtaagaattttattttatataacatagttcttgttataaattaataaactaacattctgattgtttat

SEQ ID NO: 217052 - DNA, 225 bp, Homo sapiens
gtctcaaaaaaaaaaaaaaaaaaaatagcatagatctctagagctattccatctgtcataccagttcctattatgttttcctaacaatcgccttgttactctataaaagttagctaaggttttatttcttctgtgaaacctttttaaagagctccccctcaatttctccaaaacgtagagctaaatagcctcacttctcttcactcccttcatataatgtattta

SEQ ID NO: 217053 - DNA, 392 bp, Homo sapiens
aacaatctattactgacactttacctaatcattagcattactgttgaaaatatttaattttgaaaagataaggaaaaagtgctagattcaagttatcttgattttcataaagaattctcccaaaatatacctcgcttgaaataaagttaagtggcacactgtaactcgaataattaagaatacatcctttgcttaaatacttcaaacaatatactgcaaagcatggttcaatttttggttccaataatattttgaaatattgggattgcagatgccacactggtttcccaaacaatggtttcataatgatatgtaatttacattgcctggattttagaaaagaaacctgtgaaaaaaaataatttaaagtaataaaattcattaatttaaat

SEQ ID NO: 217054 - DNA, 490 bp, Homo sapiens
gagtaacttgcagttatagcttgcaaacatctatgactcagagcacctcctcattgccgtctattggtaagtctcaaagaaggtagatcaattttagatatgatttgatcaaagtataatcaggataatggctctggagaagtgaaacataagcactccttaaacaaatataaatgtttattatttgtgcagttgtcagacaatttagcataaatgagacttttcctaataactctcaactttagttattcctttcctttctttaacttcataatgcaaatatggcccaagactacttagtggagtcacaaattgctctgtagccattgcatgtttacaggaacatgttaaatttctaagtgtacatatcacctataatatgtaaatatagttagcaacagggtcacttagcttacaaataaatgccttataggcgagttggaaggaagaaagattatttttctaccttgtggaggaaggttccttggtt

SEQ ID NO: 217055 - DNA, 839 bp, Homo sapiens
tggttagcgtccgctttaattcctttgtctcagtttcctcccctataactttgaggtatttgattctgccaggtgcccagggctactatcatcctagattcactttaaattttctattggaggtagctgaggtcacaaaaattaagagccaaaatccaaataaatgctgtcttattatggctaagaaatctccaagtacacatctcctctgccttcaaccctgttccaccaaggactcatgatcagaggtttgtatcttcatagtctcttgctctgcttttttatcagattcacccactgaaggtatgatatttgagaactgtggaagtgtttccaatctgagtttccactctgctcagttcctaggactttttacactctcctcttcctgggagactatcaatagcccatctctatgccctctgatatttgaaactcaccagctcagctattgattaagactattttttttaattgtgacatatttgtgtatacatagacacacacacacacacacacacatacgtgaagttattttttgtattgccccaaaacttcttggtgtgtgctatacaaggagagtttttattctgaacagctaagcttctattgtcaaaaatggaagctttttgcctctgtgccctgctatcttcttactcttatctgctgcgctgtaggaaatgattgattgaaattaatataactgtatctaagtattaatttatagattagaatcttatactttcttcattataattttcacattgtcttttgttttctaacaagttataacttttttgtaatattttctttaaaaataaaacatgactacatgaaaa

SEQ ID NO: 217056 - DNA, 292 bp, Homo sapiens
tcaaaagcattgtgtagtagactgaaaaagagtcatcaaagacatccatagcctaatcttcagaaaccatgaatatgttaccttaaatgacaaaagggactttgcaaatgtggattgaggaccctgagatgggaagcttatcttgcattatctggtgagtcttaaatgtaatcacaaatgtcattataagagagaggcaggggtgaatattagattttagaagtaggagatgtgaaaacagaagcaagagattagaggagttcaaggaaggggccctgagccaagaaatgca

SEQ ID NO: 217057 - DNA, 401 bp, Homo sapiens
ataaaaattttaaaaaagatccataggaaagtatagatcttggaaaagagaaagagctataagatctgtagaaagggcagagtacctcaggaaagggtggctgtcacattgagattcaggtcaggggttggggcgtggctggtttcaaaggtgacagaggcttcaggcttcaaggatttggggctctatcctgcaagcaacagtgagccaaggaagggttttgaacagggaaaggacagtacatgaacagagctgggaaccaaggctgagaggtaggcagcagagcaagaccttgaacccaggtcttgctggctccaaagcctgtccatgaccttagactgcagccattaacaatgagggtatggggccaggtgtggtgtctcatgcctgtaatcccagca

SEQ ID NO: 217058 - DNA, 537 bp, Homo sapiens
gataggagcttctctttgttttggatgtaataggtccattgcgcctggggccattacaatttttgttgccttacaatttcttaaaaacatttactaagtaccaataaataaatggtaaacgcagttaagcacttctactttactggtatttcatttaatcctcacaattacctggagaggtaggactcaacatatttttacagataagaaactgagccccagagaactgttatgtaacctatgagttaaacttctgaaaagtaaacctgcatatgtatttaaatattgcttcaaaaagctaacctattagaccttataacatgtacctgacagtaggaaaccaacagaagaaaaggtgtcaagaaacagggcatgttctaacacaagggaggtgctctacagtcagggaacattcagattacctcaaggagcatctcagtttctccttccaccaagcaacccccaccagataaagaagagatactggattttttaaaatttaaaatatattatttcccatgtaaagagtcactggaa

SEQ ID NO: 217059 - DNA, 461 bp, Homo sapiens
aactgtattgaggtataattcatatataataaatcgcacatagttaagatatacactttggtgtgctttgaaatatggatatgactgtgaaaccatcaccacaatcaagacaatgaacatctccatcctcccccaaaatttccttgtggcccttggtaaattcctccctctagggcacccccttgcccacacccaggtaacagcttacctgctctatcactgtagattcgtttgcattttaaagcattttatataaatggaaccaaacagcatatactctgacttctttcactgaacataattattttgagtttcatccacatgtcgcatgtatcaatggttcattattttaattgcagagcagtatggatgtaccatacattgtttacacattcacctgttgatggaaatctgggtcggtctaggttgcagccattacaaataaacctgctgcaaacgtt

SEQ ID NO: 217060 - DNA, 668 bp, Homo sapiens
aacacttatggccgctgggaagttgggagagccaggctggggctccggcaggcccagggaaagttccctttctaggctctttattaaaaaatttaaaaggaggagttgaggcgccttgaattttccttcgcgagtttggagaccagccgatttttcatgaagcaagcaagggccgcggtcccggatcctgcaacatatacctcattttctccaggcctctccacttgcccgagctctcagccaccaggagacagacggaaggggcttctgggctgtgttgggagcgggcattgtcccctacccactcctgcacagtttcccaaagtccagcgacctccgaccctccttggggaaaaaaataccagtacccagacacctctgcaccctgttatatgactgggcttgcttcaggaatatcttacaaagaagaagaaggaggaggaacggcttggagtcatgtttacatctagttctactgatccgttcacatctggagagtttatttataactccctctataactctctgtttggaggcactggtggctctactgacagactgatgtctaggaaatattgctctatgtctaatggtacctaaatgtgctgtggttgtatttacagatttacgtttgagggaaatataattatttccattgtatttgtgca

SEQ ID NO: 217061 - DNA, 464 bp, Homo sapiens
aacacttatggccgctgggaagttgggagagccaggctggggctccggcaggcccagggaaagttccctttctaggctctttattaaaaaatttaaaaggaggagttgaggcgccttgaattttccttcgcgagtttggagaccagccgatttttcatgaagcaagcaagggccgcggtcccggatcctgcaacatatacctcattttctccaggtacagttttctggtcatttaattcgtttgttttcttgggggagatgggaatcacaggcgtagagatagtaagtttgctagagaggaagccaccccacagtttcgggtctaacgaaatccctcctttaaaaacatttgtacccccaataaaaataaaattaaagaggaatatagaaacacaaattagccaacttttttaaaacagaaaaaagaaaagaaaatcatcgtaacagatgagcgtgagaacttc

SEQ ID NO: 217062 - DNA, 600 bp, Homo sapiens
cagccctggatcagggcagccatctactaaatggccttaaaggctctatactctcgcctttgtaatcagagaaagtttccttaaaacaatcacttaggtcatttcccacaaacaataagttcctcttgccctcaatcaaaattctgcaacctggagaactgcttgaactcgggaggtggaggctgcggtaagccaagatcacgctgctgcactccagcctggacgacagagcaagactctgtctcaaacaaaaacaaaaaacaaaaaacacatcactatgtaccccatgaatatgtacaatgattatttgccaatcaaaattctgcatcctccagaagcatgctatccaaacttctttcatcatccctctccctctggaggaggactcctggctttccaagccgaaaatcacagggatagtcactactgtctaaggtatttatctgttctgtaattcaataaggaacagggctgacaggaaaggaaagaaaaatcctgttcacacctagaggaaaacatggacaaaaatcacaagtcaattgttgtctagaactgatgattccctctgtgacttacatagatctctttcccctgaacttt

SEQ ID NO: 217063 - DNA, 394 bp, Homo sapiens
tgagtagttccattccaattacagacacaccttgaactccaccttccgtaagtcacctgctttttcttcttcaacccaccaaactcacataatctatgctcacagtgtcttcttcctcacctttaattggcaacctaatctaatctgcttttccctcaacctagtcttaaaaatgtcctgtcaaaatgctgttaattgctaagcccagtcatatcttttcatgtttcatgttagttgatctcctagtagcattggataaaatctctttcttctttctagaaaatcctcctaatgtagatgacaggttggtgggtgcagcaaacccccatggcacgtgtatacctatgtaataaacctgcccattctgcacatgtaccccagaactgaaagtata

SEQ ID NO: 217064 - DNA, 241 bp, Homo sapiens
aatcccagaatgatgactgtactcccagaaagaagagaaaatcatacattttttggaaaatcggaatgctattaaataatgttcagtaaataagaaaaagtttttgaaaattaaaaatatgaaagttgaaataaaaattcagtgggagggctgggagataaaatgaaattttcccaaaaataaaacagaaagattaagaaatggcaaattagaaaagtaagaataaagagaataagttcat

SEQ ID NO: 217065 - DNA, 671 bp, Homo sapiens
aatttcatagagtactgtgtgtaatgagcctgggggcaagtagacgactttgacgcccttggtgttaactcgtggggctctgagtgcctgcagcattgaagaactttaaaaaggtgtaccttactggcaaggtacatcctgacttcaaggacaaggcatcaatggaattaatccagaaaaagcgttcttgtccagacgttgtacaaccaaaagatcagcagctgtgtttatcttttcccgttaagtctcaggtgttagcagttttataggtaagagctcgcctgatcataaacacagctgcacctgcacaaaacaggacagttagcttagccctgcgtgccttcaatcctggggctcacttcccttctttacttaatagatgtcctttgtggttccctcccatgcccccagattagggcagttttgtctgcattaaaaacctgttgacacaggtatcccatctcctccatgattttctttatggcatctgggaacttgtctgctgcctcttggttggcggaagctgcttctcctgttatcttgacatttttaaaagccaaacctcttcctaaaattatcaaaccatcatttgctggcattaaactctccagctttagatctttcaccatcctttggcttcaagttgtcatataatgactttgctttttcta

SEQ ID NO: 217066 - DNA, 1008 bp, Homo sapiens
atttgacacaattgatcatcttctctttattgaaacattctttgtcttgacattttaacctcaacttttttttatacatttttgacccactcagtacttcacctcctttgctagttctttctactctacctagaatttaactatcggatttctttaattgctcagtcctcttcccttttcttttccattataagtttctgctatatcagaagtcatatttcctttttgttcctaaaattgtttcttgtgccttttctccatcaccaaaggaaaaactatttattgcaataaattaatacagcaggtattcctgtgaaagcgcaagttagtttgttagggcaattaaaacttctacgacatatgctccggcagagttccgtctctgccactggcagcttaagatctgccttcttgagagtggtttttgccagttccttttcccactcagttgccttttgctttctggaccacctgtttccagtcgtgggtgtggtcatttttgggtggaactgtggctctcccctcctcagctccagtcatgggtgtggtgatatttgggtggaactgtggctctccctcctcagctccagagctcctgtgcactgtcatttttctgctgctgcttgggtggctgctgggttcagtcaccagctttagcttcaccccttcattcatattttaatttttttcttgaacagacttataagagtttgtcaattaaaatttttttcaaagagtcagctagtatctgctttctgttttgtgaatgtcatctttatttcctttctttaggtttactctgttctttttctagcttactgaattgaaaacgtgttcatcctttcttgctttttaatggtggctcaaggctgtaacattccctctaagtgttgtttgaggagcttcttgtatgttagctgtgtgggtataatcattgtggtattaaataatagtcttcagcatgtcaagacctaattttttgtttctttttcttttcttttctttttt

SEQ ID NO: 217067 - DNA, 402 bp, Homo sapiens
acagaggaggtatctagccctccctgcagaaaagatactgaggactgttgattgagggctccagttccctagtcatcttgagaacatcaaaatttttcaaattagctcaggttaattgtccagctgggtgcagtggctcacacctgcaatcccagcactttgagaggccgaggaaggctgatctcttgcgcccgggagtttgagaccagcttgggcaacgtagtgagaacccttctctacaaaaaataaaaataaattagccaggcatggtggtgtgcacctgtagtcccagctactcaggacactgatgcaggaggacctcttgagcccagaagatcaaggcaacatgagccgagatcacaccattgcactccagtctggctgacagagtgagaccatcac

SEQ ID NO: 217068 - DNA, 303 bp, Homo sapiens
taggaagcctcaggagagctgagaacctgctttggttttggttttgttttgatttgtcccttttgagagaaaggtctggctgtgttgcccaggctggagtgcagtagtatagtcacagctcactgcaacctggaactcctggtctccagccatcctcctgcctgagcttcctgagtgagttgctgggactacaggcatgagccccactgtgcccaacttattctatttttggtaggaactgggtcttgctatgttccccaagctggcctcgaacccctggcctcacgtgatctctctccttgg

SEQ ID NO: 217069 - DNA, 540 bp, Homo sapiens
tttcttcaaaatttcaggaccaatttgaaaaaaaaaatgttactttatcagttagccacctttacatttttgaaaaattcatttatatctctcctgtttagaaatcaattttaaacataaatcaattttaaaatgaaatggaatacattttaaaatgtatataacataaaataaaacaacatttatctttctgtatgaaatataagagaatttgttcatttaacttttcacattttatcttccttcattttttctctgttttagttggtatggcaagacatttttgacaatatttatatagttttaaatagttttacaggtgataattttagtaatgttcattagtaaattcattctaaatatattcaccatttaataagtatatatactgaagtttttaaaatttgcattattttgataaccttttaaaacattgctaaagataaaaattttaaagtactttctaatcatatttatttttttaacccagaatgtttacaagattgttttttgcactgttgattcaatttgcatttcatt

SEQ ID NO: 217070 - DNA, 188 bp, Homo sapiens
ttacaggtgctgaaatgtagaggttgctaggagataaagtgtcaggaatagattcttgaggaacacctacattggtggagaggccaggagcagtggctcaaacttgtaatcccaacaccttggaggccaaggtgggtggatcgctggagcccaggggttccagaccagcctgagcaacatggtgaaaa

SEQ ID NO: 217071 - DNA, 409 bp, Homo sapiens
tacaaaaaaaaaaaaaaaaaaaaaagttgattccaccaagaattatcaatggatgctaaaactagtgagttgaaaggttgacaaagtatgtaacatttatatagtctcaaaagtatcctcccatgaattacttattaattgcaaacggaagaatggttaagtttacagtgagtttatttagcagataccatagtgaccaaagtaaccaactttgcaattagagttatgttaccatagtggagcagacacctcctgacatcatgttttgagaaagacattatttctggctgggcatggtggctcatgcttgtaatcccagtgcagcattttgggggctgaagcaggaggattccttgagaccagtagttggagaccagcctgggcaatgtagtgacaccccatctttaca

SEQ ID NO: 217072 - DNA, 406 bp, Homo sapiens
caatttgggtaaatgcgtccaagaggaagaaataaaaatgaaaagactgacagtttaaaagcatgtggagggcttagaagataaagacgagtgcaagaaagggagagcgcggccggccgcggtgtctcacgcctgtcatcctagcactttgggaggccgaagagatcggatcacttgaggtccggagttcaaatccagcctggccaacatggtgaaaccccgtctctactaaaaatacaaaaaaattagccggacctggtggcgggcgtctgtaatgccagctactcgggaggctgaggcgggagaatcgcttgaacccgggaggcggaggttgcagtgagccgagatcgcgccactgcattccagcctgggcaacagactgagaccctgcctcaaaagaaaaaaa

SEQ ID NO: 217073 - DNA, 473 bp, Homo sapiens
aagttatatgaaatatctagtcttttcagctatttagaagtgcttgatgtatttaaaagcagaagtagttgaataacactttgtaaatagcttttaaagactgatgggaaatactgtatttggaagtggaattgttaaaccacctctctgaacagtgtgctctctacttgttcgttgagttgagggaggtaggaggaaagaaactgcaaaaggtgttttgctagtgtgtactagaaaatttcagcttatccattgccttatatgttatgtgcttttcatttaactttgctatactgcgcatattgtgtatatactggacaaatgagttgttgagtgtatattttataatatacagtctctatatattaaattttataatatctagtcaattttgtaacatctagtctctagatattaaagagattgccagtgtatgacaaaagtagtgttaataaactaacccattttgtaca

SEQ ID NO: 217074 - DNA, 234 bp, Homo sapiens
gcttttacagtttcacatgtgtacataggttccctcccagtcccttccatacccattagttattgaactttctaattctattgaaacattacaacagtgttttgttgcaccaattttataaacttatgccgtgcaatacgtgttatttttctgaggcagaccaaaggtaaatttctcaaggttcttgctgccttctttagcagtatttgagggaggatcttttatacatttgta

SEQ ID NO: 217075 - DNA, 363 bp, Homo sapiens
tgcagtggctcatgcctgtaatcccagcagtttgggaggccaaggcgggcagatcacgagttcaagagtttgagaccagcctggccaacatggtgaaaccccatccctactaaaattacaaaaactagctgggcgtggtggtgggctcctgtaatcccagctactcgggtggctgaggcaggagaatcgcttgaacccaggaggtggaggttgcagtgagccgagattgcaccactgcactccagcctgggcaacagagcaagagcaagactctatctcaaaaaaaagatgacagattctagaacctctcctgggccttctggaatcagaatttccagtctacattcttgtgagagctccctt

SEQ ID NO: 217076 - DNA, 407 bp, Homo sapiens
ggctgggtgcggtggttcacgcctataatcccagcactttgggaggccgaggtgggcagatcacctgaggttgggagttccgagaccagcctggtcaacatggtgaaaccctgtctctactaaaaatacaaaaattagccgggtgtggtggcacatgcctataatcaaagctactcaagagactgtggcaggagaatcgcttaaacctgggaggtggaggttgcagtgagccaagaccgcaccattgcactccagcctgggcgacagagcaaaactccgtctcaaaaaaaaaaaaaaaaaaaaaagggagatataatgctagttctacacaatctcttccatgatatagaatgtcatagaaactttccacctcattttatgaggctaactgtattctgatattaaaa

SEQ ID NO: 217077 - DNA, 543 bp, Homo sapiens
ggagcacagtgtggctttgcagaggggagaaaagggcaggaagcagcactgaaggaccctttccctgggaacaggcacttccacccatctgctccccgaggtctctgaacatccctcaggggctcagtggactggtgtgaactcaactctctgtattttcttgtggtagccttgaggtctcatgccttttgaactcgtgggaggcagtatgaagttggaaaagcatttttttttttttaaatgagatcaactcagtttgaatgctggctcagcctcttagatgtaagatcttggactagctacttaacccgtgtaggcctcaatttccttgtctggaatgttgggatatctcctaagacagttacagagactaattagtaataaacaacaatacttttagtgtttttgatctatagaggattctcagtaaatgttaatcctcttcccctgggaccatgttttagacctggcacctgtggaatttgtatgattttgtaattaatggctaccccacctaagatggcaccagcaatatgcctaatg

SEQ ID NO: 217078 - DNA, 358 bp, Homo sapiens
tttgacggctgtctgaaaggtgcttagggttcactgggccactgagaggcagggaggcccaggtggagggagagcatgggcaaaggccctgaggtgggaggtcacaggtcggccggctgaagcggctgctggacagagagctggggagtgccagggctggaggactcagctggccagaccatgaaagctgcataaaacaccgtaaggagtttatcctaagaagcttcagcccttacagggtggtgagcagatcctcacgaactcttgatgcgaagggaagagcggacccattccgggtctcgggcagtgtctgagcaaggggccggtggtctgcgcatctgcacactaggcccttcct

SEQ ID NO: 217079 - DNA, 442 bp, Homo sapiens
tgcgtactcgtagcttagctcccacttttaagtgaaaacgtatggtttttggttttccactcctgagttacttcacttagaatatggcctccagtgccatttatgttgctgtagaacacattattttgtccctttttagtggctgagtagtattccattgtgtgtgtatgtgtatatatatatatatacacatatgtgtatgtatactatatatgtatagatatatgtatgtatgtatatgtgtgtatatatatatatataaaacatgttctgtatccactcattagttgatgggcacttagattggttgcacaatatattatgatactctttaatatattttatttaacatttgtattgttttaaagtacttaaatgccttttaatttttgtcgatgtaatagtttaataccagtaaaataaatttcattattttacatga

SEQ ID NO: 217080 - DNA, 566 bp, Homo sapiens
ctttatacaacagtttcgaagcttgaaagtaagaaaatctttttaggaaacattcgctaataaactgtatgatcttagcagagaatgttatggcttcagtacctaacagattttttgaagtcttagagccactcacatcaggtaaatacccattttacatccagcatttccccttgatgggtctttatcccatatttatatgtttgctctagattttcttccttttctagattgtatctagaaattctctttactcttcaggagaatatatccaaccacatatccaactggtataaatatatcaaaagaatataatattaaaacatatttttatagtaaattttgaaaacttgtggatacccattttaacttatcagccgagatgtaaccccgaaagaaatgttctgcagaattttatctgaaagactctagggaagctatgtatgtctaacaagtatcaaacactaatcagaaactttaaacatcagattttcactttagtatcttttaagtaaatactaggaaaaattttttaaagcttttcacaggataagcataaactgtta

SEQ ID NO: 217081 - DNA, 716 bp, Homo sapiens
aggcagaggttgcagtgagcaaagattgtgccactgcactgcaggctgggtgacagagtaagactctgtctcaaaaaaaaaacgaaacaaaacaaaacaaaaaaacaggacaataatgctgacagcaatgagtagctgtgtaactgggtttctcaactgtctttccactctgcaatgatgaagactgttatttgatgtgtgatatctctgatgacagttctccttttaaattcatcatctgtatttaggacttaagatgagtttctcttcagcatggtggataaaaagaaggatccagacacacgagtcagatcacttggatgaacctgtcatttaaatggctgcctgaccctaggtccacctaggtctcagctttctcagttttaagggcccggcactcacgcctataagcccagcactttgggaagctgaggtgggtgcatcacttgaggccaggagtttgagaccagcatggccaacatggtgaaacccgtctctactaaaaatacaaaaattagccaggcttggtggtgcatgcctataatcccagctacttgggaggctgaagcagaagaatcgcttgaaccgggaggcggaggttgcagtgagctgagattgtgccattgcactccggcctgggcaacggagcaagactctgtctctaaaaaataaataaataaataaataaataaataaataaataaaataaaataaaa

SEQ ID NO: 217082 - DNA, 427 bp, Homo sapiens
cttcaggataaggtccaaactttaagcatgaactggctgctgccttcctttccagattagtctccagcctgtgtcccctaatatcccatatcctcaccagtccaaattacctgccgtgtgaattcacacctccatatatctgttagttcttttgtctctctttctcctttcttcacctgacaaactgttgagccttggagatccagttcaggcaggatgtcctctgatcttcccaaggtgaatgcctcttgagtacttcacctgttttcatttgacacctaaccttgattgatttttctttcatctcctccgctacactgtaggcaacctgatcgcaagggctgtgtctcagccatctttgtgtcttcgttcttagtcttcaatagaattttacttaataaataaatacttaacatatggactgata

SEQ ID NO: 217083 - DNA, 385 bp, Homo sapiens
gatcctcccaccttggcctcccaaagcaatgagagtacaggcgtgagccactgcctccagcctcagcacctctctttttagccccctattttcttagggacttggtggttttcatttggtgcccaaaatagagcctgggttcttgagccagacccacactggaatcctggctctgttatttcctaagtgatcttcggcaaatcactgagccttccaggtccagagtttctggaccgttgagtgtacagtgagcaaaataaccctgccttggccaggcgcggtggctcacgcttgtaatcccagccctttgggagaccaaggtgggtggatcacttgaggccaggagtttgagaccagccaggccaacgtggtgaaaccccatctt

SEQ ID NO: 217084 - DNA, 737 bp, Homo sapiens
ttaccaacagcccccctacacccactcagggtgccttctgcccttcacaattctccactctactccagccaaagggcttttcacaaatcgacacatgaccatgttactatccccaactcctctggggtttgtattcacttatctagggagagacaccaaatcccaaatctataaagcctctagcccaagggtatccaatcttttggcttccttgggccacacataaaatacattaacactaacaatagctgatgagcttaaaacaaaaacaaaaaacaaaaccctcagtattttaagaaagtttacaaatttgtgttgggccacattcaaagccattctaggctgcaggttggacaagcctgctctagcctcattttccatgcccaccaacaaccgaccccaatcttcactctgcccttttggccactctggccctttctcaggtcttcacctgagagccttactcttaacccattacacatgcccatttatctttttctgataaactcatctctcagatgctattcttgttatgctgaacacctctctcaggtaccttcttagattatttttattatttttatttttcatttttattttttgagacagagtctcattcagtcacccagactggactgcagtggtgccatctgggctcactgcaacctctgcctcctgggttcaagcgattctcctgcctcagcctactgagtagctgggattacaggcacctgcaa

SEQ ID NO: 217085 - DNA, 847 bp, Homo sapiens
aataaaacatttggcttcagccagcttgagttttctcagaaaactatgagatcagagaaatcttgcttttgtgaaatttccaaccaatctgcctctggttggggacacatggaggaagtattcgaaaactgatagatagaaattaaaccatccatttttcaagcccttcttgtcaccactctatgtctggtgtccagcagagtgtctgaaacactattgcattatttggtttttcaatccactcttggaggatctgaatgtaagaaaatggaaccacctgagttgattagccccttcgtttcatttgacaaagtagtgtccagtaagaactacaagaacagagtaatcaagtaagagttaccccagattatggagtattcagcaatctgacttggatacatcaataagaagttattggtccctaaaatggctgttgacagggaggctgtgtagagggcatctctgagcacaccctgtacatttctgaaagaaatccagaaatgagaagccatgcgacaaaggggggagtagacgacctttgcccacaaaggacacagctgcaggtctaggctccagcactttctgtctttggtgatttgggacaccttctgtaacctgtctaaatttcagatacctcctatgtaacatggtgagaatagtaaaaggtccccaagaggcttctgagagatcagatgagacaaggcatgagaaagcactttgtaaattgctgaagtgccacagaaatgttattaaatttactgtttctgtaaaacatgacttggcagtccttgaaaaaacactgcaccatattctgttctaaataaatgcagatagaaaattgggaccc

SEQ ID NO: 217086 - DNA, 204 bp, Homo sapiens
gggcaacatagtgatactttgtctctacaaaagtttttttttttaaattagccaggtgtgttggcccaagcctgtggtcccagctatttgggagtctgaggtgggaggatcgcttgaacccgggagctggaggttgcagtgagcttagatggtaccactgcactccagtctgggcaacagagcgagaccctgtctcaaagaaag

SEQ ID NO: 217087 - DNA, 278 bp, Homo sapiens
atcatccaggctggaaggcagtggcacaattatagctcactgcaaccttgacctcctgagtgctatagttaactggactcattcaagtcttccaataatactgtaccatattcctcccttgcccacaatctcctcgctttgcctctcaacaaaaaaacacaccaaagaatatatgcaaaagtaaacctcaaatgacacagaaaataaatcctatatcaagaaacctaaacctctggctttctttccagaaattgtttttatgtgagaaatagctaaga

SEQ ID NO: 217088 - DNA, 308 bp, Homo sapiens
ttccccagctccctctcagccaatgacatcacctcatggttcgttcagaagatagcagctttcagagatgaaagcccacactccccacctcaatgctgcaaaaccgctccatactgctgatgcggaccaatgcagggcgtgtcctaaccccacggccaagccctccatgtgccctctgcacctgctccatgccacgtctccacatctcttcaggttgcctttctaggtgctcctcccccttctccatgttgttctgcaccccaggaaactcacttgctggctccaccccccggggctcatgccctctg

SEQ ID NO: 217089 - DNA, 405 bp, Homo sapiens
atgaatggacgagccagatgccaatttataaatttcctactgcacaccttgaatgtgaaaggtactcccagagtaatttctctcgtgttctggttaccttttattgtcagggcgcctggggacggccttaggtgtcttaggacatttgacgagttccactttgatgggagatgtttaatctgggcctccacatggagatttctctccaccttgttagtgtctagaagacttccacctccaatagcaggattatgatcttttgaaaagcctgtgtaaatttgagtcttttcttttataactccttatcagtcaccgacagcttttcccataattgctattataattggatcacacatttgttatgtttttggatgaaatacactatacccctgccgaccctcacaa

SEQ ID NO: 217090 - DNA, 514 bp, Homo sapiens
agttgtgtgagctccgggaaagaggggaactctgtggcggtagccatagtgtctgtgtggcttctgcagaagatggagctgctgcagaacattaagagacaggcagagaggaggagcaagaaaatataagcttgggagagctacatggataaagcaatggtgcaagaacaaccagggcagtacacggagaaataaggagacctgtcaatggggacagaaggctgagtgacatcagagcaagtgaaacacgtagagccacagttctgatcttctcacgtaggcattgggatataccaaagccttcatgaagagggatagcatgaacgaaagcaagcattaggaatctggctgtgatagggaatttcttgtcatggtaccagcacacaggcaaataagaccacaacagctgaaatatattaagcattttaaaataaaccaaacactgtgataagagcttgacatgactcatctactctccactatgaccttggtagctagatgttactttcattga

SEQ ID NO: 217091 - DNA, 362 bp, Homo sapiens
gcatgacaaaaagtattgttctattgatttaaaggaaactgtccttgacattttcgtgtctcactgtggggcaggggaggatggacccactggcagagactggactgagaaaagttgcacaatttaaggtgtcgctatgctagcaaactcagtcatcaggctaactctcaggaggatttgcagtggaagcaaagccagcatcccctctccatttattctgttatctaggagacacttcataatgccaaacaggggccagggttgtaggatctcttccctaccagtgatccatgtaatactttttttctccaaaaattctatcctttgaaataacttatccaataaatatgctgcatatacta

SEQ ID NO: 217092 - DNA, 525 bp, Homo sapiens
actcagtgattctgataactgtggttagcttgggtatcatgtgtgtgtgtacatatgtgtgtgtgtgtgtgtgtgagagagagagagcgagagagagagattctctaactctgatttccaggattggctcctgtcacttggcacccttgctgactgcacctgtttgcaacattgggctacaggaggagtcctggaatggaagcctgatgaaaatgactgggtaattcttaggatgaaatagaagaagaaatgtaagacatttggagttggcaagcaggcaccctaccagttttgagatggggcaggtaggatttcaatggcatgttacataaccatcctctaaagggacagaatgtacatttcagtggcagaaaaagaaaagcactctgttctactatggttaattgttattaataatttaaatgttgctttatcatattacatatttctgcttacatccaatgacttacataaaaaaatccttagatcctagatttttggactaagtaatctttttttaaaaaa

SEQ ID NO: 217093 - DNA, 664 bp, Homo sapiens
actcagtgattctgataactgtggttagcttgggtatcatgtgtgtgtgtacatatgtgtgtgtgtgtgtgtgtgagagagagagagcgagagagagagattctctaactctgatttccaggattggctcctgtcacttggcacccttgctgactgcacctgtttgcaacattgggctacaggaggagtcctggaatggaagcctgatgaaaatgactgggtaattcttaggatgaaatagaagaagaaatgtaagacatttggagttggcaagcaggcaccctaccagttttgagatggggcagacactcagcagcacatttctgccttgaatcaattcccagtagagttagaagaccaaactactgcaggctgaaaagcacctgaatggtggacattgtgtcaagaaaggtggtgaaccctactctcggactgaggtggaggcaaggataagtgtgcattcttcagaaaaggctccagggatcatctggaagaagagaagttatgggtcatactttaccatctcaggcttgtggacattgctcatatttatgtaacaaagtctttatatcaatattagcttttctatgtaccaatttgtttctaatttaaaacaagcaagtatagaaacttattattgactagtcttggctactaaatatgt

SEQ ID NO: 217094 - DNA, 553 bp, Homo sapiens
tgaaaagtgaagctaagagatctagcattctgcagaaaagtactggagatgactcaggactgaaaatgatcatgaagcccctttgcaaatatcaaagtggtgatgaagcagtcatgaactttgaccagaagccgtgttttgtgggattgccactttaatcgctcctgttcatcattaggactgcagccagagtgtggaaggagggactccaaatatataagaagatgctaccacaccctgggagattggattccccactgcgctggctttctcaagctctgtgaaatgtgatgttggctggaacttatcatgaagagctttgctgtaaaacagatctggggtaaagtgggtcttaaaaatcctttctctatacatccatgtagatagagaccatctccattaacagaagagggaatgatgccattcttataaagaagctgtactgtgggcacatttattcctaagttgatagtagctattttaactatgaaaaggatctgcccagatgaaagaggggctgcctgtggagcacagctggatgggggaagcaagg

SEQ ID NO: 217095 - DNA, 639 bp, Homo sapiens
agtggagcccaggggttccaggccagcctgggcaacatagacctctctaaagtagtaaaatttatatgggaaggcaaattatgctgtaacaattctgtaatgggaagaaattggaggagtcactacctgatttggactcaatataaagatgcagtaacgtattagcaaaaggatagacatgtattgatggaacagaatagccgaaaaatagacccacacaaatatagttgatttttgacagtgcaaaggccattcaatgaagaaaatagagtcttcaataagtgatattgaatatgttgcaaaaaatctttcacccattccttgtgccttctataaaaactcaaaatggatcatacggccaggcacagtggctcaggcctgtaatcccaatactttgggaggctaaggcaggcagataacttgaggccaagagttcaagaccaacctggccaacatcacaaaacaccacctctactgaatatataaaaattagctgggcgtggtggtgcatgcctgtagtcccagctacttaggaggctaaggcacaagaattgcttgaacccgggagagggcggttgcaatgagccaagattgcgccactgcactccagcctgggtgacagagcaagaccctatctca

SEQ ID NO: 217096 - DNA, 525 bp, Homo sapiens
cttcagaaaaaaaaaaatgctttcaggattgcctcttcagacatggttacaatacatatactcagttttctttattaactggaccagattaatcttcattaaactgactgaactagtaatcttttaattttatgtcatcagacataaacatttgtcttttttttcgttttgcattagcttaaattggtttacctctcctgatagtctccctataccctttttctttgtcctttatactccaagtaaatcatataccatatgtgggatcaaatggggagtaaagtatcctccatcctcctgtcctcatttgctgtaaaccggtgtaaattcttacttgtgcatctacaatctgtattattgggtatgttcttaatgtaatctttgttcagctgatagtttatttcaaattatgaaatctgtttatatcattacttgtttttcctatgacatgtagtttttcacaatagcaaagagttgatgtgatttttgtagatatgctagaaaataaaaactttttaaataaca

SEQ ID NO: 217097 - DNA, 646 bp, Homo sapiens
atagaggactcacagacagggtccagatctgccttctttttgcaccaatttcttcatctataaactacaagtattctaaacatttcagaaagaggatgtaaaaagaaattatatgtagcttagacattgtaaaatattgagaaataagtaaataaaagcacaggcctaacaaaaacaaattaaggcatcatttttaaatcatctaaacaaatggaaataccaatcatgttctaggctgtgggaatttgttatgatccttccaaatgtggcaaatcctccaacaactgagagatatatagtcacaactgtggtgtattggaataggaataataaagttgatcagtggagcacagtagaaagtttagaagtagacactggtgtttatagaaacattgtaaataagttaatagacatgcttaaaaattctgggtatattaaatatttaaatttatttattcaactattctcttaactaatatttattgaagatctactgtggcttttctaggaaactacattaacaatgcttagctctgtatgatgggatttctgatgatttttgctttttttaaaatataggagaaattactaaaacacattctaagtataatttgtcccagaaattatgaatactattagtaatgac

SEQ ID NO: 217098 - DNA, 330 bp, Homo sapiens
ggagagaaaaaccaactcagtgtctacgaaccagcttaaacagaatggatgaccagctcagccaataggaaagaatgagctatggcaagcacacctgttttgtgcatttgcatggcatcaaatgcttaagaatagtttaaactggttatatatgccctttgcagtcctgtttaccttttccttttgttgaatgaatgaaaggctaagtgtttgaatgacagtgtactgtagccatagtattatacttggctttgaagtcctaatagatctatccatgattggtggtggaaacagaaaacagtgctagttctgaagatgtggagttgacta

SEQ ID NO: 217099 - DNA, 441 bp, Homo sapiens
gaaagaaaagaagggagggatttgtgacgaaaagggctttccagaaaagcagcgtttcagtgcagtgtttcccactgttccgagaaacaataactaaagtccttcccaaatctgtgactcctgtgatcaaaaaaaaaagattacaacccagatatgagttggttgtaattaatataatttgtttaagattaaagtgaattaattaattgctttctttttcatttttaaaccaacctacctactgttggctgaaatttagcagtcttcacatctaatttcagtggctctgtcctctactgagctttaaatctcaggtcaactcactgttgatggcatcacataggccaaggacaaaattcagagaggtcagatatgttcctttaaacatgtattccaaattatagagaagaatccctgatgtatcaaaaatggtaataactg

SEQ ID NO: 217100 - DNA, 428 bp, Homo sapiens
ctgatgggcttttgttacatcccatcctttgcataagggcgctggctttaaatatttaacttaaccactcagtactgaaacagttgttagtgagacctggccttggcctcccaaactgctgggattataggtgtgagccaccacacccagccttagtattaggtcttttggtattttttctttctgtagactatggaaaaattgcacaaaacatagcatttttttccgcttcatttttttttccctctaacatacatgggcaaaagtaatttgaatgcaagtgctcattactaatctgttgaacagtcttcagatgaaagcactggatgaccattgtgtataagccagtaaatctctataactattcatgtaaatataatgtgaacattgtttaggagaataaaaatcacataaattacagacttttt

SEQ ID NO: 217101 - DNA, 410 bp, Homo sapiens
agcatatgatatattgtattttaaatatacataaatatgcatatatatgtatgtcccctgaaaagacctagaaacagtatgaaaccagtagctatgagcatctctaacacacagagtgcgggcttgaattaatattttccactaaccagggcttcttggagaagagactgaaattggaaatgtacaagattagtctgaaatatcaaaccaggtaacaaagaagctaacaaagactgctagagtaaggtcaaaggactcaggagccaactggaagaggcttccattggccaaaaatgagaattttgagtttcagtaaaaataagaactataatagattaaaatccactaagtacgtttaaattgataagttcaagccatgggcagtgaagcatgcatgtaatcacagctac

SEQ ID NO: 217102 - DNA, 567 bp, Homo sapiens
atcttgtggaagtcagggagtagaggtggtctctctcccccaagtgaaggcagcagccaggacctaccgtcagagaccagcaaggagcagagaaaggtcaggctggtgcctcagaaagcatcagcatttctgcacaacttaattaaattactgaaaccttttctgagcttggagccatctttcttggagagtaatacaattgaaacagataatttaagccaaggaggaaggacagaattggtgagctcacatatgtagatggacatgtaatgacgtctgactaaaacacagaggaaaaaccttaaagtgaatcatgtttattcaatttccaaacaagtgcaaagacccaggcagcgtgcttcatgtttggactcttgaagaacacacatggaaaaaaaaaaagaaaaaaacctcttcccctctcaacccttttctaagtttttattaagaatatattaatttgagcattaatatgcaatgtatccatctttgtcagttattttccagaaaaatctagctcattttttgaggcaacttctagccaagttgtttcagttgtggagaatt

SEQ ID NO: 217103 - DNA, 466 bp, Homo sapiens
aattccagcatataagagtattttataatcatggaattgataaaaataaaataggttttgttgatcagaggctgatactcaaaaatgaggacattttaaggccataaaaatccccagttaaatgtcaacacctgcagacacaatggcatggctgccccaggctgttgacaaatagtgacaaacaggaactaagtgtcaaaagttctaaatatagagttagggatttctggatgtgagaaaaatgtatgggttaaggaagagtatggtaagtaccagttggatgagctactagaatcaagaaaattctacaagtatttgtaagtatttgtaagtttataagtgttgacagaagattccaccactaaaatgcctagcatgcctcaggcctgatcgtaccacatattctaacaaacacagattaggagacatcctgatgccttccaatttcataataaaactcaaggag

SEQ ID NO: 217104 - DNA, 431 bp, Homo sapiens
caggcttgtgaagccaggacccatgcattcaaagaccatgccaggtgcccccactgcacacctcatccccacataccagtgagggggagagaaatgctcctgcactgcctctgattaactgctttcctagaagtcacacatataaaagggatttaattctagtgggattgaatctcaatagtttccttattaggttgatttctgttaatagtttaagtactggatatacatgaattagaaaatctagattattagcaaatgcaaactataaagtattttataaatgttatcttgtttgtcaggggatgagtgagatattcattatacaaaaagtagtgtggattttgaggtagaaggtttactaaggatcataccgtagtatgaaatagccacaaacattcagtgaaaccaaacacccccgcttaacctca

SEQ ID NO: 217105 - DNA, 1552 bp, Homo sapiens
tgcctgtaatcccagcactttgagaggctgaggcagaaggattgcttgaaagccaggagtttgagaccagcttgggcagcaaagtgagaccttgtctctacaagaaaaatttaaaaaaaaaacaacaacaaaaactaggcaggtgtggtggtgaatacctgtcatctcagctacttgggaggctaaggcaggaggattgcttgagccaaggagtttgaggctacagtgagctgtgatcgggctactgtactccagcctgggtgactgagaccctggctcttaaaaaaaaaaaaaaaaggcttatgtatgtattttgttgatttttgactaaagtacaaaggtaattcaatggggaagtgatagtgttgtgtttttgagctagaagaactagcttctatctacatgggggcggagtaaagaacctcagcctttgcttcatacacaaaaagattaacctgaaatggaacataagttaaaaagctaaaaccataaaacttttaagagaaaacaggagaaaatctttttacccactcgaatgggtaaaatattggcaaggatgttgatagtaagaaaaataaatgtaaacatgccccgatttacggttttccttgtcaaacatacccatattttcatggctttgtggactttggtctctatcatttaagaatgtcatagaataaaattctttgaaataggaagggatattagagttcatctataataatgtttctcaaactgcttccttccagttttgttacctcaaagacttattttttctctctgacctctttcattatgtgtaaatgagtaaaatgggtatgatgccaaaagtttagtattgttacaggtattatatctggaaataaatgttttataaaactgtaaaaactctagtagttgggagctgtggcttatacctgtaatcccagagctttgagaggccaaggcaggaggattgcttgaggccaggactgagagatcagcctgggcaacatagtgagacccccatctctacaaaaaatttagaaaattagccagtcttagtggcatgggccaatagttctagctactccataggccgaggcaggaggatcctttaagctcaagggtaagcagctgtagtgagctttgattgtgccactgcactccagcctgggcgaccgtgagacttcatctcttttttttttttaaaagttctgtaattactactgacctcccaaggtgatatttcaaccgttgccttcacccttattccagaaatactaaaactttagaattatttttgaggcaatcatcttgattttcctctcctacaaggtaaatatttttaagtgtaaagttttggagcttatatttatgaatatttgcaaggcttttttcccctccgcctcctttcatgcaaacaattgaagtggctagcttttctcctctcctggaataaaggaagtgaattagcaattgaatatataacctaggacttctctaaattaggcacctgtgggtacccttagggtccatatgcttacaatatgagtttctatcaccattatta

SEQ ID NO: 217106 - DNA, 277 bp, Homo sapiens
cgacactcttcccatacttcttcccatcaactcctcccagatccttggagcttactcaatatcacttccttggggcagctgcctgctccaccttgtatggccccatgaggctgtgcaccccaactttacagcacttaccatagcaggtgtcagacatagctctgtgggttactgatgaacaccggcctccctctgtggattgtcatcaccatgagggtatagagcagcttgtccccagaactgagcagcagagggcagagcacatagtaggccctca

SEQ ID NO: 217107 - DNA, 324 bp, Homo sapiens
tgaaatttcatttccaccagttcattttcttcacatctaatattttatttttggctttctggcctagagctgatgggaattctgcagcgctatccattttcgaaagaaacagttttaaaaagtttccgtgactgagaagacacagctaagaatggtaagaggtatttccaggggttctgcctttagcagacagtaacctgcctctggtatgcatgtgtgtatgtgacaaacaaatgggaaaaatgagaaccttagttaagttgagggacaaagaagcccgagtttctcacagccagaccaaacaggagttggctagaggccctg

SEQ ID NO: 217108 - DNA, 433 bp, Homo sapiens
cttcctgggacaccatctctttcccctttcaatagctctcttttgcagtcgtatttctcaccctcttctaattcacgttaccctctctgggtgggacgttacccaccacctctctctaatgaccttccaatctctgtttctaggcctctttttctgaactccagagtcctgtttaccactgcctcttgagctccttcaagtccacatgtcccacagtggactcattgcctctgactctgctcggtcccagcaagggccctgaagccgctggacccatagcatggagcttgctgggtaccttgtacaggggggctctgggctactcactccctcactccccaggtagcatttggtccagtctctagatttttccagccatttatcttgcttttcttctgttttagctctgcccggccctgagatttggtgccca

SEQ ID NO: 217109 - DNA, 519 bp, Homo sapiens
cggtggctcacgtctgtaatcccagcactttgggaggctgagggaggcagatcatgaggtcaggagatggagaccatcctggctaacatggtgaaaccctgtctctactaaaaatacaaaaaaaaaaaaaaaattagccaggcacagtggcgggcgcctgtagtcccagctactcgggaggctgaggcaggagaatggcgtgaacctgggaggcagaactgcactccagcctgggcgacaagcaagacttcgtctcaaaaaaaaaaagtaaattataaaatttttctgtaaatatgcctgtcaagttacagaatttacattcctttgaagaatactgtatgaatgaaaatttgatagaggcactgagttttaacattatctattaaaaaattaatgtaactatattgcaatgttttatagtttttacaacatatttatgaattgattcatgtattatactttataacaggtgaaaaacactgttaacaaggacatctgccaataaatttaataataaaa

SEQ ID NO: 217110 - DNA, 261 bp, Homo sapiens
gggccgcaccagaggatcccagctggtccgataaagtctttgaaaagattgaatgtgagctacttccacagtttaatgtccttctaatccagtgatccacaaactaaacacgaaatgaaacaaaacaaaacaaaaaacagtgaccaggtctttcttcgaagaaagtctaatgtggatcttcaatataaaatactaataagtaaatagaacataaaaaatttggttattaacatcattatattttttaagtacttaaaaacc

SEQ ID NO: 217111 - DNA, 680 bp, Homo sapiens
agatatcatacaacagaataaatttataaagggataatgaatggaactggattaaagattttaaaataatttcagcgtgttcagaatattcattttgaacttttagccaaaataagtagtagtgtattttcaaaattcatttaatcgttcattagttgctacttagaataatgtatcctgtaagtttatagttaaatttaaataatcttttaattaactttcagtaaaagattaacaacatgatgactagaaaagctggaaataaaaattgagattttctttacttaaatatggaggttatttgcttatctaattttgaagagattttttgcatggtgggggatatgttggatgtgcgtgtatttctttggtttttatgaagaagaatttgaaacatacacaaaagcagacccggaaattctctccagtacctttattcatttcctttcttgaaatagtaggtctcatatttcatttgtaaatcctaatgttcttatatcagcaaaatatttaatgggtctgcttgaactccaatttcttcaatctaaattttatgctttttttaactagaatgctgtggatgcattaaaagttaaacatgtatctcttagctgggtgcagcggctcatgcctgtaatcccagcactttgggaggccaaggcaggaggattgcttgagct

SEQ ID NO: 217112 - DNA, 335 bp, Homo sapiens
aactagtgctcagaaaggctgaaatattgcccaaggcctgggtttcaggcccagctttagtccagttgagctctgtctgtggcaccctagaaacaggttaagcagccgggcatgctggctcacatctgtaatcccagcaccttgggaggccaaggtgggtggatcacttgagctcaggagttcaagaccagcctggccaacatggtgaaacgctcatctctactaaaaatacaataattagctgggcgtggtggcacacccctgtaatcccagctacttgggaggttgaggtgggaggatctcttgaacccaggaggcgaggctgctgaatctgt

SEQ ID NO: 217113 - DNA, 552 bp, Homo sapiens
gcttatctgatggtacattttctccgcgaggcacatcacagccttcttgtgcttaggaatagtagacagcacttcaacactatgccatttaggggcgattctgaacagcagaatcgccaataaacatcataaaaaagcaaaaactatggcactaaatgaaaaggacagtgtgagagcccaaacaagaaagcaaagcctcaccttgtttgatctcagctctgaacatgaatgtcaggcaactcaaatttttcaccattccatgtatgtctgtgaataatcctgaaaatgccacaagtattgattttagtgttaaaaataaattttattgaataggcaaatttgcaaatacaaaatccatgaatagtgaggattgagtataactagcaggctattggacacgaatctttcaccaattctcaagttcaagaataatgtcccttacagttttaaagagctttaaatcaacaataaatgcctcaatagggagatgacatatatgagttctacacataatcactggacaaaccaatatcccatccaaccaaaaatggg

SEQ ID NO: 217114 - DNA, 378 bp, Homo sapiens
attttatttgtgcctccaaaggtacccacaaatgcctttttcatgtcctcctttttcagatgtttcattgccaaattgccatttcttggcagtcaagaaaaatgtactgagctggtcacgatcctagttgtaataaacaaagcagtgttccttttctccaaggagcttacattctcaagtgacacatacatatataagtgagataatgcaaatactgagaaaaattatgaagatcaacaaaatactaacttagcaaaccaaattcagcaacatattaaaagaattatacaccaggaatgagtgaaatttattcctggaatgtatgaatggtttaacaactgaaagttaatgcgatacaccacattaatagaatgcagg

SEQ ID NO: 217115 - DNA, 432 bp, Homo sapiens
aatatacagaaagttttgtctatatacatatgtacaggcaataattttttacttttaggtcttcagtccatctagggtttttttttctttttctttcagtgtttagtataaaagagggatctgtatttttccaagtattttgctcatgctctttcagcatttcttgactaatatattattttcccactcaaaatcttagttttgttgtatagcacatcctattatatataggtctgtttgtgtactttcaattattttatgttcctaataccaaacttttattatttttactttaatattttccctcttcagtagtctgttagtgttttgaaatatttttggcagttatttctaccctgtttttaaaaaaattttatcagggttttcactataattgcattgcatttgtgtattaatatggggagaattgac

SEQ ID NO: 217116 - DNA, 309 bp, Homo sapiens
atgatttgtttttgttttattgaagttaaatatgcttattccagaaaacttggaaaatatagaaagatttcagaaaaatgtggcttataaaacattcagtcccacattgaggcaaccattcttatgattttgctccctttcttaaggtatatatttttataataggtggggtcatactaaatatagtgttatatcctatttgtttcatatattgttatttttttcccatgtcattaaaaattatctgaaaaccttttagaactgcaccatactccattgatgttccaccagtaaattgtgtctgtatta

SEQ ID NO: 217117 - DNA, 535 bp, Homo sapiens
actggacacacctcaccccccaacctgaacatgcacagacacttagagtggcctctggttgggcagaaccatctaacataatacatatcttataagaaaaagttgaacatctcatgtaaattattggacactcctgaaaatgaaaacacagaatagttgtatgggtacttggagcatggttttcctattaaatgcgtgtgtctttcaaaccatcataaagtcacaaaattgtaagtcaggggccatgtgtggcttatacattcggtcattccccttgtccttcatagttcctgtcagctgatgcttgtccacatcattttatcagcgcttgagagctgtgattttagggttcagtctctggttcttggagtaagaagctgatggattctgtgtagcttcactacagcctgcacagggtgggacagagaggtcatctttgagacctatgaggtcatgttttttgtttttttgaggcagagtctcactctgttgcccaggctggagtgcaccgctgtgaactcggctcactgcaacc

SEQ ID NO: 217118 - DNA, 365 bp, Homo sapiens
cagctgtcatgttagctaggcatcctatatactttttctcattttgcttcatgattcggagggtaaatgttacccatattttatagatgaggggattgatggtaaaactcaagagaggttaaataacttacctagctactaactaaaaataactaacctggaaaaccagatctgtctgcttaccgaaacctgcactgtttcctctttgtgacgctatagtttataatatttgattaagggactgttttcattttatttatttattgtttagacagagtcttgctctgtcgccaggctagagtgcagtgagccgagattgcgccacttcctgggtgacagagcgagactccgtctcaaaaaaaaac

SEQ ID NO: 217119 - DNA, 972 bp, Homo sapiens
gctaggatacgctctgaccacctgtgaccctgaactagaaaaattgggtgaataattatcttacttgtttttattaatctttcttaagtgtatgtgtagctcacattcatttcattgtttaatattagaagtgttttggtattagaagttcggtgatgtttttgtaactagaaatacactgtaggaacttaacacttgtttatgtcgattggaccatggtaaattgggttctgttctactttgtttcacttgaagttgcagcttccaaggacctattgatgatgttaagtgaggacttactgtacattataatcaaattgttgaaagcaaatgataaagagaaaatctgaaaagcagtcagagaaagagatatggtcattttgtgtgtagaggaagaaagataaagatgattatcttaatagatttatcagaaacgatataagcaagcaaactggggaagcatctttaaagtactgaaagatgaaaaatgtcaatctataattctgtatctgacaaaaatatgtttctaaaataaagatgagataaagatgtttacaacacagaagcagaaagaatttattgctaacatttcccctctggaagaaaatttaaaagcaattcttcagacagcaggaaaatgataccagatgcaaatatggagttacatgaaagaaagaacactagaaatggtaactacttgggtaaatacatgagattttttttcttatcagttaaatctccttaaaagataagtgactgcttaaagcaaaaatattaacaagctgttgtggggtttataacttatctaaaagtaaaatgcatgataacaatagctaaaaggcagggagggagaaatggaggtatactgttataagattcttttgctctgtgtgaggtgataatatcactggaagatagactgtggtaagttaaaaatgtatactgtaaactctagcccctaaaatagcaaaa

SEQ ID NO: 217120 - DNA, 450 bp, Homo sapiens
ctaaattcgcggccgcgtcgataaagatgtttacaacacagaagcagaaagaatttattgctaacatttcccctctggaagaaaatttaaaagcaattcttcagacagcaggaaaatgataccagatgcaaatatggagttacatgaaagaaagaacactagaaatggtaactacttgggtaaatacatgagattttttttcttatcagttaaatctccttaaaagataagtgactgcttaaagcaaaaatattaacaagctgttgtggggtttataacttatctaaaagtaaaatgcatgataacaatagctaaaaggcagggagggagaaatggaggtatactgttataagattcttttgctctgtgtgaggtgataatatcactggaagatagactgtggtaagttaaaaatgtatactgtaaactctagcccctaaaatagcaaaa

SEQ ID NO: 217121 - DNA, 584 bp, Homo sapiens
aggtaggaaattactgaatccttatcaagaccttgatgagaatgttgaaaaagtagtgatgaggaaaattgtgtttgaagtcatcccacatactttttatgagttaattataattagtaatacgtgcacgatatatacatctcttgaatattaaaatattttgaagtaggcagtcatatactcattaacagtgttccattgcattgtgtcacatggtcactttaactgaaatcttgttggagtgggaggaggaattcatcatggtggaatagaatcagatgttcaaataaagcaagttgattttggagctgtattagaaaattgaaaatgttacaaaagtgcagagtataaaataaatcagaactgccaacactgtaaccatttcaaagttacagggtgaggcagagattatctggattttcatttcctgtaagatgtaaaggatgaaacagggtcagagaaacaccctgggtttagtgcattggttgcaaaatgttcagaagttaattatgaatatttgctgcctttagtcatatgctcaaataccaacttgtattttaatcaccaataaataattagagtct

SEQ ID NO: 217122 - DNA, 422 bp, Homo sapiens
atatcatccaaaaccaaaggcaaaataaatttcaagaaatataaaagttgagagaattcatcaccaaaagaccctcactgcatgaaatgctacagaaagttatttacacaaaagaaaaatgatacctgacagaaatgtgaatctacacaaaaaaatacagaacactggaaatggtaaatatatgagtaaatatttaaaattatttcatcttgttatttaaatctctttaaaatagagttgattgttaaaacaaaaatgataacaatgtagtctggagtttataataagtataaaagtaaaatgtataaaaacaacagcataaaagctaggtgtgggaaaatggaagtactatgagtgttataaggttctcatactataaataaaatagtactatataacttaaaggtagattgtgataactc

SEQ ID NO: 217123 - DNA, 203 bp, Homo sapiens
acgcaatgttcttcaatcctgtttttttccatcttgatctgctaaattgcactccatctgttagtaatttcagtaaattataaagggattagtgaagcaatgctgttaaaacatgcccaacttttaaacatataaaacatataagtgatttgactagttttctctcctacgttttttttttttttttttttttttttttaaga

SEQ ID NO: 217124 - DNA, 434 bp, Homo sapiens
ctgggcctcaggaagggggctgggggttctagggctatggctggggctgaaagagcagccccggccctgagaggacccacagggacaccaaggctgggggctgcctgtgccacttagcactctcatccccacacctctgcagcttctcactgtgggaccctgggtttctgccctggggtttctctggcctttggagcacacttggccagaagtgccagaaagtttgaggatcagcctttaaccgatgacagctggagttggtgaccaactgctccagtttccttgccttttgggtgggacctccctgtggcaggttctgcgcagtctcccacgggttccccacaggactgacccacagtgatgacctgctcggcagccaccatggctttcttcttttccctggatcacctctgaaataaatgatttgtacttaa

SEQ ID NO: 217125 - DNA, 439 bp, Homo sapiens
caggtgatatttgtgtccttgaggatagaccagaggttttcagggactggtgcagtttgagaaatcccctggtatgcccccgacccaggagaggaggttggcttccgccactccttggaattcacttagaatttccctcttttccagcagttaaactgccatggaaggagctggccaccaccttctcaactatcccactctacctggagccctcccaggaaatactgggcaaagtggagacattactgtgaactccagaaaattccacgagtgtaatctcttcccacgtaacccatctcccttcccccaggatcccagcccaatgcaaggtgttcagaggcgtttctgaagcttgtcaatatgccaaaaggaataaaatatttcagtccctttcaagtgagtcaggttctgtgttagagaaggctccttagggcagcaa

SEQ ID NO: 217126 - DNA, 312 bp, Homo sapiens
acatggcaatcatggagctgtcacctatatcatgctttgttggagtatagcaacaatggttaaaagcatgaatttagagtcaagctatacaaatatttgtaaattttgacaagtaccaaaacacaaaaaagataaggaagcattggtttaatgaaatggaaatatcaaaaatatacatagttggtagaattttaaattagtaaaaccaatctggaagtccatttggttaaaagtattcaaaactccaaaaatatgcatgtaatttgcctcagaaattcaattatgaattgaatttattcaatttcttctgaa

SEQ ID NO: 217127 - DNA, 629 bp, Homo sapiens
gggtttcttggaagtggttgggccttgggcctgaggaatattattaaaaggagagatgcttactaagggcaagtttggacacaaaagtactttgaattctaaatgtggacattttttattttattttattttattttatttatttatttgagacagtctcgctctgttgcctaggctggagtgcatgagtggcacgacctcagctcactgcaccctccacctcccagtttcaagcgattctcttgtctcagcctcccaagtagctgagacaacaggcgcacgtcaccatgcctggctaatttttgtatttttagtagagacgggatttcactatgtttgccaggctggtcttgacctcctgacctcaaataatccacgtgcctcagcttcccaaagtgctgggattacagacgtaagccaccaaacccggccctaaatgtgtatattttaaaataggaaaccccctatgagataaccccctgatatagctgtttggaatttactaaaatgcctttagtgtcaacattgtcctggtttctggctccataggaagtggagactgttcctaatattcgtgctcttgactgcatacgtgccatcttgctttgctgacctgacaccctgtgtta

SEQ ID NO: 217128 - DNA, 123 bp, Homo sapiens
aaccagctacagctactcagaaggatggggcaggaagattgcttgagcccgggaaagcggagtggcagtgatccgtgactgagctactgcattccagtctgcatgacacagagagatccgaat

SEQ ID NO: 217129 - DNA, 225 bp, Homo sapiens
ggagatgaaatgcatggtaaataaaaactaaactagaagccgggcatggtggcgcatgcctttaatcccagcactcaggaggcagaggcaggtggatttctgagttcgaggccagcctggactacaaagtgagtcccaggacagccagggctatacagagaaaccctgtctcaaaaaaccaaaaaaaaaaaaaaaaaactaaactagaaaccaatttatgacacc

SEQ ID NO: 217130 - DNA, 517 bp, Homo sapiens
ggcttcccctggctgctcagtagggtcctttggaagctgctgaaaactgcaaatgcttagcccacccaggctccgtgtgacacagccaggagtgagctccacagctctgtgtggtggacatccagcctccctaccctgggaaagctgaaatgcaaagaaacacgtgttttagtagctaattattggcctttgagcttccaaaaccccacattccggcaatctgtagagctcttcaggccaggcgcattggctcatgcctgtaatcccagcactttgggaggctggggcgggaggatcacttgagcccaggagttcaagaccagcctgggcaacatagggagaccccgtctctacaaaaaataaaaaattagctgggtatggtggcttgtgcctgtcgtcccagctactcaggaggctgaggcgggaggatcgcttgaacccaggaagaggaagctgcagtgagccaacatcacgccactgcactccagtctgggtgacagagggagaccctgactca

SEQ ID NO: 217131 - DNA, 301 bp, Homo sapiens
cggcacgaggggttgttccaaaacactcagaacagtgctttgcccataaaggcagtgttagtttttgctgtctacttgggtatcacctgtgaactttaggtcttttatgcctgaccatcggcctccactgtacacctggatccaccaagtgtcacactagggggtttggattaagtaggtgttgttgcaattgctgacaatgtttggttcattcaagttttaattctgctaaaattattttgtgaaacagatggattgtgaagggtgttaacagaaataaaacaactattaaaaaaataca

SEQ ID NO: 217132 - DNA, 587 bp, Homo sapiens
aggactttgtcataacctgtagaaaacattttcccaatgtctctttaccacattggattataaattttctacattcttcttcttcttttactgggcatttatacaacttgaatacaaaatatgggaaaataattttaaaatttaattttcaccatccttgtcagacaaataacattcattatgaatcctctgaaaattccactgttggtacctctatttttccaggctttttccctcaccccttttgtctccatttttattcctcacttattactatctcaataacatcatttctacattttagttattatatcaaaaagaagcaaaaatattaagaagaaactgaaggaagagcaaaactcagtaacagaaaacaaaacaaagaatgcgtcacataatggaaaaatggaagacttgtgaacgcagacgacagaggtgccggctgaggcagaggagaaactatgggggtgctgggagactgagcctgtgggcgtggcttgctcccagagaaccttatggaagaggacatcaaagaaagaaatgccagacctgtatcccagaaaataaagccacatgatatagcaact

SEQ ID NO: 217133 - DNA, 922 bp, Homo sapiens
aagggagtagaacttcttgattcctcagataaatagaggacagatgctggactgtagctaagtatttcctttcatctacgggataaaatactgataatttgagagtgatggacaaggttcagagtggtttcctcattttgtttttgtttttaatggaatgccaacttcatttatgcttgccgtatgcagatggactccatcccactggaaacataacaggcttaccaggcagtaaacggtcacaaccacccagaaacatcaccaaagagcccaaagtgttctttcataaaacccagttgcctgggattcaaggggctgcctcgagatccacggctgcatcccctacgaaccccatgaaattcctgaggaataaagcaataattcggcatagacctgctcttgttaaagtaattttaatttcgagcgtagccttcagcattgccctgatatgtgggatggcaatctcctatatgatatatcgactggcacaggctgaggaaagacaacagctcgagtcactttataagaacctcaggataccgttattaggagatgaagaagagggctcagaggacgagggtgagtccacgcacctacttccagagaacgaaaatgagctggaaaagttcatccactcagttattatatcaaaaagaagcaaaaatattaagaagaaactgaaggaagagcaaaactcagtaacagaaaacaaaacaaagaatgcgtcacataatggaaaaatggaagacttgtgaacgcagacgacagaggtgccggctgaggcagaggagaaactatgggggtgctgggagactgagcctgtgggcgtggcttgctcccagagaaccttatggaagaggacatcaaagaaagaaatgccagacctgtatcccagaaaataaagccacatgatatagcaact

SEQ ID NO: 217134 - DNA, 186 bp, Homo sapiens
cagtgtcaaaaaagaaaacaaaacaaaaaaaaacaaaacaagctatttttgaaagtgtttctggttttgacttccattcccctctgtaaggacaaatatattaactgaaagacatagctaaaatgaacatttttgagcacttcttttcttttctttctttttagcaataattcggcatagacctgc

SEQ ID NO: 217135 - DNA, 442 bp, Homo sapiens
agatacctaatttcccccatctgtgaggagggctggataagggatggggagagaagctaggaatatcactctagggaattccccagaagcaggagttccagataataggagttttccacttgtgtcttacctagtaagtctaaataacctgatacaaatagcttattgcaaatactaaatgtatagttaaaagattagctttggaggtagtcacaaacatgtgcttctaaaaagatagaaaagcctggaaagaaggtgaaagggaaaagaataaaggaagagaaaatacaccaagacagtccctaaatcttgtacaacataaataatttggttggggtgaaaacgaagaaattcaagcatggatttaaaggaagctgatgaaagtaatctttttcactttgagactgttcctagcactactcggatccactcttatgacttt

SEQ ID NO: 217136 - DNA, 477 bp, Homo sapiens
gccaggctgctcccgaactcctgacctcaggtgatccgtccacctcagcttcccaaagtgctgggattacaggcgtgagcgactgcaccaagactgaatttggaaatgatgctcatttcattctctttccctccttccatctttctttctttctttctttctttctttctttctttctttctttctttctttctttctttctttttctttcttccctccttccatctttctctttttctttctttctttcttttctttctttctctctctttctttccttccttccttctttctttcttttctttttcttttctttcctttctttctttctctttctttcgtttctgtttctttcctttctctctctctctcttattattgagacagggtcttgctctctcacccaggctggagtatagtagtgcgatcatagctcacagcagcctccaactcctgggctcaagtgatcctcctgcc

SEQ ID NO: 217137 - DNA, 611 bp, Homo sapiens
cttagtcaactgtacccaagctacttgccggacgctctctcctgagatcccgactgggggcggaaagagcaagcagctcagaagccatccagaattttcaactcatttttggggtgacctggggagaaatgttggcatgcttcatcccttaatcttcttttccagatgttgctcatctgcacagcgtgggactgagcactgtgggatattcaatctgcaccagtgttctctccctaaacatcaaatgtctcttctagccatgctccacccctgctcctatcccccttgccttccatccttcagctcattttgcctgcacagaacacgacagccatgaattctgctgcatctctctcaaataggagaacagaagtgttttcaccagctcaaccctcctcactgcaaccctgtgcaaaacaccacatcccccactcccactttcaggctctgctcacaccgacctctgtgcccaggtagagagcaccagcaaaaggctcacaacaacacaggtaggaggcactagacaaccaggcctcccaaaaaagttgaaaaaaaaaatagtttgtttatcattttaaaaaaactaacctcatacaggaagtatgagaagc

SEQ ID NO: 217138 - DNA, 453 bp, Homo sapiens
tcacagccacaccctgccgaggaatgcgaggccacccttgacttacctgtcagaaaaggatcagacaggaagagattttccagaccctacaccgggttccaaggctttacaacaataatatccagatgttctcttgagaataacatggcaaactatttcttccacattaagataagattgattccctagtgtgtgggcaaaaggtctcccactctggcggctttttgatccctgactctactaacttaggcctccctttgtggggtccatctttgcagctttctctatgccctgccccgctttactccagtgacttcctttcctgcttggttcccacttcacgtatcactcagagagcccttggaactgctagattgagccatatgagagagccatgtttgtaggtcaaaaagccaaatattgggacatttgtatgctttaacttaaaaaaac

SEQ ID NO: 217139 - DNA, 343 bp, Homo sapiens
gtttcgccatgttggccaggctggtctcgaactcctgacctcaggtgatctgcccgcctcggcctcccaaagtgctgggattacaggcatgagccaccgtgctcggccctagtatgtaccatattttctttatccagtcatccattgatgggcactgaggtagatttcatgactttcctattatgaatagtgctgcaataaacatagcagtgcaggtgtctttttataaaaatgattccttttccttggtgtagatatacagcagtgggtcaatcccattttaaaatgcaacctgctttgacctcaaacactcttgatctttctaattgttgtgatctactta

SEQ ID NO: 217140 - DNA, 407 bp, Homo sapiens
atgtgcctgtagtaaataatttggaaactacattaatgtataatatagtaatcacattttatctcattatccagataatcactgttttgcttctttttttatttattctttctatgcagacataggtatacatttttattaaagtaaaattataatgctagtctctttatttccctacacaataccttgacaaattatgacaatataataggtaccagacttgttaaattattgatcaattgattgtttaacaatggaattttgagaaatatttgggtagaaaaaaaactagttttaaaagaagagaatccaaccattaaaacatcaaaaaatgaaattatttgtaaatattatgtggcaatccattcaattttaaacaacttacagtgtcaataaaactataactc

SEQ ID NO: 217141 - DNA, 519 bp, Homo sapiens
ccctctgtctaacaccagtgagcagacgctgccctgtaaccaataccagtgagcagatgctgccctgtaaccaataccagtgagcagacgctgccctgtaaccaataccagtgagcagacgctgccctgtaaccaataccagtgagcagacgctgccctctaaccaataccagtgagcagacgctgccctgtaaccaataccagtgagcagacgctgccttctaaccaataccaggagcagacgctaccctctatctaacaccagtgagcagacgctgccctctaaccaataccagtgagcagacactgccctctaaccagtaccagtgagcagatgctacactcacagaccctgccttgaaccttttcctattttagtacccttatttatttatcttgcctgattgccctggccagaagttccaatactgtgttgaacaggagtggtaagaaatggcatccttgtcttgtgccagttttcaaagggaatgtttccagcttttgcccattcagtgtgat

SEQ ID NO: 217142 - DNA, 124 bp, Homo sapiens
ggggctgagaggatgagggactgtggagttagtgtttaaagggcacagaggttcaatttggcaatattgaaaatagttcagtggggaagatggatggccgtgatgcatcgtccatcacattgca

SEQ ID NO: 217143 - DNA, 396 bp, Homo sapiens
ttgtgttttctggtaccaagacctcatagtttgacttttatgaatttctagtatatattgtacttgataaacttagatgcctttttttttcattaaaatatatcccattgaaacttgggtttgcttcaattatgcaggtcaatttgaaaatagcttctatctttatagaactattttatttgttcttaaatatgcgtctctgcctattagcttcttgaatgtcctttaatgaaattttgcagatgtctctttcttactctgtctctctgtcttaaatgcttttcattatgtttgttcaaaatattatgttcttttgtttctgttatgaattatatcattttttgccattatgtttctaagtgactctttgttgtattaaagaatttgtcacttgtc

SEQ ID NO: 217144 - DNA, 691 bp, Homo sapiens
ccaccatgcccggctaatttttgtattttttaggagagatggagtttcaccatgctggctaggctggtctcgaactcctgacctcgtgatccgcccgccttggcatcccaaagtgctaggattacaggcatgagccactgcacccagccagatataaatatttttagaccaacttgccctcttacgaggtcacaacagtttaccttccaacagcagtgcctcagaatgaaacctccatggacatttctaaaattatatttaagggtctcccatacaaggcattatagtatgaagccagttggcacccatggcggtgatttatttcaatgtagttaaaatattatcagtgttacctatatggtaccagtagtctcagccattcctttcattgcttacattttctcacttcatgctctgggaagcccatgggaaccacaaaaagtgctcagccttatgaagtttatttcaaggtatagtattttggtgaatataagtgcaatgcttttcaaactttatcatgcaaacgaatcacctgggagttctgtgaaaaaaacagattctgatatattaggtctggggcagagcttgagattcagcagttctaactcccagtaatactaatgtgactggtctgcacgccacatgttgattagcaagggcttaggaagccataaccccttaaaagggtacc

SEQ ID NO: 217145 - DNA, 515 bp, Homo sapiens
ctgggaactagaggaaagggtttgtgtctaataggaaccaattgaattttagaaaggatgttaacatatagctgttttactgtctataatgttaaatgaatacacttttggcctctgtctagaaaaaaataacatcttaatctagtgtgtgattcttatacataagactttttagggatgacagtaatatttacaaataggtaaaaaaatatagagttgtctggtttagactcctgttgtcatggcatgtttaaagaagaaagcttccagccgagaaaggcttgtgatgaagtagcatcacctttcagttagttctctgtagtatagattatgtgtatgtgtctgcctggtcatagatgctggtagctaggtgtccttgcctgatgccaatatgattctgggctgaatgcatatgaatccattctaatataagtgtaaatagcacatgggaagataaacctaccaagagaaccacatacagatcatatggtttattccagaggcaagaatgataa

SEQ ID NO: 217146 - DNA, 527 bp, Homo sapiens
gatccatggctgggacattggaatctctctataaaggagaaatcatattaaggtattttcatcttaggcctctaaccccaagggtatctttacaaagactttattttagtgaagccttcaataaacagtgacctcatgtcaagaattctaaagagagggttatggaatattggtttgatattaaagtcattgttatcttggagctggcctgaatggactaataagtggcctgtcaccagttgtaacttacttttacaattttaatgtgatttaagggaagacactcttggaaatgcttagttatggttcatacccataatcgtgtttcttttaggtctttaaattttatataatacaggggagtagattgcatcagtacagtctttttctttttttcttttttttttttatgatgcaaacaaagcagtatcttaaattaaatcaaggtttcttaaggttccagattcttattcctaaattttccactgagtaacctccaaattcttctcctgcctttgtccctagtt

SEQ ID NO: 217147 - DNA, 555 bp, Homo sapiens
ttaatcattctattagaagaaactacactgtcccatctcagcatttgcaaaaaataatgttggtaaggtcagcagccattatcaacagggccttgcatggctaactttgaccaccattgttctctcaacctgataggcaacacctcaatcctttgttctccaactaatcagtaaaataagtaatgcatctctgcttctgtaatgatatcttagaatttttagtatgtttcttttgaagtgcccaaagcccaattctttgggatatcttttgggtatctggtatcatgtgggagtgaagaaagaaagtttttggagaaaccaacaaatgaaagctgtgatagcacagaagctaatggcattgacagtggagtaggtagtatttaatctgtagtgtttacaacatagtagatagaagtacaaaaatttttttaactataactctttaatagcttgttttatctagtaatatttaaataatgaagtttccttgatcctttgcttttgcaacctaacaactttaataataagttcacacaataaacaaattagtagaaa

SEQ ID NO: 217148 - DNA, 407 bp, Homo sapiens
atctatgactgattagtgtacgtgaaagagatgaggagaatggaaccaacttggaaaacatacttcagaatatcattcatgagaatatccccaacctatccagacaggccaacattccaattcaggaaatccagagaacctcagtaagataagccacgagaagatcatccccaagacatataatcatcagattctccaaggtcaaaatgaaagaaacaatgttaaaggcagccagggagaaaggcaacgtcacctgcaaagggaattccatcagacttagcagacttctcagctgaaaccctacaagccagaaaagatattcaacttcttaaagaaaagaaatttcacgtagtatggcagagacagatataccatataataacatggtgttattataaatggttaaa

SEQ ID NO: 217149 - DNA, 620 bp, Homo sapiens
  misc_feature (500)..(500): n is a, c, g, or t
  misc_feature (575)..(575): n is a, c, g, or t
  misc_feature (608)..(608): n is a, c, g, or t
gtatgccttgaccaacataacacctacattatcacatccatatgcttatacagttgtgtattaaagatatggatatgttctgagatatcaaacaattttatcattatgtgcatgccatagaatatagttacacaaatcgagatggtacagcttactacatacctaagttacatgccaaagtctattgctcccaggatacaaacctgtacagcatgttactgtactgtatactgtaagctattgtgatctgtgtatctaaacatagaaaatatacaataaaaataaggtattacaggccaggcgcagtggctcatgcttgtaatcctagcactttgggaggctgaggtgggtggattactttttgaaatgagcctgaccaacatggcaaaaccccatctcccaggttcaagcaattgtcctacctcagcctccccagtaactgggactacaggcatgcattaccatgcccagctaatttttggatttttagtagagatggngtttcaccatgttagtgaagctgatctggaactcctaacgcctgtaatcccagcactttgggaggccgaggcggntggatcaccttgaggtcggagtttgagaccagnctgatcaacatg

SEQ ID NO: 217150 - DNA, 581 bp, Homo sapiens
tcactgcttgcacactcctgccttgcatatgccttgccatcgtgtgggcctcttggctggaagtgttcttgtcctcccgttaggtatcttttatgacgtgaatccttacctctaattattatctgtgtgtacatctcatcacctgcatctgactgtgtgccttgtgtatgtctcttagccctcacaattgcctgacatgccttacaaacgggtagaccaagtgttaaatgaacaaatatttaataagaacttaaaagctttttgactttatatatttttaaagccattgtgattaaacactatgtttgatgtggtgctaattctgtgctttatcaactgtgtgaattgtagtatttttaaagtaggaataattgagaaatattttgaagttaggttaagcatagcagtaaagtttccactttttaaaatagccaaatccaggccaggcgcagtggctcgtgtctccaaagtgctgggattacaggcgtgagccactgcacccggctgaaattgtatactttaaagggatgaattttatggtatgtgaattatgtctcattaaaaaaaacaaactgttaaga

SEQ ID NO: 217151 - DNA, 592 bp, Homo sapiens
tatatcaggtgcccccatcccatccaaatataactcttcctggaacacaaaggtcagggaaggagctgcaaagcgagtagcccttagctttgttctacatttctcctttctgggtagaggagagtagtagtagagagagaaaattggggaagagtaaatggattacccttcggtagttgttcttggacagggaggactccttggggatgcttgatcccatctcatctgggaccagctcaccagagtctcagtcacacttagaagcagttcaggttaaataaagattcctgctgggaaaatgtgaaagaaaatgagttttgttcactttgacagagaatacaagttaaacaagttgttgtaaactgacacaatgtttattgttgcttacaatgttgtgtagttgttgtgtacaatgcaatatagttgtcatagttgtctttatttccaatgtggaaggacataggcagttatacagtgttcttggttctgatgacaacactcaagattatcgaatgtcatgggttgtgttttgcaaatattataagaaggtttattttatttttaataaatggcattgtggcttaaaaaagct

SEQ ID NO: 217152 - DNA, 337 bp, Homo sapiens
ttacttgtgaggattcagtgagatgattgatgatgtttcttagctcagtttccagaagagtgggcactcaaaaaattgtctcttgaagtatttacatgaacagctattctataaagactcaaaatttactattgaatgtaaatctgggatgcagaattggttttttaggtgatttatttttcatttatgaaggcgtgcaccatagaattcctgcagagaatggggatagaaacctccctgttaatgcatttaaaaatatttgatttgcaaaaaattcagtatactttaaaataattttattaataataatttgtattgtaacaactatattgtataa

SEQ ID NO: 217153 - DNA, 2057 bp, Homo sapiens
tagaaacagacccacactggccaccgcaccagattcaaggcatttgttactgttagggactatgatggccacatcagtttaagtgttaagtgctccaaggaggttactactgccatccaagggaccatcaccctggccaagctttccattgtccctatgcggagaggttactgggggaacaagatcggcaagtcctacaccaccccctgtatggttacaggctgctgtagctctgggctagtacaccttatccctgcccccaggaacaatggcatcatctcgactcctgtgcccaagatgctgctgctgatggccggtattgacaactgctacacctcagccaggggctgcactgccgccctggacaacttcaccaaggccaccttcaatgccatctccaggacctatagctgcctgacccccagcctctggaaagagactattcaccaagcctccctgtggaatgcactgaccatcacatcaagacccacaccagagcctccatgcagaggacccaggctccagctgtggttacagcataagctttcatacaagaataatagtgaattacacctgttaaaaataataagcagaagaaaatgaaattgaacaaaccagccaccgtagtcccttctaaagcgacgtggtctgcgggcatcagtgcccttcctctctggctatagctcttcggcatctgaagaaagttatcctaactattgggtgatccagatttgggcactgtctgctatgatgatgccagctggtcgggaaggaatataaagtataggctcaacccttccacagtcactgtactgggaattcaggcttttcctctctgttgatgtcaagaattaacctgtagataacattcttttttttttcttttttttttttttcaatttttccttgttcttgtcaaaggctgtgtcgcttaaaaccaaatcttgatagattcttcatctttatcactctctatgagaagtaaatatgatttaagtgaaccacagtgagaggcctgtcctcactacagcaaataagatgtgtcccaggtgacaagtccagtctccttttaacatggtgcccagaattccacatacctgagctttgggggctgatacaaagccactgcctctgatcccacggaatgacctgaatttactatcagttttgccacaatcagtgcagtttgaggatacgtagacccctgagatgaggcctgagatagatgttctgggaaaccccaaggaagctaaagtacctgccatggtttctttcatggcaggttgagtaagccaagctcctgagaatgattggtcacattgtctttgctgttaaggtttcttggtttacagatggtgaagttgcagacaagttagcaaaccaactgaattttaataaaggaagctttaggaaaatggatgaagatgcagttggaaaattaaagtcatgcttccttgatacatacctcaattctggcaacttctcacttggaattttccaaagtcagtttttggtaatcttgccatttgtattatctttatttatatagttctggttatgcttggtgtgtgccagctgttttgggagtgatgtttttccttatttctcttggctcctgttaagtgttaagttgctgaaactgacctttaatgcttccaaagcaatcagcatctttctctctggatggcttttagaagtggacacagtttactgatttagccagtgaagagaaagctttccatagtgtggtttactcagagcaggtgacaaaaggatgaatttctggctgggcccagtggctcacgcctataatcccagcactttaggaggccaaggtgggcaatcatttgaggtcaggagtttgagaccagcctggccaacatggcaaaaccctatctctactaaaaatacaaaaattaaccaggtgtggtgacaggcacatgtagctactcaggaggctgagacaagaatcacttgaacccgggaggcaaaggttgcggtaagctgcgagcatgccactgtactccagcctgagctacagagcaagactctgcctc

SEQ ID NO: 217154 - DNA, 247 bp, Homo sapiens
ttcgattggcgggaacttagtgtggtaagacttctggtcctctactcgtcgaatgttttggtggaactcttttttttgtgtgttgtttaaagacagagactattatgttgaaacctgtatcctgagtgcctagaacagcatgtgtcagtcagtgcccaattaataccttttttttttttttgggaggcagagtctctctctgtggcccaggctggagtacagtggctccatgtcgcctcactgcaac

SEQ ID NO: 217155 - DNA, 597 bp, Homo sapiens
agaaaaatgacttaatgtctaaggagaaggctaatttggaagggagtcatactggtacaaggaggcaaccatttcaggcttctgacatgggcagatttgcaaaggtggtgctactcaccaggaaagagaaaagagccacatgggagctgcaagtttggcaggcagaatatgtaggattggtttattgtttctgctttccagtatagaaagatgcataccctcaagagaatctgcttgttgtggtttctgatttacatagatgatgagattggccccatgtctgaaaaacagtatgtggggaaggcctggagaagcaattgaactgaaacaaagtcaaaagtgggaagtccccctctggcaagcagctctaagatgacagagccggtgccagaatctaaaccttgggactctggttgctgtataaaaaaataaatattaggaacaaaaataaatacccacatctccatgctggacagcagaagagcaataagttgccaaattttttttttgttttgttttgatagttttttactctctaaatgtaagctcctatatttcctgtcttccatatgttagaagctcagtacaaacaggaga

SEQ ID NO: 217156 - DNA, 374 bp, Homo sapiens
tgctattacatctaacatatgcatggctggggacgtgtcattttaaaggtctattgcccatagtacgtccttttaagcaggtgattcagatatgttatcacagcctcttcacagctaaaacaagaaactatttttctaagatcatcatattccatttgaaaaataacatgtggaatgatctacgagggtatgatcatgtatcatctaaaataaattgtttgcatgtagaacatagaggatattcaatcattttctcactttccaattaacacattatttcatttaaagcaccacaatttggccaggacattctctactaacatggatctgtttattttttaaaatatcaactggctataaaagctatgggttat

SEQ ID NO: 217157 - DNA, 321 bp, Homo sapiens
tcattcactattggttccctcgttttacttaagacaaaatggttaatgccttttgtttttgttttgacacttgttgaagttagagaggattaattgctgcattatcgcccaagctattaagggagatgaatgacaaattttagtggatcaactatgattacaaaagttaatttactttgtcttcctcagaagtctttctgcaatgtattccatggtgaggctgctcagcctctcgcatccattcttcaacaaggtcataatggggaagaatgaagtgcaaatccattgttgcatgctctttccccatgaccttaagtgcta

SEQ ID NO: 217158 - DNA, 261 bp, Homo sapiens
ctttggctgaatgaataaataaatgaaataacgtgaataaatcattccgtcaaaattgagctgaaagagaaagttaagcaataatagcaaggtctgtcattgactgagcaactacaatgtgtcaagtgttttacacaaaaatgaaagcatcaggaggctgaggcaggagaatcatttgaacccaggaggcagaggttgcagtgagctgagatcataccactgcactccagcctgggtgacaagagcgagactgtctcagaa

SEQ ID NO: 217159 - DNA, 382 bp, Homo sapiens
ggttagggtaatacacagggtagagaagtgactaggaagataagggttagtttacaaggtttgtttgcacagatttctctctgcttcaacgtcacatacttgatgataagaatgttactctacttttagtatgtggagaacatctttcacatgggaacctcatctcctgcttttaaaaaacggaatgaagttcagagaaggtttctacaccttctggtttctctgtttttatttaggtgcatttaactcaaggcacctaaataaattctgtgatatatgtatcacagaaatatatatatttgtttccctcatatatatgaaatgtgtgtgtgtgttctgaattgtattgctttcatattttggattttgtgactgtttttat

SEQ ID NO: 217160 - DNA, 349 bp, Homo sapiens
cgcggtggctcacgcttgtaatcccagcactttgggaggccgaggcaggcggagcacgaggtcaggagatcgagaccacggtgaaacgctgtctctactaaaaatacaaaaaattagccaggcgtggtggcgcgtgcctgtagtcccagctactccggagaggctgaggcaggagaatggcgtgaacccgggaggcggagcttgcagtgagccgagatcgtgccacggcactccagcctgggcgacagagtgagactctgtctccaaaaaaagcaattactttctagctagcagaaaatgttgtaagacaacacaactttttaactattttcttcacttatttctagat

SEQ ID NO: 217161 - DNA, 395 bp, Homo sapiens
ttccttccaattatgtgttttctggcgcttcttttccttttcgttgttgatctcggagtatgcagatcttgtcattttccagtcatggcctctgtattcttatactagtgtctagtgaaagaaatgaaaatatggtaccacttcttaggaagtagtcacttctcaggcctggtccattggccctgtctttaagctcctgagctgggtcaggtgacctgaaaccagagaggtccgaatcatcaaatacctgtttatcattctcagctttctcaggagattgctcaatttattttttttattttggagacagggtctcatctcgctctgtcacccaggctggagtgcagtggcgtgaacatggctcattgcaacctcaacctcccaggctccagcag

SEQ ID NO: 217162 - DNA, 380 bp, Homo sapiens
gcatttacagcctttctctactcctggagtcactgcagggcccccaggggactctgaaaacagccagttgttaagcaagggtattctccactagggctaccatgaagtttatattatagagctggatctttcaccccttttgtgctgtaaaccatttgtgcacagcctttgaactatttctcataataatactttttaaatatatataaaatatatgtcattacaaataaaatcaactatgatgaaatatggcacatgtatacatatgtaactaacctgcacaaagtgcacatgtaccctaaaacttaaagtataataaaaaaatatatatatatatttataaatattgatatactgttagaaaaacattttttaaaata

SEQ ID NO: 217163 - DNA, 497 bp, Homo sapiens
aaagtgctaggattacaggcgtgagctactgcacccggccatcattttatttcttagctctttgcctgtcccatttgtgaaatggaggtgggcacccaccctgttgtcatatacttgaaaaatgcaagttttagcaatgttaaggttctactttaaacttactaaacttaagaagttaaaagttggagagacctaggtagccttgcagatgacgctaaacattggttatacaagttgatgtgatggtaacgtagggaaaaccaactgcacagtgcttcctttaaacacatacttatttcataaagttctgttttctcgagagcttattttgtttatctcaccttatagtccatatccagctgtaattgtcttactgtatctgttttctaacagatttattcttgtcttaaatatgatacttaaattttcccacaacctgttccttttttctcagggtctctgtgtataagacataaatattaaaccaaatttcaaat

SEQ ID NO: 217164 - DNA, 517 bp, Homo sapiens
aactgaggctgaaaatagagctacacacacaggctcattgatcatgcctgcttagttctatacagcaaaatgtcccttaagatatattgaagattgggatctaaaaactgacaaattcaattctcagaatgtaagcaggttgggtcacaagaactgaatgtcttcaagctgactgtcagatctttccaagggcaaaaatgaaagatgatataagctattacaggccatgaacctgttttcacccacctgatgcttttactaattagcttcttggctgggtggcaatttggggcaagtgcatgcaagctggattcacaggggagcccgcattccactctgccatttcgcaagccactgggatactacactgcttctcttggcttctttccctcccaggagccctgctctgccctggtggaaaaatgagagcgggagaatttttcattaaatgagggagggatttcatgggactctggtgttttgctaattttattttttagtgggttgtctaaaaaca

SEQ ID NO: 217165 - DNA, 327 bp, Homo sapiens
aggggacatttctcgcaccccaggcttacagggatgtgggagtggaaccaacgcctgtatcaacaagaacatccattccacttccaactcccagtctgttgggttatagaaacgtggctcttacgtggcttgccactgagtaacaaccatgataaatttacaaaccctagacaatgagggcaaacatggagctgactttccttgccattttttcattcagagaatgtttttctccagatctgtgcatccatctccagtaatgggtacaagtttagagatttcttctaagtacaaaatagacaacattaaaaagaaatttatatcatc

SEQ ID NO: 217166 - DNA, 507 bp, Homo sapiens
aattttagatgattgcagtatctatagatgagcctaacaatacttcagcctctcagtttcttgacctctcttccagtaagttttcctccatgctccttccagtctttgtttctttacttgctgtatttcttgtttgtctttggcatattaaacttctgagataaatttatacttctattggtcacaacagagtcatttttttagttttaaaaaatattattaaaaaataaaggccgggcgcggtggcccacgcctgtaatcccagcactttgggaagctgaggtgggtggatcacctgaggtcaggagttcaagaccagcctagccaacatggtgaaaccctgtctctactaaaaatacaaaaattagctggatgtggtggcatgcgcctgtaatcccagctgcttgggaggctgaggtgggagaattgcttgaacctgggaggtggaagttgcagtgagctgacatagcactattacactccagcctgggcaacagagtgagaccc

SEQ ID NO: 217167 - DNA, 472 bp, Homo sapiens
agctgccatcaaaaaacacacttgctgttagtctcttagtctcacagttagtgtgacatttggactcaacatgaactgtttttattaaatttgagatggtacatacacaaagtctcagggttgtgatacactttaaatcctttgggggctcccttcaattggcttaagcattaacaccttctgaattcaagtttgaaacatagcagtttttgaattggcggtgaagtgttctcataacactatacttttttaatattatggtttagttccaaaaaaattcacaaggaggaaatgttagatatctctcaagttgtttactgctgtgaagaaaggctcatatgggggcttagtaattttctgattctttgctcctgcagccacagttacagatatataaaatgtatattgagtttttgccatgaaaataatacatgctcactatgtgaaatagtaaaaatatagaaaatttata

SEQ ID NO: 217168 - DNA, 401 bp, Homo sapiens
tgctctctacttcattcttttaataactatacagtttgctaatgttacgctggagtatcccagtgcttaaaaatataatacacttggctgggtgcagtggctcacgcccgtaatcccagcactttggtaggccaaggctggtctcgaattcctgacctgaagtgatccacccaccttggcctcccaaagtgctggaattacaggcgttagctgccacaccaggccccaaaaatgtaaaaattagctgggcattatggcatgcacctgtagtcccaggtacccaggcacttgggggcacaggtggaggattgcttgagccagggaggtcaaggctgcagggggctatgagtgtgcgactgcattccagcctgggcaacaaagtgagaccctgtctcaaggca

SEQ ID NO: 217169 - DNA, 484 bp, Homo sapiens
tgcggtggctcacgcctgtaatcccagcactttgggaggctgaggtgggtggatcacctgaggtcaggagttcgagaccagcctggccaacatggtgaaaccagtctccactaaaaatacaaaaattagccaggcctggtgttgggcacctgtaatcctagctactcaggaggctgaagcagggagaattgcctgaacctgggaggcagaggttgcagtgagctgagatcaggccactgcactccagcctgggtgacagagcgagattgcctcaaaaaaaaaaaaaaaaaaagttgggtatatatcatttaggttggtaatgattttttcctcagaattttgaaggcattactttattttttaatttttaaattgtttttattttttttgagactgagtctcactctgtcacccagtttgactagatccgcctttcccagttgctgagtactcaacagcacggacaggtcgattttctaacata

SEQ ID NO: 217170 - DNA, 296 bp, Homo sapiens
aatacacttaaaccttatctataacatatgtataggtataaacaacagcaataaaacaccttattgccaccatgagcctaacagcagagccaccagggccttggaatgctgtccctcaccatggcctcttcctaattcggtttctctccctcccacctgtgccccagcaccactctcctgatttgtttgctgattattcctttagaattgcaggtcacgtacttgattccttcatgtgttgtctggggtgcatttttaaactttcttataaatagaaccataaagatgcattttct

SEQ ID NO: 217171 - DNA, 211 bp, Homo sapiens
aatcagtaccatttattccttaaatatttggtagaactcaccagtgaaataatctgagcctggcgctttctgttttggaaggttattattaattcaatttctttaacaaatataggcctattcagattatttatttctccttctgtgagttttggtagattgtttttttcaagaaattggtccatctaattatctaagttatcaaattggt

SEQ ID NO: 217172 - DNA, 207 bp, Homo sapiens
actgtactcaggtggtgtacccattaaaattcccacttgtgggttccgctcgctatgcaaatggggtcattacccggagaatttaattggttatgacactgggagtaggacttttcctttcaaaataaacctacttacacacatttttgctagaaatttgattgttatatgtagtttgcattgttttgctctataaatatttacaac

SEQ ID NO: 217173 - DNA, 414 bp, Homo sapiens
caggtgcattacctttttcccatattcatgccaaatgtagcattactctcttcctaatttttgccaacataatgggtataaagtgtataaagtgttatagtttaatgttagtctgagattttttattacttgtattttaggcatcttatatgcttggtggtgttttaggtttcattgtctgtgaattgcttatttgtttcctttacccattttttcaacttagcttacgaggttttaaagtacatttgcaagaattccttgaatatttttgacattaacactatggtttttttttaaacataatatatttatcacactcaggaaatttgacattggtgttatgttgttacatgcatttcatattcacgtttcttataacaataagaataacaaaataataaaaatagtgtcctt

SEQ ID NO: 217174 - DNA, 338 bp, Homo sapiens
tttttgctttttaacttgtatttttgttttgtaggtcctatgtgatctatgctttaaaaatgttctgttttgatgtgtttttgggatttgtttcaagatttagagctccttttaccagttcttggtaaaagagctgagactttccagagcattttgcatttctaaaagtgtgtccaaagtttcctgaatttttgttttttctttaaactatctattttcttgaatatttctaccttaacttcttgtatcatattttggatttcattgcattggggttcgccttcctctggtccctccctgattagcttattgactaacgtcctgaattctttttgagg

SEQ ID NO: 217175 - DNA, 432 bp, Homo sapiens
tttgacttgttcttaatggaactcttaggagttatttatatattctgtatactagctctttgtcagttatttgtattacatagttattctcatgctgctataaataactgcctgagactgggtaatttataaaggaaagaggtttaattgactcacagttcagcacggcttgggaagcctcaggaaacttacagtcagggcagaaggtgaaggagaagcaaggcaccttcttcacaaggcagcaggacggagaagtgctgagcaaagtggggaagagccccttataaaaccatcagatcttgagagaactcacttactatcacgagaacagcatggggaaaaccaccccccatgattcagttacctccacctggtctgacaagtggggatgatggggataatgaggattacaattaaagatgagatttaggt

SEQ ID NO: 217176 - DNA, 166 bp, Homo sapiens
ttaaataataaatataaggaattatttttcctttgatgcatatgaatatattttgatttttatgaaaaaaatttattcttaaaattatatttaaatggaaatattttgttaataccccgtatataatagaatcattgtgtgaagaaataaattatatatctatgta

SEQ ID NO: 217177 - DNA, 582 bp, Homo sapiens
tcttgtggatcaatgttctaattatcagagcccaatatgtgtatagccgaagagctagataatgtgatttctgcctcagccatatctctccttggggttgccaagaactgtctgtcataaggaggacaggtcaacagctttcaagtctgtgtacattgtgagaaagtgtttccccactaccttaccattctggcaatttatagatgttgggaaaattaaaaattaatctgtactagaaaaaggtggagaggtccatcctatatgtaaatactatttacacacctgcctttttgcaattcctttgggcaagaatgatcatagtctccctatagcctttagtgttccactgatccgctgtttttccaggttgtttgaaattggacgtaaaaatagttgtctgggtactatgttaggtctatgttgaaggaattaaaaaaaattccctgaggtttcttatggctaaaattattccatatgttcaaagatgaaatagatcaaaatggcttagtgagttccctgtcactagatgctctgaagaggaagaaataattgacagaggtgttgtaaagaaaattcaagaac

SEQ ID NO: 217178 - DNA, 584 bp, Homo sapiens
gagccatgatcctaccatggcactccagcctgagtgacagagtaagaccctgtatcaaaaaaaaaaaaaaaaaattctaaaaacacaatcaggagaaagtctcccttctactcttgctcagtatttccttgtgtgtctgcatcttattaacagacatttagcctgtttctagtctcctgctactatagacaaggctggagtcaacatcccacacaccacacgcagcaggtatctggatggacccggcttcctgaagacagatgaggcttattgtggtccctgagtagttggccaccacctgtctctggggatccaggaaaaccaagagctcctgaagtcaccaagcttcatgccagagaacactgtgcagggctggggaccagtgacatggaatcaacagccagcctggctcacagctgggccagcacacctctaaagatacatttctagaagtgggatattctggattaaaagatgtgtgcattctaaatttgggttcatttcaccaaattgcccttcaaaagaggttctacccatgcagatgcccaccaataatgactgagaggacatgtttcacaccctct

SEQ ID NO: 217179 - DNA, 1039 bp, Homo sapiens
  misc_feature (629)..(630): n is a, c, g, or t
  misc_feature (637)..(637): n is a, c, g, or t
  misc_feature (674)..(674): n is a, c, g, or t
  misc_feature (686)..(686): n is a, c, g, or t
  misc_feature (695)..(695): n is a, c, g, or t
gttgaaagcgggcttcccgccccgcccagaccgccgaggctgccgccggagtcgccaccgccgcgccctcgcccacccgcccgctcccgctcgctcccgcggccctcgctcgcctcgcgccggcagttttgggcctacacctcccctccccccgccagccgccaaagacttgaccacgtaacgagcccaactcccccgaacgccgcccgccgctcgccatggatgccggtgtgactgaaagtggactaaatgtgactctcaccattcggcttcttatgcacggaaaggaagtaggaagcatcattgggaagaaaggggagtcggttaagaggatccgcgaggagagtggcgcgcggatcaacatctcggaggggaattgtccggagagaatcatcactctgaccggcccaccaatgccatctttaaggctttcgctatgatcatcgacaagctggaggaagatatcaacagctccatgaccaacagtaccgcggcagcaggcccccggtcaccctgaggctggtggtgccggcacccagtgcggctccctgattgggaaaggcgggtgtaagatcaaagagatccgcgagagtacgggggcgcaggtccaggtggcgggggatatgctnnccaactncaccgagcgggccatcaccatcgctggcgtgccgcantctgtcaccgantgtgtcaancagatttgcctggtcatgctggagacgctctcccagtctccgcaagggagagtcatgaccattccgtaccagcccatgccggcagctccccagtcatctgcgcgggcggcaagatcggtgcagcgacgctgcgggctacccccatgccacccatgacctggagggaccacctctagatgcctactcgatttcaggacaacacaccatttctccgtcgatctggcaagctgaaccagtgggagacaacagcttcacttgcatgatgccggggaccgattcccggaattatcagtctccagggaagcctgggagtggtgtttctaacccctgatcctcccatatgg

SEQ ID NO: 217180 - DNA, 1014 bp, Homo sapiens
  misc_feature (604)..(605): n is a, c, g, or t
  misc_feature (612)..(612): n is a, c, g, or t
  misc_feature (649)..(649): n is a, c, g, or t
  misc_feature (661)..(661): n is a, c, g, or t
  misc_feature (670)..(670): n is a, c, g, or t
gctcgccccctccgccgccgccgcccgcccctgcgactacgctgcggcctcccgcccgctcccgctcgctcccgcggccctcgctcgcctcgcgccggcagttttgggcctacacctcccctccccccgccagccgccaaagacttgaccacgtaacgagcccaactcccccgaacgccgcccgccgctcgccatggatgccggtgtgactgaaagtggactaaatgtgactctcaccattcggcttcttatgcacggaaaggaagtaggaagcatcattgggaagaaaggggagtcggttaagaggatccgcgaggagagtggcgcgcggatcaacatctcggaggggaattgtccggagagaatcatcactctgaccggcccaccaatgccatctttaaggctttcgctatgatcatcgacaagctggaggaagatatcaacagctccatgaccaacagtaccgcggcagcaggcccccggtcaccctgaggctggtggtgccggcacccagtgcggctccctgattgggaaaggcgggtgtaagatcaaagagatccgcgagagtacgggggcgcaggtccaggtggcgggggatatgctnnccaactncaccgagcgggccatcaccatcgctggcgtgccgcantctgtcaccgantgtgtcaancagatttgcctggtcatgctggagacgctctcccagtctccgcaagggagagtcatgaccattccgtaccagcccatgccggcagctccccagtcatctgcgcgggcggcaagatcggtgcagcgacgctgcgggctacccccatgccacccatgacctggagggaccacctctagatgcctactcgatttcaggacaacacaccatttctccgtcgatctggcaagctgaaccagtgggagacaacagcttcacttgcatgatgccggggaccgattcccggaattatcagtctccagggaagcctgggagtggtgtttctaacccctgatcctcccatatgg

SEQ ID NO: 217181 - DNA, 222 bp, Homo sapiens
gcttagggatggtggaattgcctcctggggggcaactgggatttcaagggtgtttttggtggtcacaggggttgaaggcaccataagcatttagtgggcaggggccaggtttttaaactgtcataaacgtgtcctagaaactgcctttttctttttcttttcttttctttttttgagatacagtctcgctctgtcgtccaggccggagtgcagtggcgtgat

SEQ ID NO: 217182 - DNA, 645 bp, Homo sapiens
cacccgaagagccagtgcataggcagccagagagagagacaaatgcctgtgcatcgctcaggcaggaggtctgcaggaacctcctccaagtattctgtgtgatgtttgggagtcaggaactgaaatggacttatgtacacaaggttaaacagtgtttccaggcttgggaaagacaaggcaggagggtggtggatggctagacaagtgaaggagagcaaatgtcagaaaccaaggagggatctcatctgaccttcagggaaggtcaggggaagacccacagccaggggaccatagggacattggtgtgataaacaacaattatgcaagctgtggtccatcagcagagggcgggatgcagcaaaagccaaaatataaacaagcctgatactgagatttggagagtctcacctaacaagctgaaaggaggagtgaccctagaaggtcatgttgagagtaaacatggtaaaacctggattgcgaagcaagtgtcacaaacatccttgttctccctggcctggcttcagtgagcctctccagtggtttgcctctcactttctggctgcttgcattctctcttccagtggctgctcaaggttccattactttgatatgagtatgaggaatagtgatgccatttctcagatt

SEQ ID NO: 217183 - DNA, 443 bp, Homo sapiens
gtaaaggagaaaaatgaaataaagctcttctatgaattgcaggaaagctgaatttttaaagttcttgaaaacagagcagttttttcctaatgctaatgaacaaagcaaatcataaagacgtgttgtcgactcacattctttagtgtgggagttatccagtgtaccattcctgatcaccctctttcaggttcaactatgttatctgacagatactatgagagcatctagcttttctgcaggagacctgcttcaaattcttgttctgccactaacttctgtgtgccttcagtgagtacgaacatttctgaactttgatgccttttgtgtgcaaaatggagttactattttccatatagagcagtcatgaagataacagttaaaacatgtaaaagcacttggcacaaaaataggtattcaataaatgggaagacttctttatagta

SEQ ID NO: 217184 - DNA, 583 bp, Homo sapiens
aaaattccgatgctcagaaagcattttgcgtgacagaccattatacatttcacatgatttggtcctggtgacagaggggttgaggaagtttcccaaatgctcttctgttctcgggcctcttcctgattgtcctggatggctgactgcagatgggtttggtggagtctggcgcataagtcactaacagcccgtagcaagcaggaggctatttcagctgatctcagcaaggcttgtcataactagctcctctctcagtcataccttcaaggtggcacagggattcaagaattggccttgaccggggtgcagtagttcatgcctggaatcccagcactttgggaagccgaggcaggcgaatcacttgagtccaggagtttgagaccagcctgggcaacatggcaaaactccatctctacaaaaactacacaaattagctatgcgtagtggtacacgcctgtagtcccagctactccggaggccgaggtgggaggagtgccagagcctgggaggtgaaggctgcagtgagctgagatcatgccactgcattccagcctgggtgacacagtgagactttgtctcacag

SEQ ID NO: 217185 - DNA, 415 bp, Homo sapiens
agggggcaggtacctgtaccacagtttagccacaacagaaatatcgttgggctaccaaaagatgtcagtccttaaaaatgttggcaagcaaagaaatttttctctaagcacatcttagagatactttagtctaaaggcacagttgatcagattaaagaagctaagattacattttggggctggtctaatcgataaatatctatcagtggccataaagttttatttcagtgttttctggtgtaaagggattaattttatgtactcaagtctatggagtttgttttcttccacctttaatcacctcactcggcttgctggtgtgcagtgctcatgcaaaacttcctaagggagtgccccacttgttttaatttacttcctctagcaaaaacacagctagaggaaacacaaatcgttt

SEQ ID NO: 217186 - DNA, 474 bp, Homo sapiens
tgaagaggagcattcacatgaagtgaactgcaaaggggattttagagattaaaaaatttctcagagataagcaatttgatttttcaagaagggctcaaaattacaccaactgcttactttcagtataactaggatggtattctccagtagattctggtctgtagagaaaaaaagtcttcctggaaaaaaaatttaggcttttgatcaatttgtttttattcagaaaagctgaagtggaattaattttaaatgtggagaactggtcattgcttctactgctgacaatactacaataggaaaaaatggaacatttccttctgaacggaattgtagtgaattgagaactaaagagcttatggaaaatagccttcaaatgattatttttgtttgcttaaatgcttgattatgatgattgtaatttcagctatacatagagtatagggaaaaaaaagctaagcctgggctccagttatt

SEQ ID NO: 217187 - DNA, 409 bp, Homo sapiens
agaagactggagggaccaaaagaggtgatgcatacacaaggttctaaagcccaagtctggactccatatgcacattcaaatttgaggaacactgagcagtaacatgcaaatcacctgagaatcttgcttaatcagcttctcattcagcaggtctgggggagaggctgagagtcagcatttcttgcaagttcccaggtgatgccagtctgcggcccacatgttcatctagaccccaaactagtagcaatgtgtgtggacaaggctgggtaacaggcatgaacaatcctccagtcatgagtaatttccttgagagcagttgttttctgtggaagacccagcgctcagcctccatgaacatggtcgagcctccctggaaaacactgccctcctatgctagcacctgtgaaaa

SEQ ID NO: 217188 - DNA, 513 bp, Homo sapiens
aggtgcacttctggggctgataggaaagtgaatttgcttctcctgatcgtgcacctgcagggagccgggttcgagagctgacgtctggctgagcattgtcacagttgagccactgctgggcctcgaagaagggcctcagccttgtggggtgcctggaaggtgctcactggggtgcaggtgcttcctgggcagtccccgagttgatgggccaaggtggggccctctccagcacctgccaggacagcctcagatgctggacacttcaggtctccccagggagaaaggggctctctggtccaggctgtggccagccacatgtgtcagggccgtggaagagaagtcggccatccttccaggccacagacacagaatcaactccaccagctctgttcctacccggacagtagctagaatagggttaacaaagctctggaaaaatctatcaaaatagctccacagactgtttcttcttttctgctcatgttctcggcctagacaccaggccttcccgtg

SEQ ID NO: 217189 - DNA, 494 bp, Homo sapiens
gaccccaagtgatgcccccagagcctccaagtagaccccaaggaacaaggcccgggggtgctgggcccagttaattacggagtggcatcctgaccctcactccttctgagtcgcaaaggtgagcgaaacggcctcagcacccactccctttcccaagggctctggactccctttcctgtgatgctggcacacaggatcccctccagacacatagcaggggcctccccagcctcattcctcaatagaccttgtggtcctggcaggcactgccctaccagcttccatccacgggctgtgtgaccttgagcaaatcgcttcacttctctgagtctccactgacccaaatgggggtcgatcagagaacaggaggaaggatcttgtattcaatagaagatgtacactcagggtcacagtgatgaacaattgaccactatgctgccctatgaggggtcatccaggccaccatgggcaggggtgctctgggccacccacgc

SEQ ID NO: 217190 - DNA, 402 bp, Homo sapiens
caagtcttttctttctcaattttttgagcttatattaggtttatgtccaaaaagtcattgaaaaacttccttgctcgactgatattttctcccctttgctaagaggatgcatttgtgccagaagcaggtgcttttatatatcaggtagattttttatccttgttcagtaagagtgcatgatgaacgccatcagcacttggccaagggagagggacatgaacggtgagagctgaggaatgggacctggctgctcgcacgcctgtgctgggacaggcaggggctccgggcgcggccatgcctgtgagcagttctgctgaactctgcttgctctcagttggctctgagaccaaaaattgcctaaaataggtcacctgtttgtatcctaaattgtaaaaaaaaaaa

SEQ ID NO: 217191 - DNA, 438 bp, Homo sapiens
tttcgagcggccgcccgggcaggtacgcgggaggaatttttattttgttttatttttgcttttgctttatgctgaaatatcccatgaaaccaaggaaaatcatattaaaaaaacaagaattttcaataaaattgagcgtctcaggtctttgtgtattacttatttatatttgtttacaaattatatttgtatgcatattttaggcttttgtaaaaacctatctgaaaataaatctaccatgttttagggttgatttcctatagattcattatcctatgaaatgaattatctctctgaataatgccatgagttatagatttttcgctccaaatttttcctatttctctacttgttattcaaagggatatcagccaaattggcaaatttgaagtcttctctttcagacatgccaaattttagactgaagtgaactattat

SEQ ID NO: 217192 - DNA, 345 bp, Homo sapiens
gtaaatgaggctgacatctgatacacatgttcacgtgggcacatgcacacacacatgcacgacatggggagtgtacacttactgacctacacgagcatcaggagtatcattaactctaaatgaatattaggttgaaccacatgaaattgctgacatttgcccactttaggtgatttcatatgattcacctacctcatgcatctgcactggccactcaggagcacactggaaagctccctgtaggagaagcatcccagttgcaaatctctgcctgctcttcacagtggctgtctgtgtggcttttgatttgagtcccttatctgtaacctcaatgagtccttcagt

SEQ ID NO: 217193 - DNA, 664 bp, Homo sapiens
ccaaagaaaaaaatttcagtttgtgggagtagtgcaaaggttgctctgactgctaaaagtgaattgcacaatgagaagaagattaaaagcgccaacaagagctttttgtttccctttgatttatgtgtacttacctgctatttccttcctctctgtaaggtatttataagtattatatgtagttttactcctttatcccatgtttaagagtatacctaaacatatatgccattatgattgttgcatcctcttgggacagaacttataatgtcaatcccaacatcttgtatacaacttttaaaaaatccagtgtattttatgttctgatgttgtgctgcatccagatacaaagccctttaccatgtgaatgtgatgctttcaatttaagaccattaattcattcttcagttcaggtaccacaaagcagaataattcatgctttaaaaagaaccttgactggctctctgaatgcagctcaccagggcctgcttctctgggctttctagagactagaaagtcttttcagaggccaaaaagtccctgggcatacatctctgagttccctttcacaagcaagtttcaagttccagtcaaagagctctaggtaaccacatatgcctcaaacctaggaccatagaatcctgaacaaaggcccaggagagct

SEQ ID NO: 217194 - DNA, 225 bp, Homo sapiens
ttacatttttttgagtgttgtagaaaaaaaaatatgcgacagtactatgtggtcccataaaacctaaaatatttactatctggccctttaaagaaaaaaatttaccaactgatgccttaagtctcaaagtatacaatccttgtttcaagttgaaggtcttccttagttctgcatcatcctttagtcattctccaggcccttctgtcgtcttctctgaggggtaca

SEQ ID NO: 217195 - DNA, 175 bp, Homo sapiens
tgttagccaggatggtcttgatcaaaacttaaattagaaaattctaagtacaaattcagtatggggaaatgtatgatttaatttggggtcaaataaaattaaaatcactaactcaaagagccaaggggaattagaattgaggatacagcaatggaactatatggcaggatccgtc

SEQ ID NO: 217196 - DNA, 503 bp, Homo sapiens
cctaagttccctgttattttttgtctttttgataacagacattctagctagggaaatataatattttgctgtggttctgatttacagttccctgatgattagtcctgttgagcattttttcatatacttcttggccctgtgtatgtctttttttgagaaatgtcctttcagatcatttgcccattttcttaaatgggatttttttctttctgttgaatcatttgaattccttatatattttagatcccttgttggaggaatagtttacaaatatttttccccattcttcaggttatctcttcactctgttgattgcttccttaggtatgcagaaacttttgacttgatatgaacccattagttgaaatagacttttgttgcctgtgctttggaagtcttattcataaaatattttcccagaccaatgtcctgaagcatttcccctatgttttcctctagtaattttatagtttcagggatcacatttaaatctttagtccatt

SEQ ID NO: 217197 - DNA, 484 bp, Homo sapiens
ggtgctgaataaatgactcttgacttgtagcggttgacttgcatgactgtcgtgtggcctgaaacctcagtttcctcatctgtaataggataaaaatgactgctagcctgggagccctcctgagtagtttgctatctgggacgattttcatgcatccttcttgggagagatttttccctccacaaatctcaagctgccttcagtcctgttgccacattgcttaactgagaaagtacagggaacagagaagtagatatctcagacctgattggctccatttggtgactagatacagacagtgtccttcccaccaccacggccaatgactctcctgtcaagagggcgctctgtggagaagcagaaatgctgtgtccgtgagggctgtctggatggcatgaggtttcaaataccatattgcagtcaggagttttgggtactgaatcatgtatttactcatatatatatatgagtatattaaaaaaga

SEQ ID NO: 217198 - DNA, 426 bp, Homo sapiens
ggagaaaacataaaggaatcaaataagcacacaaatgtatctaattttcacttatgtcctgtggagtaatgcagaagtgtaagggagacatgagaaagcatggaggacctgatctaatttgggggttagtggtcggtgaatatttttcaagaagaagaagtgatatttgatctgaaatctacaggatatgatgaaaagaatgggaaggccaataaagggttggtggaagaaggtagaggacaggataaacattccaaacagaagagaaggcatgtgccaaggaagccctgatgtggacatgagtatggctttttggaggaaaactgaatccacaatgaaatatcactccacacccacaataaaaggctaaaattataaagactgattttaccaagtgtaggtgaggctatgatgcaattggaactg

SEQ ID NO: 217199 - DNA, 515 bp, Homo sapiens
gtactggtgcttttgtgcagtctaagtcattatacttttatgactttggttaacattgggctataaaaaccagtaaataactgttaaaagcagagtcatttgctcaaaactattttatgagcttcatttttggaatggttgaactttccgctagatttttccccttcatacacacagaatctttgtgttttttacaactcagcttgtgaacaatattccaccttctgactgaggtaaggctgtgggcctcgtgggctggagattgttcttctgggcctggatgatgcaaccggatatgctattttctccactgttttcttgggagaaaccgtgtttgtattctaggctcagcgtgctttcagttggtggttacacctaaatataaatattgcagccatttcagaggcacccccagccaagcggcacctgccatgattttcattcttggggtcctggctgctcatggcgaatttgaccccctaaacacacgtgctcctggagcactgccggttctc

SEQ ID NO: 217200 - DNA, 341 bp, Homo sapiens
ccaccgcactccagcctgggtgacagagcaagaccctgtctcaaaaaagaaaagaaattgagaacagaaaaagaataaagaaaatcagtgaaactaaaagcaagttctttggaacgataaagattaataaacctgtagctagcgaccaagggaaaaaagagagaaggaaaaaaaaaaaaacccacagtttaaaagtttaaagacttttggggcagggccatgcattccagcagtttccaggatgcgcagccaagctgaggctgactcacctgcccagggcatggtgtaaaacaaaaccaaagaggccggaagctccagcctggaaaagcagccctggcctt

SEQ ID NO: 217201 - DNA, 522 bp, Homo sapiens
aacagtccaaagaagcaatgataatgtaggatgttcccattttggcaacattggcaaagataggcaaggccagcaaagcaagagacaatgtccagccccaacactcatggtggcagcagggtgcttagtggacagtgccatggcatgattttggctctggtctggctatccagtctcatgctgttcctgcccacttttaaagtcttcccaacaggtgtgtcggccacacaatgtatatccagaatccaaccatttctcttcacctcttctgcagacatcatctcatgtttagatcttattgcaatagcctcctgactggtctcttgattcttaacttccccacccttggtccattcttaagaaagcagccagagatccaataaaatatgagtcagatcaaataatttctctgctcaacaccctttggaggcttcccatctcattctgagtcaaagccaaactcagtacagccaaacctttcaaagcccacagaatctgaatgccattgcatctcaaaccttg

SEQ ID NO: 217202 - DNA, 319 bp, Homo sapiens
ctctgctccatcttcaatggccctttgtcaccagctcttggtgttttttttggtcccgtccctactacccatgtccctgtacttctccctctctccaccatcatgtctctcatcaagaccaccaaaatcacagaccttcgtctcttagcgaccttcatttctactcctcagaacttactgaaccttgttcttcccacttcagagactgcacaatcaggtattttcttctccaactttaactaaacttgcttctcatcatcatgctgattttgaaaatctgatctctttcctgttctccaattctgtcagcctcacccaa

SEQ ID NO: 217203 - DNA, 480 bp, Homo sapiens
agatgggtttgacactgacttcccatctcctcagttacagcatgtgattaaagccttcttccttggcaatacttgttgtctcagtgactggctttctatgaaacaaatggaaggacctagactgaacccctggtgtttcagtaaccatgtaatattttctattatattgtttctctgaaaataattgtatagttatatgctgagccaatcctgagtgtgtacaaagatttggacttggagtcacttctagcatccatctgcctgaccaacagttactgagtccccagttggcacaaggttgtattacttatactcaaggaaatgaggctcagaccaattttaaaggagcaaattcaggactcaactaataatacaagagtctctagactttactttatatgaggatgtttaaacaatccaaaacagtcagtaagttccacctgaattgcagtacttgggttgagtgtctcacttttaaaa

SEQ ID NO: 217204 - DNA, 429 bp, Homo sapiens
ctcacttgagcacaatccaagatgaaagtttctgggttgtgtccccttcgcttcctctcaccctcgctcccccgcggagccaaggagccagcaattgtgcaagaggagaccggcgcacagggcgcgtatcacggagcgcatgagccagcaagccgaacgcctccagcgcggccgggacggaggagcggctctggggaagacgccgaggctgcgcccgagtctgaacgaagctgcctccagccacatgaagtcagtagggctgttctgaggggccccgagatttgatgactgttttttaggttgcggaacctactccgagagagcaaacactttggacgaagtgattcatattgatagatacatttgttgggaggtggcttttttcattctcaacagaaaacaaagaaataaattaagtcttcccctgac

SEQ ID NO: 217205 - DNA, 396 bp, Homo sapiens
tttttagcaaaaaacatgaacaattcttaaggccaagggttagataaagagcttgtagacatgacatcaaaagtacaactataaaagaaaaataaataataaattggatctcattaaaattgaaaatttttactttgtaaaagaacctgctaagatgatgaaaagacaagctatagactaccacaaaatatttgcaaaccacatatctgatgaacgactaatatctagaatgtatgaagaattttcaagattcaacaataaataaaaaataagcggctgggcacggtggctcatgcttgtaatcccagcactttgagaggccatggcgggtggatcgcctgaggtcaggagttaaggccagcctggccaacatggcaaaaccccatttctactaaa

SEQ ID NO: 217206 - DNA, 656 bp, Homo sapiens
tgagtatggcagaagagttaagtgctgctgtgttatcgtttctgtatcagagcagtgactctcccaagttttccagccttttggcaggtaatattttgtggctaaaacagaatacgcagatcttaatatttctatatttaagtgtcataggatatgagcccctggcatgataagaggcagtgtgtgtggtggtttagcatgtaggagctcaagcccaactgcctgatgtttgaattctgattccactactttccaggccgtgtggtcttgggcaattgtcttaaccttctggtgcctcgatttccccatctataaaatggagatcaaaataggacctcagccatttgaatgacagaataattgaatgaaataatacatacagagggtccagcaaagaggcaataaatgttagttgtgacaacagagtgccagttgtgggccatgacaggtgaccacttgtgctaattttaaagtagaataactcaagaaaagcaccagacttttaggtccctatgtagctaaatcatctggcctggaactataatgacaatttcctgaatttgctaatgactttcaagccaattaaacacatctctatatgtctcaaagcatttaatgaaaaagtccatctaattctgttgcattctgtatttcat

SEQ ID NO: 217207 - DNA, 695 bp, Homo sapiens
agatttgtcatcagattttaaaatcaaagcagtaagattttcctaaaaataaatgaaaaagaaaaagaattctatttacctcaatattgctattttcacaatttcctagaacaagttgtacggagtaatacaaatgctaagaaggtgggtccaaatgaaatacagaattcataataagaggatgttgttactcagaagaaggacaacccagtgtgctttgagatggtattgcagcaatgaaaacaagctcaatgttcatgtcagataaacaattgtcatcacagctctggaagtttgggaagtgactcatcttcaggaatgggcagtgagtgaagacaactgtttacctcagccctttggtggttgacacaaacattcttttcttcccctgtgacttggccaccgggagatgctgttgcagccacgtgcatcgtcaccccagcttccaccacatagacgctcacctctcctgccccgtgatgccttacactctctgccctcaggctcttactgtccttaggggtggaaaatctctaaaatcagtggatttcctggtaaatgggggagaaaataattcaggaagcctctccttgcaaggagggaccattgttaggaacttttggtctgagatgctatggctgagtccaggggggcaacaaagaacagaccagttccaaactcgatcagctagcaaa

SEQ ID NO: 217208 - DNA, 451 bp, Homo sapiens
tctatatcttatatttaagttgtattacttataaacagttaaatccagtctcataatctctgtcttttaaatggcctgttgattctgtttgcttttgtttttgaaatggagttttgcactgttgcccaggctggagtgcaatggtacgatctcggctcactgcaacctccgcctcctgggttcaagtgattctcctgcctcagcttcctgagtagctgggattacaggcatgcgccaccatgccctaattttgtatttttagtagagacagggtttcaccatgttgggtcaggctggtcttgaactcttgacctcagatgattcgcctcccttgggcctcccaaagtgctgggattacaggcatgagccaccgtgcctggcctctatttgcttttaatatacctttaatatgatgtatagactggttcttgaacatgagtagaatttcgca

SEQ ID NO: 217209 - DNA, 470 bp, Homo sapiens
aaatcatcccttgacctctcgatctttggtttctatctgcaaaatgggtataatctgtgacagtgacctaatactttttttgggatccattttgaagagcatttggagaggacttaaaacagtttgtatatccccgagcatagataaatccccatgttaaaacacagtgcatctaaagcaacaccactgagctgtcaatttttatcactagttctataaaacttactgagagacactgaagttcttgtagaaatgaaaaatgagcaactgatgttaattccactggttaagtaggaaaagccagggcctgagagtaagacaactggccaagaaccccaggactggctgccagggctgctggctccctcccattctctagtctctgtgcttgaagctgtaacttaatggttttaagtaggaaatagatttattgatatgtggttttcttctgcggaaaatcaaaataaacc

SEQ ID NO: 217210 - DNA, 435 bp, Homo sapiens
gctcactgcagcctccggggaggcaggacatttctgaggtccacagtgcagggcttggtactcagtaggtgcccaataaatacctgttgcacgaatgaatgaatgaatgaatgaatgaatgaatgtttttggttgagaggcgggactttggtcttcccgagcctccatttctccgccaacataaaataaaaaacataatggcactttcctcagagacatcgatgtaccttagtccgacacctggtatacagtaggtgccaaataagtgctgctgtgcttatggttgttgctaaactagtaattgcattgaacaccccagaggcattttccagtttccctcccttccctctgtgtgtatttgcgcagcgtaagcccagctttgggctgggtgacaaggacagtggtgacctggaaaggcccaggctcagacccctc

SEQ ID NO: 217211 - DNA, 247 bp, Homo sapiens
aattaactattcctttaatggtctgcgttcatttccagtatttcaaatttatacatactgctttgaaacgtttatgtaattttttacatgaattttttaaggagatatcaaatggccttctgccagttttcgttatttgctctaagatttctgctttaggttgtttagaacaatcatggatgcagcgtcaagaatgggtgggggaggggggtggagaccaggtgggaggcccctggagtcgtcctgc

SEQ ID NO: 217212 - DNA, 475 bp, Homo sapiens
cagccattgttctccaccctctctcttcacagggaatgagccttgagttatgctgtgagaagcagccagcgttagcaagagaaatctgaatttccttccaagaacaatgctttgaagcagagccaaacagatagatgaggtggagtgcaggggtggacacatgaaatgagatttacagcctagaggacttgggacaagacaaagctgagaagctcgggggagactagaaatgcaagaaataataaaggtggagggagagaagttttggaggaacccacagagaagaatgcaatctgaggatgtagtagagagagatggggccataaaccacggaatgctgacagctcccagaaactggaacagacgaaagataaattctcccttagagcttttttgggggagcatagccctggtggcacagcgatactgacttctgacctccaacacttgagataataaatttctgttgttttaa

SEQ ID NO: 217213 - DNA, 250 bp, Homo sapiens
aatataaaatttctctttaatttattataagcaatgtattctatttcctgagtaaatatgtttataagatcaataatgtactggtacttctttatgagattaaagaaatactctgataaaaattttagtgatggaaacctgtaaacagcaactgacgtttgttttcttattagtataatttaacttactaagaagaaaaattaaatttgtaataaaatattgtgattaaagagcttgacagaaataagaa

SEQ ID NO: 217214 - DNA, 248 bp, Homo sapiens
gcaatcaattgtcacaaataaaaggcatcaagatggtttccttttccctagaaaaaagattgagttgcatctaacaagtgtggacaaagaaggggaggaagagactgaacatgtacgaatagaacctgccgactgcatttcttgtcattccccattttccaccccagagtggcatcttcctgaagacatttcaaagcacaaattttatgtataaggagaataaatgaatacaatgtattccccaccct

SEQ ID NO: 217215 - DNA, 479 bp, Homo sapiens
tagtgcatccttaaattgcagtgactcatagcaacaattgtttactgagccctcctgactggccatgggatgacagtagttaacaacaggtcagacatggtctctgttgtcatggagcttatgccaaagtggcgaatgacagtcactaagcatgtctattacaagtataattaatttaacaaggaagacaaattagtccttcatgtgttccagaaggcaaggcccctagtgtggttggtctggtggagctgaactgcaaaactgtgtggagatgcttatgtgctagacaccaattgttttatccctccagtatatccccttttttcctcttaagtccgtgatttctgaaggagttgctgtgtcttacatcagtgcttttcaaactacttaaaaatttaaatttctaatctgtcacaaattgacatcctgacaaaatacaaaatcacctgcttgagtgtcacaggcatgtcaaattgtta

SEQ ID NO: 217216 - DNA, 578 bp, Homo sapiens
aattcaaagcactttgtaattattatgtaattagtctgcataatagcctaattgataaggacatgagggcagcctcattgttacagatagagacatacaaatgtctatgtcgtagtgttgtaggaaaacccgggttcttgtcacacgaccaagataatttaggcatgcggatacattgtagggtgagaagggcagcatttattgtgtgaaaagaaataaaagggaaacagggactctcagcaaaggtgagagtcctgctagcaggctttgcgcttcacagattgaatccccttttaccacccaggaacaggagagggcaggctcctccttcctgcaatgggtgctaactccccaaggctccaccacatcctcccaatgcacaggcaggttggagattctccagggagccctttttacttcactgtctcaatagcttacataacattatgttattattagacatttgtcttatttacttttatgacttttaatacactcaataataatgactaacatctattgagttgttatttcttgcagccactgtgctaagcccttaacattcaggatctttcttt

SEQ ID NO: 217217 - DNA, 740 bp, Homo sapiens
cccttctcactcataggctcagggaactttccaacaaggtccaatacaggactaggagttctcaaagtaaaaccccaaagtattcaacatcaagcttcctgcaatatcctacctttgtcagtgaaaagcatagctgttagttttcattattattaccaaagaccatactgccatttaagtgtcaagtcactgaacatagggggcacctgtgtcttcacagcacaaaagaacagggcaggagctggcaccaccctatggagccaggcccatgagcctttgccaagcgggaaagcgctttctgctcatccatattttggttcacttccaggtggaccacaggtctgtttccagtaaccaactgcttacttacaagaaaaaaaccttgctctagagctgaaaggcaaaaccatgaccattaacccaggatcatgaagaagaattttaatgaaagtagaatggcattatgaggaggctgagactcattttaccagaggacatcccaacactactctctcaaccttaaaatggaatgaactgcacccaagaccagcttaagactcttagagacattaagtactgaaaaggttataggcccctctggatctataatgaaaatatttaaatactaaattataaagtaagtgcaaagatgttaaacaagtttctaatctttcccatgactacttgggtgttttttcagaccaataacaaatattaaagtgtctcaattttttcctgga

SEQ ID NO: 217218 - DNA, 487 bp, Homo sapiens
atccaaacttgtactgatgatggttgatgaatctccagatgtttagttggtcaaaatgaattatctccttcttgccccggtagcttgaggaccatatgaaggccttcacttgcccccatctgtaactgggcgtagatgagggtactcagtgaagagtgtaagggataattagaagtttttgtggtatgctaaactaccttttgaaattgtacttgctgtgattctttgactagaattttgtgtctcaaggttaagtccatttttcaaggcttcactagtattaaaatggtccttatagatggaatctcttactctgttaatggttagggtgggctggttattgtctcctaagttgtatgttggccaggtgaggtgggtcaggcctgctatcctagtactttgggaggtagaggcagaagtggaaggatcgtttgagcccgggagtttgaaaccagcctaggcaacatttaagagaccccatctctta

SEQ ID NO: 217219 - DNA, 1181 bp, Homo sapiens
cagggggctggcgccaggccctgcccctcccttgccagccgtgtgtggcaacatcagagtgacagccagtaccatctccgacaggggctgagttgctggagctgggctggggcaggggagaaagacagcagactcatccttgcacccctccatgggcctggccaagcccccaagaggatggcagcctgggcgtcggagccacctcctgggcagccaatgaggtgaggggccggaggagcaagggacaagaggagcagaggacaggtgatggaaatcctgcagctttaggctccattctgccatctacatcccagcgcagggtgaagcctgagagcccaaatggccaactccacagggctgaacgcctcagaagtcgcaggctcgttggggttgatcctggcagctgtcgtggaggtgggggcactgctgggcaacggcgcgctgctggtcgtggtgctgcgcacgccgggactgcgcgacgcgctctacctggcgcacctgtgcgtcgtggacctgctggcggccgcctccatcatgccgctgggcctgctggccgcaccgccgcccgggctgggccgcgtgcgcctgggccccgcgccatgccgcgccgctcgcttcctctccgccgctctgctgccggcctgcacgctcggggtggccgcacttggcctggcacgctaccgcctcatcgtgcacccgctgcggccaggctcgcggccgccgctgtgctcgtgctcaccgccgtgtgggccgcggcgggactgctgggcgcgctctccctgctcggcccgccgcccgcaccgccccctgctcctgctcgctgctcggtcctggctgggggcctcgggcccttccggccgctctgggccctgctggccttcgcgctgcccgccctcctgctgctcggcgcctacggcggcatcttcgtggtggcgcgtcgcgctgccctgaggcccccacggccggcgcgcgggtcccgactccgctcggactctctggatagccgcctttccatcttgccgccgctccggcctcgcctgcccgggggcaaggcggccctggccccagcgctggccgtgggccaatttgcagcctgctggctgccttatggctgcgcgtgcctggcgcccgcagcgcgggccgcggaagccgaagcggctgtcacctgggtcgcctactcg

SEQ ID NO: 217220 - DNA, 207 bp, Homo sapiens
tcttcaaaagattctaattatacccctgaaactctgagaggtttagggtgtctgctgagacagagaagagagaaaacccttaagcaactcctctcaactgtctttgggggttgatgtcttggtcaataactgtctattgaactcctacttctccaaaactataaatgatgtataaaaataaagtccaaatggcacacacccagcaaa

SEQ ID NO: 217221 - DNA, 508 bp, Homo sapiens
caatggtaatctgggtgtacaataactgtaatagacaccccaaaacttgcaggggagaagcaagcattcaatcaccagtccttcacattctgaaacagttgggcatgtgttcccagtttcttgattagggccccatccctaaaaatgattgtccttagctcttaatttcttatctattggtttatatttcattccattagacagaatctacacccacaattatcttgaagataagccttcttcttttcgacccttgtaaagaaatggtgcaactatgcttttaagaagttagaagcgttgttgtctagccaagagagtcaatggggcatgcacttagattcttagagaattttttgctgaacttagaaggcatttgaaaaaatgctttatatctttctgaggtcttaacaaaggcctttctgccacaccctggattcccagaggccatgttttactggcaatattccggatttctttgatctttgtcctgagaccatctattactttg

SEQ ID NO: 217222 - DNA, 497 bp, Homo sapiens
ccagcttccactaagaaaatgctccccaaacgctgccttcagcctaccctaagagtgataatgaaatatgacagaaatttccttctgctggatcagtggcaagagaggtcctacaccgcctatattaattcatctgacttatgttccaggtcttgatttaccttatgattaaaaacttctgcaggtttgctcaccaattgaaatcagatctcatctgcagcccagcggtattgatccctatttaacatcaaggctcagaattgattggcattgattaacaataaaaatgttccctgcatgtccagccaccaagccaatattctgaaggcagtgcactctggtgttcccctcattgaccaatctgaaaggagaaatgaccccacccgcaaataaacaatatattttaatgttattgtaactggatgccggaccggccttgcaaattgattttattcttgttgtataagataaatatctttaataaaattctcatttta

SEQ ID NO: 217223 - DNA, 557 bp, Homo sapiens
cagctctgtcagggccagactaacccacagacccctcttgtcacctgcatctgctgagccctgggagaaggggtcccaccctcttgtcacccgcatctgctgagccccgggagaaggggtcccaagcaccagttccacaaggaccacacctccagccagtctgttaaaatgaaatatagcaggtcactggcttataaagaaagatgctgccagcctggctaacatggtgaaaccccgtctctaccaaaaaatacgaaaatttgccgggtggggtggcgggcgtctgtagtcccagctacttgggaggctaaggcaggataattgcttgaacctgggaggtggaggccgcagtgagccgagattgcgccactgccctccagcccgggcgacaagagtgagactctgtctcaaaaaaacaaaagaaagatgctgtgaagtttaaaccctgcaaacagatcagagttttgaactcatggtctcaatctgtaatgtggggaggggaaatctcaccaccaaaagaccctggccacaagaccccctggccacgagagcggccg

SEQ ID NO: 217224 - DNA, 334 bp, Homo sapiens
tgagatggagtctcactctatcgcccatgctggagtacagcaacctccacctcttgggttcaagcgattcttgtgtctcagcttccccagcaggataattgcttgaacctgggaggtggaggccgcagtgagccgagattgcgccactgccctccagcccgggcgacaagagtgagactctgtctcaaaaaaacaaaagaaagatgctgtgaagtttaaaccctgcaaacagatcagagttttgaactcatggtctcaatctgtaatgtggggaggggaaatctcaccaccaaaagaccctggccacaagaccccctggccacgagagcggccg

SEQ ID NO: 217225 - DNA, 464 bp, Homo sapiens
tctccactaatcagatgttcaggtttatgttattatcattgaatctggttttctttccccttctgagtagggtggccatatattgtattatctaaacttggatactttggagagtaaaaggggcaatattagtaattagaccaggactgtctcaggcatgtggccttcctgcctctgggtgattggttcagcaattgttaccctcttccttggttttagtcattttatttttattttttattttttttttaagacagaggctcgctctgtcacccaggctggagtgcagtggtgcaatctcagctcactgcaacttctgccctcccgggttcaagcaattctcgtgcctcagccacagagtagctgagattacaggaatgcatcaccaggcccagctaatttttgtatttttagtagagatggggtttcaccacgttggccaggttggtcttgaacttctggcc

SEQ ID NO: 217226 - DNA, 515 bp, Homo sapiens
cacaccgatgtgtctggctagtcaatatttggaaaggggtcatagggcaaaatgtcttctctgtgtaatatttaaagttaagaattctgaccttggccgtctaaggcctttgcttgtgcacgcaagggcaaatgtgtccttaagcttgcagaaacatttcttaaatatttcacttaaacctaatttaagtggacctctggagaaaagactgcactcaactctgttccatcatcaacataacaaaaattagttacacaaaacacactgaaaattcaaggcagcccaaagcaaaagccagtgttggtcacagttttcattagataagtcacattgctatttaaaaaaaaaaaaaaaagtttaactaatgaaaatttatgttttaaaatgctgatttcatgagattagccagcctgtaccctatacaaattaaatccaactatctcaaagtggcacctgcaatagtagcaaactttttttttaccaggaaagtctatcgtcaggatggcatctaccta

SEQ ID NO: 217227 - DNA, 627 bp, Homo sapiens
aaaggtccagaataccacagcatggcccggaagccgtggctgggccaaagggtctggctgaggtagcagaaagtggacccagggagctgtaaaggtcgtggccgatggtgggggactttgaatccaaagctgaggagcttggactctggccactctccctggggggattcctccacatgggggattccgagtagaagtcaggcaggagggtgcaggatgatggggtgggggggtaggctggaattgggaggtcagggaggaggaggacgctggaggacacactgctgggaacggcatgtcagggaggggagcgacagctacccagtgcagaggcctgctcacattgcttcttgacttccaaaactctgctcacttttgttttaaagctccttttctctatatttatgcaccaaaatataacaatataattacacatatttctatatgcttagctatttttcttcctgggaagaaacatgataaaatttgggggttctgaaggctttatcccagggtcctttcatcccatcctctgttttcacgcagaattatgtataatccattcccaataaaaaagaatctggaccagatttgaagaggtcctgcgcacaaggagatctgtcacct

SEQ ID NO: 217228 - DNA, 293 bp, Homo sapiens
ttttttggtatttgtcatgttttcttagtgtatggtaaaggattttaccactatgtggtcattaaaaagaatgtcatcatcctataagcatcaacactgagttactgccaagtgaaggaaattgtagaacaacatgcataaaacggtcctatttgtataaaagaatacatgccctcccacaggtatctatgtgcaagaaacaggagcaaagcaagatacagaactctacatcctatatgaaaaaatttacatgatccaaccccgtatttgtaagtatctgcatgcgtcgacgc

SEQ ID NO: 217229 - DNA, 540 bp, Homo sapiens
ctcagtatataacacatactgtccccaagcctggatctgcaatacataacaatactagccttttttattaaagtgattttaaaagataaggcaggatgggaccatttattttacagaggtttcactctattccagtaacttctcaagcaataaaatatatctatgtctcattactacaaacgccagactatcaagtttcaattattcagccaaatctgtaacatttccattttatttgaattaaatgttaattatcttttcgatgtcagtaatctaactagcatgaagatttttcttaagaataaggtgaaacataaagcaaagatcttataaacacaatttgtctgcacagcatattcagtatccttttccctgaggcatagaaaaattatttcaatagcaattagtatcatataaggaaacaaagagccccagaaacacagtgtagtttctaaaatctgaaaggcacttcaagtgcagttaatactgatgcatgtctgtccactccaaaacatatcaagctcttattttctgcgccag

SEQ ID NO: 217230 - DNA, 683 bp, Homo sapiens
cacattatttatcacattatttattaagtttcttcagtcacagtccatctcacagaaagaaatcccccatgagaaacttttaggacatagcttttatgttaattacttaatttctgcactagccatccttgcctgccttctaattttctgcactagctatccttaccttccttctaattttctaacctgccaaggattctgctgcctcaaggtatttgtttctttctgcctggattgctctttcgcagatacttacatgtctcattctttttcacccaggtgaaataaacagcgttgttgctcacacaaagcctgtttggtagtctcttcacatggacgcgtgtgacatttggtgctgaagacccgggacaggaggactccttcaggagacgggtcccctgtccttgccctcactccgtgaggagatccacctacgacctcgggtcctcagaccaaccagcccaaggaacatctcatgaatttcaaatcggattcccaactatatgaagacaccctagctggacgatcagttcttattaagaacctgacccctcaaactctacaacctcgatggactggaccctacttagtcatctatagtaccccaactgccgtccgcctgcaggatcctccccactgggttcaccgttccagaataaagctgtgcccatcggaaaaaaagc

SEQ ID NO: 217231 - DNA, 499 bp, Homo sapiens
tgctgcttattgagtgatgaagagcaacatattagctactgagatattttgcagaaaaaggaagagatgtcttcagctcaaatgctatcaaacttgtgaaataaacagcgttgttgctcacacaaagcctgtttggtagtctcttcacatggacgcgtgtgacatttggtgctgaagacccgggacaggaggactccttcaggagacgggtcccctgtccttgccctcactccgtgaggagatccacctacgacctcgggtcctcagaccaaccagcccaaggaacatctcatgaatttcaaatcggattcccaactatatgaagacaccctagctggacgatcagttcttattaagaacctgacccctcaaactctacaacctcgatggactggaccctacttagtcatctatagtaccccaactgccgtccgcctgcaggatcctccccactgggttcaccgttccagaataaagctgtgcccatcggaaaaaaagc

SEQ ID NO: 217232 - DNA, 693 bp, Homo sapiens
tgctgcttattgagtgatgaagagcaacatattagctactgagatattttgcagaaaaaggaagagatgtcttcagctcaaatgctatcaaacttgtgaaataaacagcgttgttgctcacacaaagcctgtttggtagtctcttcacatggacgcgtgtgacatttggtgctgaagacccgggacaggaggactccttcaggagacgggtcccctgtccttgccctcactccgtgaggagatccacctacgacctcgggtcctcagaccaaccagcccaaggaacatctcatgaatttcaaatcgggaccccactggaaatcggactgtccaacccggcagccactcccagggcccctagaactctggccaaaggctctctgactgactccttcccagatcttctcagcttagcagctgaagactgatgctgcctgatcgccttggaagccccctggaccattacggatgctgagctttggataactcttacagtagaggattcccaactatatgaagacaccctagctggacgatcagttcttattaagaacctgacccctcaaactctacaacctcgatggactggaccctacttagtcatctatagtaccccaactgccgtccgcctgcaggatcctccccactgggttcaccgttccagaataaagctgtgcccatcggaaaaaaagc

SEQ ID NO: 217233 - DNA, 785 bp, Homo sapiens
cacattatttatcacattatttattaagtttcttcagtcacagtccatctcacagaaagaaatcccccatgagaaacttttaggacatagcttttatgttaattacttaatttctgcactagccatccttgcctgccttctaattttctgcactagctatccttaccttccttctaattttctaacctgccaaggattctgctgcctcaaggtatttgtttctttctgcctggattgctctttcgcagatacttacatgtctcattctttttcacccaggtgaaataaacagcgttgttgctcacacaaagcctgtttggtagtctcttcacatggacgcgtgtgacatttggtgctgaagacccgggacaggaggactccttcaggagacgggtcccctgtccttgccctcactccgtgaggagatccacctacgacctcgggtcctcagaccaaccagcccaaggaacatctcatgaatttcaaatcggatcttctcagcttagcagctgaagactgatgctgcctgatcgccttggaagccccctggaccattacggatgctgagctttggataactcttacagtagaggattcccaactatatgaagacaccctagctggacgatcagttcttattaagaacctgacccctcaaactctacaacctcgatggactggaccctacttagtcatctatagtaccccaactgccgtccgcctgcaggatcctccccactgggttcaccgttccagaataaagctgtgcccatcggaaaaaaagc

SEQ ID NO: 217234 - DNA, 547 bp, Homo sapiens
agaaagatacttgtgatctcattctcacaagccacaaacttcatgggacgatgagtatctgtttatcaggggaaatataaacaataagtgtgagttttagcagtgcatgtattaatattatgttgaaaattgtattgttaaggagtaaaagagaaaatagtgtaactaattttaaagaaaccttcaagaatttgaggatgcttttataaatgcaagttcctgaatatggccaaaacacaacacctcagtgaatttaaaagagtagatgttttaaaagaccggattttaaaagaatgactgaacatagccaagtaaatattcaaagaattataaaaagaatatcaaagtagactagaaaataacaaatggaacaatttgtaaaaatgaaagccataaataatgaaatgtagaacaagacacagtgcaaatgatatataaagccaaaagttcatttttaaatggcaaaaagaaagagcagaagagagagagagataaacttctggtaaggcatttaaaggaaatagaagagaaagagaaaaaagaaaaa

SEQ ID NO: 217235 - DNA, 681 bp, Homo sapiens
attttctaaaattagcaagtctttgggagccattccaggacataggtgagcttaatcttcttcaggggtcaacactgttcagagatgaccactgagcctggtggttgaattgattcccatcagagcatttagggactggaaaggagggactcaacatttcttgggggtttattatggataaggtagcctgccagtgtcttcacatggattattttatttagtcctcacagaatgctacaagataggtataattatactttccatttatactcagagaaattaaggcatggagagcatcccccaacctcccccactacccattagcctcatactacacctgagcctccccacctgtggtccaataaagatgctgccattggtcagaagggagggatgggtggctgcctgctggaattcctggcacttcagctatcacccaacattaaagccaactggacaacccagggtcatagagggcactgtgtagacccaggtagcttgtgaggtcatgaaaaagcatatgtggttaagagagtactggaattggagccagaagaactagattcaagtccctcctgcacttcacactagtcgtggatcctgagtaatttgttttgtcactctgagcttcattttttaaatctgtaaaatggggatggcaagtcatacctcacaggattg

SEQ ID NO: 217236 - DNA, 533 bp, Homo sapiens
cgcccccagcgacaggaaagagggtcggacggaggcgccggcctttccccgggtgacatgggctgagcgccggagcccggcggcggagcggccctgggcgagggtttcaggactggagacaatagtcaaaggggccgaatcgaggagctgccctcgctgacagtttcgccaaagtctgcctgactatatggcctgggttatatcactagagtgaccagagggaaaggaagaagacatcaggcccctgctgaccccacctcctcagaacggaacccgcagtcaagccagagatatcccataaaagagcaacttacgacgtctggagtagcagcgggcgtgagagggcagaaccaaattacagcttccagctgccatttaatgataatgtcccttactcggacataactttgccttttacaaagcccttttccatgttatgatctcgtgggaaccttccaataaccatgtgcaccctaccttgtgtgggttttatcccattttatagacgggaaaataaaattgaaacacagaat

SEQ ID NO: 217237 - DNA, 619 bp, Homo sapiens
ggactcttggggctagctgcctcatgcccctgcagaggtcccagcagcagccatgctcgaagcgtgagctccagttctgtggggcttctcctctgatctgggtcttgaaacgccacggcttctcttttgttccttaaatctcaggggtggggtaattacatcctgtcacggaaccaattctatgaattaaattttctttgcttgaaaaaagtggggaaaagtcttgaacaggcatttttctaaagaatatatacaaatggcaaatgaaaagatgctcaagatcactgatatttagggaaatgcaaatccaaaccacaatgagataccacttcccacccattaggatggccattatcaaaaaagcagaaaacaacaagcattgtcaaggatgtggagaaattggaaccctttacattgctgttggtaattttaaatggtgcagcgggccgggcacagtggctcacgcctgtaatcccagcactttgggaggctgaggcgggcagatcacctaaggtcaggagtttaagaccagcctggccaacatggtgaaaccccatctctactaaaacaaaaattagccggacacggtggtggcacatgcctgtaatcccagcttctt

SEQ ID NO: 217238 - DNA, 359 bp, Homo sapiens
catccttgtccatgtagacacactaagactaggaggtccctgagaaccaaacagacaaaggccttgaacatcattagcacgagatgatccaaaccaaagaaaccttgagacaaagcaaaatttggggtgggaatttatctatctgcaggattcttagtgcaataattttttaagagataaagtagagcagtttggtttctaaacttgtttttgttctcctgctgtaataacaacctcagtttctgccaaaaacttatgtggcttctcttctgagtaaacacctgctggtctgttttctgcagagcagaccacggggcaccttcactaattttattgtctccttcagaggaaatttgcgt

SEQ ID NO: 217239 - DNA, 684 bp, Homo sapiens
tgcatgttctgcacatgtatcccagaacttgaagtctaataaaataataaaatgtgtatatatatacatatatatgtattcaagactggaagaaatgtagaggaaagagatatgtgaggcaagactggatgcagagggcggcagcagtaacagagtgtatgtgtattgaatacttacagcatgccaggcaaaagacagagtggctagacatattatctgatttcatctctactacaatcccataaggtaggtacaattttccccattacacaaagaggatgttggagcttcaagagattaactaagagatatttataagttattatgacaagacttatgtgcatttgatatgggaaggggaaagaaaaagtgaggagtcaatattaacatccagtttcacagcttagttcagtgagcagatagtaatacctatcactaagatgggcaaaacaggaataccaaaaggttttgatggagaaagagatggagttgatgagttttgtttgagacaggtttagacctgttgagttggggaaaagaaaagagttagacatcaattgtcagctgggtgcgcaaggctgaatctcaagagagaaatctgaagtaagccaactcatgtagaaagcatctacagatagataatcacagccatatgagtccttgaagatatacagaaagagtgtg

SEQ ID NO: 217240 - DNA, 329 bp, Homo sapiens
tgtgcccagtgggaaccttggaaaatagctgactatagagctggaaagttgggatagttgagcaagtaaccttgtggatcctgtagctaagagctgcagggcccaccagaccttactggggacctatagctcttcctagaaacaaagtggaggcaaatcaccaaggaagagacactggcccccagcccaaccaaaaaaacagatgatttgttgccgcaggtttggtgagcaagcaccacagaagaccagctgcccagaatagaaaccagagaagatgcaggaataaagtaattttatatacaagctttgattaaaacttggaacaaaga

SEQ ID NO: 217241 - DNA, 286 bp, Homo sapiens
catcacatagaagttcaggctctgcttctgatctgctggcagtaataatttatactcagcaatgtttctagaaaaaataaataatagtgaaagcctttctgggagctttcaatgagactgttcatcccagccctgaacttgcagctggccagtcctaggtccctgctgcccatctcctagcaattccggaaaggactgagagggagtcaggcagaaaagactggccacagtggcccaccaaagaggacagtgtggccacagattaggatgtgcctgatagttttaa

SEQ ID NO: 217242 - DNA, 424 bp, Homo sapiens
tagctgagcatggtggcacatgcctgtaatcccagctactcgggaggctgaggcaagagaattgcttgaacccgggaggcagagtttgcagtgagctgagatcatgccactgaactccaacctgggcaacagagcaagactccatctcaaaaaaaaaaaaaaaaaaaggagtgggcagataagcaggctacatcaccagaggtcacagcacagggagagggacagagggaggaagcaacaccaagtaaattaggcgagggaacctgtgtgaagcacatagcagatctctggtgaaggctagtcaaaggttgcacactggcagcctacaatcatgctttgactcaaacaatcgtttagtttctttaatttagttgccaacatttaaggagtcagaagtcttcattgaaaaaaaaaatccatattg

SEQ ID NO: 217243 - DNA, 604 bp, Homo sapiens
tgtatagactctgtatcatgagctgtgatattatttttgtttttgtcttttaaattaagcctcagttgagcccttgtgatgtatattaaataaatacattttggtcattaaaaaaaaagtatatctcaagctacaatgaacttagaaccagacttttagaatatcacctacacctaagctgaagactgtttatattctagccattcctgtttcttcttacttcttcacatgtttaattcctggcatctttcagggctgtatttggatatccaggtgggtagcaccagtaatgctgcattataatcatctatggttggtatatgtcactacagtaaaaactccttgagactgcttgttcattattgtatgtatagtgccctgcaagataactggaattctccaaaactcaattgctttgtataatataacaaaatagctggttaatttattttcagttattcaggtgtgcattttgttgcaattcataccggtgggtttgccactatatgcatggatttgtcaatgtgaaaaattatgttacaaaaaatcaagatgaaccataaaattgtatttaaaggtgttctatgatacaagtgactgaaaa

SEQ ID NO: 217244 - DNA, 398 bp, Homo sapiens
actctctatctgggtctccccctgaatgcgacaaagctggactgtactgctgccatctcggctcactgcaacctccacctcccaggtaccagtgattctcctgcctcagccacccgagcaggtgggactaacaggcgcgccactaacacctcctctacctttcttcctgcccactgttctcctcctcctccttctttcttcttcttttaaatttaagctttctttattctgcaaaactacaaaactagtaagtcaaaggatatggattagaatttagatatcttagactggaaaacctatatattactttttaaaattttacttcagattctttttatgtctaacctactgcctcatgttctcactcactaaaggaaaccaggaaattcatacctaca

SEQ ID NO: 217245 - DNA, 456 bp, Homo sapiens
tggctccaatcactgcatcccgccaggcttcgctcctctgcggtttccggcctcgggtcccaggcctgtccccgaggctccccgcctgacctccgtttctgtttctccgtctccctgccatctccactggggtctcgcccactcccactcgggtctctgcaggaagccgtgccctcctcccaccctctttgatctcccgtttcaaagccgctctccaagggaggggaggtcgctccttccgcccgttttacagctcaggatggtgacacctgagaccctgctccgccttctcccccggcacccatcctcccgcctatctaggtggtggcgcagctcgccagggctccgcgcctctgtccccgcctccctcccttccccctactgagaccccctcggggtctcgggagtgaagcgacagagaaagcgttttaataaagaccttgcgtcaagtgattg

SEQ ID NO: 217246 - DNA, 499 bp, Homo sapiens
tcttttgagacttaataggccgggacttctgggaagccaatttctgtaagttcgtggtgtagagagttatatataattaatgtgctattattattattttttattgcaagggtgtagtattttaggaacctttgaattaaataagctggtgggcttacctgggaatctacagttttattataataatgaagacagtgcaatatgagctgcaaacttgtttttgtccattaacttatggagcacaatctgcttttttttttggtctttctttttgagacagggtctcactctgtctcccaggctggagtgaagtgctgtgaattcggctcactgcaacctctgcctcctgggctgcagtgatcctcctgcctcagctacttgagaggctgaggtgggaggatcacttgagcctaggaggttgaggctgcagtgagctgagatcacaccccttgtactccaggctgggctacagagtgaaaccctatctaaaaaaaaaaaa

SEQ ID NO: 217247 - DNA, 390 bp, Homo sapiens
gaatcttattcctgttttcatttcatgatgtcataatatttgttgaagttttatgtcaagcatcatttaatttgaatgattcttctttaaagaatacagaaaaatgtggtagtaatattcttcaagaaaattagctattgaacattttccctatattctattatttaaaaaaaaaacacattcttcatcattatcaaatttcatgtatttattcaaaatgctttgttaagtacaggaagagagaaagatgatgacaaagacctgcttcggtctaaatatggaagatgttttaaaagttcagcccaaaacatgtcttactcaaccttgtattatcatcatttagcaaacaggaggggcttattaaaggtttttgaagccagccatggtggc

SEQ ID NO: 217248 - DNA, 789 bp, Homo sapiens
actgactcaaagccctgtggcctccttgaatgacacaaatgtgaggcaagattttcctgaaaatagcctgctcccagaggaaaagtgaattgcaccatcaaagaacaaagacagactggaaagtatgtgatggacctcagatgtccagagactgatcttgaatatgatcctttcctcaattattctgcggaggtacttggggcatctaaagcaaagcaggatgaggctgatcaacagcacttctgccacttgaaaacacctgtgagtgaaggtcgccacacatccctggagagccaaaggccttctgtttcaccaataagaagtaaaacagatctttaagaatctgaagatgatcttataatagatgtacctccagtcatgcctacttctaagaaatctaaactatgtagaggcttcaaacatcattataaggataaatggacacatatcacgcccccggaggagaaaaatcttaaaattagtggcacagaagaagaaaaaaacagataaaacccaactaaccacacaaatagatgatgacagtaacaaattacaactacctacattgctcatgaaaacatccccaggtattaaaactaatgtaaatttatatcattttaaaacagtacctaagaaggaaaaatttggggatgaaaaaagccatgactgtattttagaaggaggttcatcttctgcacctctcaatggcaatgaaataatgaaagaaagttgtaataagaaagttacctaaagaacaaaaaacaggtaaaaacaaaattatgatacaca

SEQ ID NO: 217249 - DNA, 429 bp, Homo sapiens
gggcatggtggtgcacacctgtaatcccagctattcgggaggctgaggcacaagaatcgtttgaacctaggaggcggaggttgcagtgagcgaagatcgtgccactgcactccagcctgggtgacagagcaagactttgtctcaaaacaaaacaaaacaaacaaaacaaaacaaaacaaaaaacacgttaaatgaaagaaaccagacagccagctagtgttgccaggggctgtgtatagagtgtatgaacagtgactgcttaatggtgatgagtttcctttggggtgatgaaaatgtcttaaattagacaaagttgatggttgtacacattgtgaatgtagtaaataccactgaattatgtggttaaaatggttaattttatctcaatttttaaaaaagtccttgccagcagagaaaccctgggaggca

SEQ ID NO: 217250 - DNA, 300 bp, Homo sapiens
cttctgctcttttagatcaatttctaagtgccaagaagagctattactcctttctcctagcagagaattccctaagatagaaaatgacacatgtagtcattgtataaattcttttattttcctgtaagcatcttgaccctctactatttgcagctgtttctggggaggagtagtttggataaccaacaaaccttgccacttcttcagtgggactcaaggcagcagaagaagactactgtctaaggatctgttagcttttacccagggtcctatgtctcttcatatgctgtgctttaaaaa

SEQ ID NO: 217251 - DNA, 310 bp, Homo sapiens
tcagcttgcagcctcgctgcccatggtgaaaggtgattttttttcaatctctatcactctgtgtaggtggctgccttttccactcagcagaagtggttctcactagttgcccaatgtatttaaaagtgtggatttgtatactgatgctgtatttttgttgcattaattttttttaaatcaaagcaactcaggttcatggaaacaaatcaactagtacagagagcttatgttgaaaaggggcttggaccagcacctggcacatagaaagccctctatttgttgaatgaatgaataaatgaatgaatacaaa

SEQ ID NO: 217252 - DNA, 515 bp, Homo sapiens
tacggttctcagcccctggatgagggttcctcgatctgggcactgtgggcatctgaagctggataatggtttgttgtggaggcctgccgtgtgcatcatagcatgttgaacagcacacttggcatctatccattagttgccagtaatgcccctccatatagttgtgacaaccaaaaatgtctcctggtattgccagtgtcttctaggggcagaatcactcccaatagaaatccattcgcttggactaatttgtgtttcctgtcttcaattccccatacctccctataattaccctcctataataatactcactgctcttcaacagtcatttttttccctcttttccttctttccttccttcctctctcttttctttcttctttctttctttctttttctttctttctctttcttcctttctttctccttccttccttcctttctttctccttccttcctttctttctccttccttcctccctttctctctccttcctcccttctgtcgtcttctc

SEQ ID NO: 217253 - DNA, 310 bp, Homo sapiens
atacatacagggctcatttttccttgcttttcagttttcacttacactactttcattagccttcttgcagcccattcagacccaagctcacttaccctttgaggctcatctgaaatcctaacttctccatgaaaccttctctaattattctaaccttaagagtacttgtttgacacatctcctaaatgtcaaagactatttgaacccagatctacctgacttcaaagcttgtgtagctttgaaaactactcccgagtaggagtgattttaaagtttcagtccaattcaaatattcagcttcctcaaattt

SEQ ID NO: 217254 - DNA, 607 bp, Homo sapiens
cctttccagtcccggtaccggaccctgcagccgcagagatgttgatgcctaagaagaaccggattgccatttatgaactcctttttaaggagggagtcatggtggccaagaaggatgtccacatgcctaagcacccggagctggcagacaagaatgtgcccaaccttcatgtcatgaaggccatgcagtctctcaagtcccgaggctacgtgaaggaacagtttgcctggagacatttctactggtaccttaccaatgagggtatccagtatctccgtgattaccttcatctgcccccggagattgtgcctgccaccctacgccgtagccgtccagagactggcaggcctcggcctaaaggtctggagggtgagcgacctgcgagactcacaagaggggaagctgacagagatacctacagacggagtgctgtgccacctggtgccgacaagaaagccgaggctggggctgggtcagcaaccgaattccagtttagaggcggatttggtcgtggacgtggtcagccacctcagtaaaattggagaggattcttttgcattgaataaacttacagccaaaaaaccttaaaaaaaaaacaaaaaaaaaa

SEQ ID NO: 217255 - DNA, 799 bp, Homo sapiens
cctttccagtcccggtaccggaccctgcagccgcagagatgttgatgcctaagaagaaccggattgccatttatgaactcctttttaaggagggagtcatggtggccaagaaggatgtccacatgcctaagcacccggagctggcagacaagaatgtgcccaaccttcatgtcatgaaggccatgcagtctctcaagtcccgaggctacgtgaaggaacagtttgcctggagacatttctactggtaccttaccaatgagggtatccagtatctccgtgattaccttcatctgcccccggagattgtgcctgccaccctacgccgtagccgtccagagactggcaggcctcggcctaaaggtctggagggtgagcgacctgcgagactcacaagaggggaagctgacagagatacctacagacggagtgctgtgccacctggtgccgacaagaaagccgaggctggggctgggtcagcaaccgaattccagtttagaggcggatttggtcgtggacgtggtcagccacctcagtaaaattggagaggattcttttgcattgaataaacttacagccaaaaaaccttaaaaaaaaaacaaaaaaaaaacacaagacaacaccacggaggagaagagagaaggcaggcaagccggggggccaaattaggaagggcataacaaaaaccggctatagagggtgacaagttggcaatgacgtatttggcacacaattttgggaaaaggggtgtaaatgggggaacccaaggagaggaatataagtaaaacagggattaccggta

SEQ ID NO: 217256 - DNA, 474 bp, Homo sapiens
acttcttgcaaataataatatccacacaggaaacctaaatattaataatgaagagttaaccgctccctgatgtttgaatggggctttaaaaattcctatttcacgtcatgaagtgggagaaggcctaatggtaatgtttactttctcaagaaaatatctagttaaaaggggccaggtatgtagcaaagagacagcaagaggagccttccgcagtactttaagtaactaaggggactgctccaccacccatgagcccatctgtgcatatctctgcacacatacacatgcatgcatgcattcctccctgtatgcccatggatgctagagctgacccttttctacagaagtcctggctaccttgacatcctactcaggtgagtgctgaaagctgatcctctgcattgtccaaaacttggattttcatccatttgcccgtgattttttatgaaagaaataaacagaattgtagcctga

SEQ ID NO: 217257 - DNA, 173 bp, Homo sapiens
actatggttgcctgtttgctgttgcttcttgtggatgtacatctatgtctttgcactaaaggattacttattccagtcttctttggtgtgttttggtttttattggatatatttgcttagaggttctttactgcttgtttactgcctcctttttggctccgggtggtgcctta

SEQ ID NO: 217258 - DNA, 282 bp, Homo sapiens
agaccacagtgaagctgttagcaggatgtgaacagagttcacaaaatcaagggtttgtttacataccagccacagcacgaagaaacaaataaggtctaaatgcctgttgtctcatctgtttttgtgttttccttgcgtatttcttcccaagctcttaacaaacgggtaatgggtagttaaacatttgcgaccagttactcatcttgctttgcagtcatagagctggtctaagtggagcagccagtaacttcaaaggacaccctagtttggatctgtttccca

SEQ ID NO: 217259 - DNA, 235 bp, Homo sapiens
aactaaagttaaataatacatgtaaagcagttagaacagtggctggcccagagtgacctctcagtaaatgttagtggtcctcctctcccacttaaaaatgtttgcacagctctgggcatcatggggactttttaaacaaatcaagccctctcccggggctagtttctagttaatgaggctttgctgttttcacagtgagtaaatacacattttccaccccttcttttatattgtt

SEQ ID NO: 217260 - DNA, 326 bp, Homo sapiens
gaggaacggatcaagctaggaagcacagaactgcaggccagagacaactctggaagcagaaacaggtgtgtgcttccaggcgcacagacaccaactgtgtgacacccacaccttctactcacaaactcactattgacagtgcaccaccacctgctttgtgcaacacaggaaacaccaataaacactggagacagtgtcaggccaggcatggtggctcacacctgtgctcccagcactttgggaggctgaggtaggaggatcgcttgaggccagaagttcaagaccatcctcagcaatacagagagaccctatctctacaaaaagtt

SEQ ID NO: 217261 - DNA, 251 bp, Homo sapiens
tctggacagtcatgtaaaccaaaaatcacggtgtgacgattgctacctagtggtctgcagaggatgctcagagagcacatagggagagagatctaatctagagcagggctgatggccacagtcccccttggaggtgcctgcctaacgtctgctttctgtatagtttcacatgctgcatctttttaacatgtcttttgctgttttctgatccacattttgttagatcactgaccctaatagatacaattata

SEQ ID NO: 217262 - DNA, 518 bp, Homo sapiens
caaaggttgttaaaaggtgcagatgaaatgttggggtggaaagttggatctggggcatatggataaatagcctgctcccatgaatattcattatgatgagacaagctaagaaggtctgagagaccttctgataggagattgagatgcaatctcttagcatagctagttggagctttttgtagctagagagactgaggtgctaattaaagaataaagcagtatccagtttattgagtttctgcagtggaatgtttaaggataaattgttttgacatcatgctctgagcttgttggtcaaacttcatacctctgagaggactggatggaatgattagctgagcctcagtttattcagtttattatttttatcactgttttaaccttatgcagaatattgatctgtctgcaattttagcatatgcttattttagtgtagttgtctttagaaattctaaaacaagattgctagatttctcattctccttagcatagatatttgaaagtattaataattactg

SEQ ID NO: 217263 - DNA, 354 bp, Homo sapiens
tgtcctgctttgttttctccatggacgtgatgcatcttagggacaccctcttgtgtgatgcctcggcccaaacacagctttagaaactcacctacatgagctgcttaggaatgaaagcattccagtggttaatttactatgacatctgtatcctaagttaactgtcgggtagaaaaatcttaaaataagaactaaataaaaacctcctcctgccagtgtggagatgacatcaagaaggcatcacattctgaaactagacactacttagccacacggaactcctacctggacaggatgcctttgtcaacaccactcgtttatggctcgcattttcacacaggctgtttgttggtc

SEQ ID NO: 217264 - DNA, 466 bp, Homo sapiens
gttaaataattcatgatatattcatataataaacactatagagcaatgagaacaattgacctacagctaaaccccaaaatatctaccaatcttacatgtttattattgagtaaaagacactggatactaagaaatatgtactctaagattccatttgcctaaagtaccaaagcaggatagtagtcttgatgggtgtaggaggaggtggtagagcatgaagagggcttcatggaaactgttgtattctgaattttctttgggtgctggcattctgaatatatttagtttgctcaaatccacagagctgtatatttatgatgtgtccacttttctatatgtgtatttatgcttcaaagtaatttacttatctaacaaaatatggaaataaatataacaaaatatgccaaggactatacactgaaaactatgcaatatgccaagggctaataaatggtggaacatatca

SEQ ID NO: 217265 - DNA, 239 bp, Homo sapiens
aatgagacttatttattaccctgagaatagtatgggagaaactgcccctatgattcaattatttctgcctggccccacccttgacatgtggggattattacaattcaatttgagatttgggtggggacacagctaaaccatatcaacactgaataatgaaaatacctcatatcaaaatgtaggaaattcggctaaaacagcattcaaagaaaaatttgtagctttaagtatttgtagta

SEQ ID NO: 217266 - DNA, 621 bp, Homo sapiens
gctcactgagatagatgcatgtctgatcacctcagttgggaaaggctaatcagaaactccaaagaatgcatctgttcatctctcacccatctgtgacctggaagccccctccccacttcgagtcttcctgcctttgcttcaagttttcccgcctttccaaatggaaccaaagtacttcttacatatagtgactcatgtctcaagtctccctaaaacgtataaaactaagctgtgccccaaccacgctgaccatgtcatcaggacctcctgaggctgtgtcacggcctgtgtcctcaaccttggcaaaataaactttctaaattaactggacccgtctcaaattttcggggttcacagactcatgtgcaacaaggggtctaagcaggacaggttcgggggggtttcctattgttagcagatgtccccttctggaaaggggtgcaaacacccactttcagccaggagatggtaagcggttccctgatcccacctgcttctcctgagcagggtttatcagtacaggagagtcagggtatctgagagcacttccttccttacctggcctcagattctccacactccaaagtatgatgcatgatctgagttactcaagacaaaatt

SEQ ID NO: 217267 - DNA, 251 bp, Homo sapiens
agttctgaaaaatgaaggcagaatttttttaaagtttctgaaattaatgaaaataagaacgcagcttaccaaaatttccgggatgcagctaaagcagtgttaagcactgctttataacactaaaaaccttcatcaagaagttagaaagatctcagattaactgtctaactttgcacctaaaggaaccagaaaaaaagaacaaaccagttaattaaaccttggagtgaccagaagatcagagtttcctaaag

SEQ ID NO: 217268 - DNA, 346 bp, Homo sapiens
agtgctgcaccgcctcatcccgctgcaccttcgcgggcgggggagccaggatgattacattgctgggaggaagatgtttgttttgaaagcacccttccacagtcatttcaaagagaactcaatacaaagccaaagttaaaagtggaaaaaataataatcttgcctagccaaataataccacgccattaattagccccgcgcctgagagagggaggtggaaaggtaaacagagaccgtacgccaagagcggccagcgcatcccctgcgccattcccggccgccgcttacggcaaggcccccttacggcagcgtaagcagcgctgcgagctaatcacaacactgggac

SEQ ID NO: 217269 - DNA, 354 bp, Homo sapiens
cgtttatagtagtgaaaaaaagtctaggtgattaaaaatagtgattgactaaagagtgtcacacacacactcatatagcagatcgctcttcaggaatttaaatgacactccaagaataaatttaataacccaggcaagtagtggcatatgcagtagaaacccacttttaaaaggtgtgggtatatatatgtatatgaatttttatgtgtgtgcacaggaaaaaaacctagaataaacctagaataaataaataaatcggggtgaagaattacaaatgctagtaattttattgtttttggtttttatctattaaataatttttccaaaatgaatatgcattagctgcatgtttta

SEQ ID NO: 217270 - DNA, 160 bp, Homo sapiens
catttgagttttgtatttctccctttggataatctctttctaatttttagaggggtagaaaaccacagtgaatttcttagaaatgcagcttaagctacaaaagcagagaggtctttctttatagttgggtgcacacacctttgatatcatctgttttgtc

SEQ ID NO: 217271 - DNA, 272 bp, Homo sapiens
cctaatttttatggcatgacaaaagaattcataaaaaatgggaaaggacaaaacatgttggaaaaatatctgtaacataatttgcattaatacttataaaaatatatacacaacacatatattctcttttttttttttttttttttttgagacggagtctcgctctgtcacccaggctggagtgcaggggcgccatctcggctcactgcaagctccgcctcccgggttcacgccattctcctgcctcagcctcccgagtagctgggactaca

SEQ ID NO: 217272 - DNA, 278 bp, Homo sapiens
aacaaaagcctcacagcatagtctgagttgactattgtggatagagatgatgtatgatgtagtggaggtgacttactttcctcttcctaaattcgttaagacaagtttcttttttaaaggcgcttattggtgaccatttgctctgaatggcattttaaacagaattagattagtagaaataccttcctctaatatcttccaattttttttttttttgagacagagttccgaggttatatttgccgaaggctatagttcgaggtctattgttgcggttc

SEQ ID NO: 217273 - DNA, 605 bp, Homo sapiens
aacaaaagcctcacagcatagtctgagttgactattgtggatagagatgatgtatgatgtagtggaggtgacttactttcctcttcctaaattcgttaagacaagtttcttttttaaaggcgcttattggtgaccatttgctctgaatggcattttaaacagaattagattagtagaaataccttcctctaatatcttccaattttttttttttttgagacagagtctcgctctgtcactcagactggagtgcagtggcgtgatctcggctcactgcaagctctgccttccaggttcacgccattctcctgcctcagcctcccgagtagctgggactacgtgcacccgccaccacgcccagctaattttttgtatttttttagtagagacggggtttcaccatgttagccaggatggtctcaatctcctgaccttgtgatctgcacgtcctggcctcccatagtgctgggattacaggtgtgagccactgcgcctggccgttatcttccaattttcaagaatgtggctgccatatttcaatttggggaagtagcttatggattagccccaggtagtcactactgttactgagagttagcacaata

SEQ ID NO: 217274 - DNA, 301 bp, Homo sapiens
aagacggagttttgctcttgtcacccaggctggagtgtaatggcacgatcttggctgactgcagcctccacctcccgggttcaagcagtttttctgcctcagcctcccgagtagctgggatgacaggcaggtgccaccactcccagctaagttttgtatttttaagagagatggtgtttcaccatgatggccataatttcttttggcttctgaaattagaaatttttggccattaatatcttccaacaggcttttctattcctttcttcctctcactgtcttctgggacttctggtacttt

SEQ ID NO: 217275 - DNA, 361 bp, Homo sapiens
aagagagagagagagaaagatgggatcttgcgctgtcacccaggctggagtgcagtggtgtgattgtaggtcactgcagccttgaactcctaggctcatgtgatcgtcccgcctcagcctcccaagtagctgggactacaggcatacaccaccacacccagctaattttagttttttgtagagatagggtcttgctatgttgcccaggctggtcttgaacttttggactaaactgatcctcctgcctcagcctctcacagtgctgggattataggcatgaaccaccaaaaactgcagtttaaaagtgtttatatcctggatacactaacagcattttgtccaacttgtggagtggagggag

SEQ ID NO: 217276 - DNA, 297 bp, Homo sapiens
catgagactaatagattaaaatagagtctacttaaaagtgcttgtattcttttttctcctacatgaccaaaaatattgtatactaaatgtaaaagatcaaaattccttttatacaatataaaatattttataatacttcattacctcataatattccattaaaaggaacatagctttgcagtttgccttaagagagaaaataagtacagaccaagagatgtgttaccatgcaagactgatttttgttaaacttgaaagttcttagtataaacaaactaacttcaaaaaaactattaa

SEQ ID NO: 217277 - DNA, 438 bp, Homo sapiens
agaactctctacattataactttggattagcaagcattcggctaactaaacattttcatttatctcctacccctgattatataaagaagcagatgagacaaccaaagaaatacccctccaagacaaagtgaatattttgaaatacttcctctcagtcttttaaaaaatgtgatttaaaaatcgtaggtgggatcatactatacatgcacttgttttctgtttattttacatctctctatactagaaacactttcctatatatgccacaaaaactgtgaaagtactaatgattatccctcctgtcccttaatatgcttagctattgccccaatgaactcagactgtttccaaagttccgctgttggccgggcactgtggctcatgcctgaaatcccaacactttgagaggctgaggcaggtggatcacttgaggccagg

SEQ ID NO: 217278 - DNA, 352 bp, Homo sapiens
acagtgcctaccctgttggggtttaaaacccacaagggaggaccacctcctgcagcaccttctctcaaaagctccaggcccactctgcagaccaccaggacccccaagagctgtgcagcctcaccagcagctgatgggcatcactgggagggagtagagaaggctcattatgatggtcaattcaggacaaatcctttggaatagggagagatgcctggaagcttctggagaatggagaggtccccatttcctaacccaccattggtcctttgtcaccatattccccaccctctatgcctgagtggaactccgttaaccctctcattcctggagaactgcacaaaccacatct

SEQ ID NO: 217279 - DNA, 671 bp, Homo sapiens
caggcaggtcccaaaagagcgagccaaggtcaggccaggctcctctcatcacacgtgcctgaatccccatctctccaaacagataagtgagttagggtaaggagaagggaaataggggagtagaggcattctcccccatgacttctgcaggagaagttttgattttataaactcaagcagcaactggccaaacggtttcaaaaacaaaggttgtaaaaattctttagaaaattttatgttaaaaaagttctatttgatgttgtctgtgagtgcctggtctatggagaggccttcaaaagccaaggcacttctcaaaatgctcaaattgtggcccatgggccagctgctatttgtcagcagtgaacaacaaaattgggagctcatgcgaggatgaaaatcagttgcattgcgaagaatgctgttagttgagctgacatttgtgttttgtagcaagactttctcaatgaatgaagccaagtgctgatatacgtacattctggcacacatctcttacctagccatgcgctggcactttgagtagcactggcctcatgcctctggacatctcactccccgcctcccctggcagggcggtgatgggtagtagacagctggtgtgctggacatggtgaacatgacccttggcctcttcctgcccaggtgatcgccat

SEQ ID NO: 217280 - DNA, 602 bp, Homo sapiens
tgtttttaaaatgccaggattttaggggttaaagatcatatggggtagtttaggaagtttgtgactatgagatgaatttgtgaggtttcttgcctaccttttttcccccccagagaagggtggaactagattttaaaggcatctctactctgcttttgctgagtagtttcactgtcccttgagataccattggctatttatacctgagtctagtctaattcacatatatatatattttaaaagttgagagaacatacctattgatgtggttcaataattcatttgtcagggaatatttgatcttaattcctttctaataggtagtgattggatgtattttcctacttcctgtatgtaatctctttatgccatgctagttctaaccagtcccttcttttgaaagcttttctttctctgctttttaaaggaatgatggtgatcagcaggcattatgcagataccacgtgcctgaggttatggaggggaaatgtcacatgactgtatgaaatcattatatgccctattttgtatttattgatgtttctttttgtgggccaaaaatatgtttgtaatatatttagtttttttaaaatcatggtaat

SEQ ID NO: 217281 - DNA, 459 bp, Homo sapiens
gagaaaactgagttcgaaaaagtttaatttaatatataatcctatcatcactgtgctattcttcttcacatttaccatatctaaggtatgttgatcatttactacataccagtaactatgtgttcttttcatatttcaccttatcgaatattcattgttttacaggtggaaaggaacatttcagtggggcctgtggttaccagtttcatttgctatgaaatccttactgtttgaaataaaactttgtgcatttaaccactattctacataatgaatatagttgttcgtaaataaaattttaacaaatggaaaagatgcacttaaaaataatatttgattggccaggcatggtggctcacgcctgtaatcccagcactttggaaggccgaggtgggtggatcacctgaggtcaggagtttgagaccagcctggccaatatggtgaaaccccgtctctact

SEQ ID NO: 217282 - DNA, 1742 bp, Homo sapiens
  misc_feature (1)..(1): n is a, c, g, or t
ntttaatcactctgtgcctcaagttctttatttgtaaatcaagataataatagtagttacaaagtaaaggctaaagttaataaagacccaaaagaaaattaaaactctacatattatgatattataattaccaccatcatcatcgtcctcctcgtcaccattattgttttgttgttggtagcagtggtgtcctgctaggtgttagaagctaggaacctatagaaaaagtgctcttccctgtacaggactatacctggccttacttgaaaactaagaactcttagcaacattagcaacatacttctcagctctagaacttcccgatgaagtggaatgttttgcatcggactttttgcaagaagatcaagcttgaacccggtaacctgtttttccatcgagcacttgattctacattaagatcaggccatagctctgcaaggtgggggcccggactgaagggtcaggctgggtttctgtttcgtaactgggaaaggcatgtactgcatgcggcaggctgacctcctgaatcttcaggacaatctcaatttcagatggcccaccctgctgatcaaacctgtggtttggaaagcatggttactgctaaataggaagcaagggctccaaatgccagtgtcctaatcgtttaaaaagtaaatataatttgaatatgtgggatagcctcagagaaaaatcaaagaacacaattaagcatagtttctatttagttttcagttgatgaaggaataatttgaagttgctctagtcactgagagtacagtagcaatagtcctccattctctgggattcagggcaagagcggacattatgtgcatattacaggttttctagcacacagattctatcaagatagcctctaactgcaattgtggacactggtggaatattcctagcaggagctcaaaggattgtaaagctgaataacatctttgtctcaagaacttatatgagaaacttttttccctttttctcctacaagcatttagtggttcaccattgcagacactgcatatctttgtatcccacacagtccccatgttaatagttgtttgctagttgtggtcatttaattgaaaaaagctggcacagagatattacaggtcccaataggtcatttctgtatcaagtatggtgttattgcctttaaccaagccctgtccaaggccaaatttattacatgcattaataacatataagaggatagacagagagctgaagaaaagatgtgtgtggcctttaaatatgccaatcatctacagttcggagggttgcttaccgtgacatattgccagctgtgcattatagaattccagatggcatggtactgttggtacttgttttggatttgccctgggaatgaggttaaagaggacaccaaactatggctgggatccttttgcttgcctcttccagggtagatcctggaaggctctatctcctccaaccaatcagaaagctgccctgacctctcttggggattatgaactcagcacaaattgctctttccccgtgaattcccatgcacctagtaaccctgcactaagagagcagtgagtgcattccctcatgtaatctgtgttcgccctccctcagaccccagagctggggcaagtttggacatgaactcaaaaactctatagataagggttgtgttttcattagcttgcctgtcttgcttgctttatattctgtgagatttccttcccccatcccccctttttttg

SEQ ID NO: 217283 - DNA, 1276 bp, Homo sapiens
  misc_feature (1)..(1): n is a, c, g, or t
ntttaatcactctgtgcctcaagttctttatttgtaaatcaagataataatagtagttacaaagtaaaggctaaagttaataaagacccaaaagaaaattaaaactctacatattatgatattataattaccaccatcatcatcgtcctcctcgtcaccattattgttttgttgttggtagcagtggtgtcctgctaggtgttagaagctaggaacctatagaaaaagtgctcttccctgtacaggactatacctggccttacttgaaaactaagaactcttagcaacattagcaacatacttctcagctctagaacttcccgatgaagtggaatgttttgcatcggactttttgcaagaagatcaagcttgaacccggtaacctgtttttccatcgagcacttgattctacattaagatcaggccatagctctgcaaggtgggggcccggactgaagggtcaggctgggtttctgtttcgtaactgggaaaggcatgtactgcatgcggcaggctgacctcctgaatcttcaggacaatctcaatttcagatggcccaccctgctgatcaaacctgtggtttggaaagcatggttactgctaaataggaagcaagggctccaaatgccagtgtcctaatcgtttaaaaagtaaatataatttgaatatgtgggatagcctcagagaaaaatcaaagaacacaattaagcatagtttctatttagttttcagttgatgaaggaataatttgaagttgctctagtcactgagagtacagtagcaatagtcctccattctctgggattcagggcaagagcggacattatgtgcatattacaggttttctagcacacagattctatcaagatagcctctaactgcaattgtggacactggtggaatattcctagcaggagctcaaaggattgtaaagctgaataacatctttgtctcaagaacttatatgagaaacttttttccctttttctcctacaagcatttagtggttcaccattgcagacactgcatatctttgtatcccacacagtccccatgttaatagttgtttgctagttgtggtcatttaattgaaaaaagctggcacagagatattacaggtcccaataggtcatttctgtatcaagtatggtgttattgcctttaaccaagccctgtccaaggccaaatttattacatgcattaataacatataagaggatagcagtggctagtagtctcttggaatatgctaccccatacccataaatcgggtaga

SEQ ID NO: 217284 - DNA, 438 bp, Homo sapiens
agcatctatatgcttacagggcatgtttgaatttctgatcatgtgaacattttttacattgtacacatatttttaatttgcatcaatttatagcatacaagtgcagtcctgctacatgcatagtgcaatggccaagtcagggcttctagggtacccatcacctgaataatgtacattgcatctattaagtaacttctcaccatccacccacctcccatctctcacccttccaagtcttcattgtctatcattccattttctgtgtccaagtgtacacatttttttagacaggattttactctgttactcaggctggagtgcagtggcatgatcacagctctttgcactctggacctattgggctcaagcaatcctcttacctcagcctcccaagtaactgggactacagatacacaccaccatgcccagctaattaga

SEQ ID NO: 217285 - DNA, 578 bp, Homo sapiens
ggaggtataatcatactgtcatttttttatgtgtgtgtttaatggtatctattcagttgacttcagaaattttctaaccttcctcactaaaacttgcaagctaattaacacaggtctcttaaagaaggaaaataaaacatcttttaggaaacggtaatagacccatataaacatacttcaaatgtgcagtgattttctccaaactattgaaagtaatgggacctgttaataagggttagtatttaagaaagactatattctatgaaattacatgctttattattataggatgtaatggaattttctaatctattaatagaagttaatcttctgataaaaattttaaatcaagaactgaatttacccacaaaaatttaaaaaatttgaaagaaaattgaccaatttatcattttttaagtgaattggacactgatatttgaaggtgagctcttttaggggaaaaaataagtgggttgtgtttttaagtcatggtttagtggtaggtagttattgtaaataggccatctggttttacttttgagtgtctttaattttggtggtagtatttcctttctcta

SEQ ID NO: 217286 - DNA, 680 bp, Homo sapiens
ccacccagctgccagtacagggcagtgatcctcaatactccttcactttcattgcctatatcctattgattaccaaattctgccaatttaatcttccaaacatctctcaaatctactcatgccaccctctcccacttctgccacctagactgagctaacatcctctgctacatggaacaagcctctccttcatgccccagggccttcacttatgtacactcctccttctggaggagctccactgcttgaacttcctcctcctttatccttcaggcctgcacttataatttgcctcctcaggaaagcctcttagatccccaggctaggtcgagtcctgtttgatgcttttgttgaatgctgtacttctcctctgtagttccaattgtaatagtacttaattagcacaggattattggcatcagaacactgcagggattaagaggagtattcaataagagttattgaacaaatatataccaagatttttaatgaccagaaacatcaaaatagagtctccaagattcactgaaggctggaaaaggtttgcgtatttgcaaagcatccctgaacatcagagtggcttcttggcactgcaaatagcattgtgaatcccctctatccccaaagctttttgtgacctggacagatgctcatgtttctctgtgcactggtcttctcct

SEQ ID NO: 217287 - DNA, 405 bp, Homo sapiens
attcatgtaacaaaacggtacttgcacgcctaaatctatgggaaaacatatttttaaggaatttattcacacatgatttcctctgatctaggcccacagcactgagttcaactcttttgagttaaatatttgatttagcacatacatgtaagcattccacaaaaatgtattaagacattactaagtgccaaccactggttctaggcactgggagatatatcagtgatatatgaggtgaagcaaaacaaacctgactagagaatacagatttttttcagatgcacataaaacatttaccaagacaatcatattctgggccataaagcaaatttaagagagtttaaatcatgagataaattttctaaccacaatggaattaagttagaaatcaagaagagaaagaca

SEQ ID NO: 217288 - DNA, 126 bp, Homo sapiens
ggcagagatcctgcagccccccgccccccgtcacccccggagaggagaggagatctgctttcttggttttgcttctctttccccccacccccaccccgggggctggggcgaggggagtcgggttac

SEQ ID NO: 217289 - DNA, 959 bp, Homo sapiens
attttttgtatttttagtagagacagggtttctccatgttggtcaggctggtctcaaactcccaacctcaggtgatccgcctgcctcggcctcccaaagtgttgggattacaggcatgagccactgcgcccagccgacaacttcttaggttgtgttgggaactgtaaaaagtaaagtcggaaactttcactgcttatgcttatgtgattgtaaccatacattttctattagtacaagagagttgcttattaaagccccgtaacagctgcatggatcacccattcctagtgagtgaggcattagtttgctggacccaagtagaaactcatggtgttctgacccctgtgttgtatttcctgccatgtgcctggcattctgggcacctgttgccataactaggttgactgcctgcaggatttgccatcaactcactgtatggtctgtgatggacccaccctatttctgatcaatctgcattggtgacagtgactgcacactctgtagatactatatgtgtatatttttacttcttttaatttgttaattgacagataataattgtgcatattcatgggatacatagtgatgtttttaatacatataatgtatggtgatcagatcaaggaaattagcatatccatcatctcaaacatgtagcatgtttttgtgttgggaacattcagtatcctcctcctggttatttgaaactctgtatatattatgggtccctagagtcaccctaccgggctgtagaacacaagcaagatccctcttctctagctataattttgtatccttgaaaaaatccctactccttccttcccagcctttactatcctccgttatactttttacttctatgagatcagtgttttttagcttccatgtatgggtgaaaacatggtattcaactttctgttcttacttcacttaatttcctgggaatactatccagccag

SEQ ID NO: 217290 - DNA, 244 bp, Homo sapiens
tgagccacatgcccagcctattatttttcaataaatctacttattgtctcttctttgattggaaacctattaaataaaatccaaaacttttaccacttcattctagaccttctattgcctgaccttcatttgacctttcagcttcacattctataactttacctcaggtaccttaagtatctgtcatttgtagtctctaaacagatcataaatgttcttgccctggttcatgctgtcttcttat

SEQ ID NO: 217291 - DNA, 622 bp, Homo sapiens
caggctcagatgatccccccacctgagccatccaagtagctgggactacagtcacgcgccaccatgcccagctaatttttgtatttttttgtagacacagggttttgccatgttgcccaggctggtctcaaactcctgagctcaagcagtcctcccgcctcagcctcccaaagtgctgggattaccacatctggccctcttttcgttttggaaattagagctcgcccccctgcctctccctccccccacaaggttttcttttcgaatgcaattctgttttctggtgggtggggactttgcctgggttcattgatcaggttcgctcgtcaactagaactatggtccccaaagaaggctgtgcaggatctgtgggagagcagataccagagccctgctttatattcatttttaacctcatcacttttgatttccatgtacatgtgtagttataagcatgtgctatcattaaggtatagtagtaccatgctgtgaactaaatatattggagatacaagctcaaactgtcctggtggaggcaggcagtcaaaaatcccagagaggctggaccagacaccagagaatgtgggttttcaacacgggggagaggaatgaggagagccaa

SEQ ID NO: 217292 - DNA, 474 bp, Homo sapiens
atagtcgttatttatagattcccagcatgaattataggctacttttactttttgttgtataatgagtctttgacattgtcagttatttagatcaactactggttataatttgagcagaattaccaacataaaatgtattacttataatttgttaacatagcaatctcttacaatgtgttaatagtccatactaaaattaagaattctgagttgttacttaactcccataaaagggactttggaactgtgaattttattccaaataaatgtagtcttaatatgtttttcagttaaaaggatcaacaagatattgagcatcattaaaaaaaaaccaaaagggataatgttactctttttcatataaagccagtgcctgttacaggaagactatgtgatgttgccagaaatgtaactggtaaggagaagaacgctaaaaatcatcagagatcgggagatattgctgtttgacagcct

SEQ ID NO: 217293 - DNA, 412 bp, Homo sapiens
catcattgcctttttaaatttaaaggtatattaaccttatttttgtatttagttattttaaaattaatgtttttgttccacgaaatagattggctggaatcaacttgtgaatgaaaatgaagattttgcaaaatgttaaactgacaagtagttcatttaagaatgaatactatgtacatttcccagaaccgtcttaaggcgtgttatatagcactttcaaaataaattagaattgcagaaaaggccaagatactaccaatatgatttcagttttcatatattttgtaattatttttgtcaaagattcttcagctgacctttaaaaagttacctacttgcataacatctgcatgtttgaagtgtgtaaaaagtagctaacatttgtcaaaacagtagtggaatactaggtttg

SEQ ID NO: 217294 - DNA, 177 bp, Homo sapiens
tcccaccgggtccaggtcaggcccaaggggaccagctctgctcccaccatcatcccactccccacacagccaagctggacatctgagagcactgcatggcaatcctcatctgcctgtgtgtctccctccactggggacacatgtcatgtgtcagtcctgcagcacatgtgtccttct

SEQ ID NO: 217295 - DNA, 405 bp, Homo sapiens
aattgtgtgcattcttgagattcctcctcctacaggtgtggacaatctgtgtttaaaatataatttgctgttttaacaacaattaattatcaaattctttaccatttttttcctcaaactagaaatagcagcactgcttccatacagagagatccttgcttccttaacagagaaaaaagactaatagaacaagttccacaacatgctactctgtgttagaaaattgacttgattggcctgcgcacctgctatctaactcagttgctcagtctttaagtctcagggtggaggcagtttcctgtctgctgctgtccattaaagagctgatgatggtagtttgctttacaatgcaaattttttttatgttgtactaacacaaaaataataggtgcattcttcatttcc

SEQ ID NO: 217296 - DNA, 443 bp, Homo sapiens
cctgcacttcctagacacatgggctgcttcccccatcaagatgggaatctaattccatctggaaatctgagctatccttggcgcctagctggacaacaaatatggcagaaatggggctgcataacttttgaggctagttactagggctgtgcagtttcccccggatctgttggaatactcactgttaggatggacccagcatctcactgtgagaagctcaaaactcatgagaagccacacataggcactctggtcaacagcctcatctgggctgtcaaccatcggccatcaggagctgctgaccatgccagtcagccatattggttgtgcagccccagccaacacctgcctgcaacttcatgaaagatgccaagcaagaattgtccagctgaggcccattaattcacagaaccacgagacataataaatttgtgcatatatat

SEQ ID NO: 217297 - DNA, 446 bp, Homo sapiens
ctgcttgggaggctgaagtgagaggatcacttgagtccaggagcttgaggctgcagtcagctgtgaattgtgccactgcactctagcctgggcaacagagtgagaccccacatctctttaaaattttttcaaaatatttaaaatgatcaaaacgggcgaggcgctgtggatcatgcctgtaatcccagcactttgggaggccgaggcaggtggatcacgacgtcaggagatcgagaccatcctggctaacacggtgaaatcctgtctctactaaaaatacaaaaaaattagctgggcatggtggcaggcgcctgtagtcccagctactccagaggctgaggcaggagaatggcgtgaacccgggaggcggagcttgcagtgagccgagattgcagccactgcattccagcctgggcgacagagtgagactccatctcagaaaaaaa

SEQ ID NO: 217298 - DNA, 413 bp, Homo sapiens
atgaagatgatgactgaaaattcttttgtctaacttttgcttaatcttatgttcacaaagctgatttactgtcatctttcttaatcattatcccctcatcatcatcaatcattagttaaaattaattacaggccagccgccacggttcatgcctgtaatcctagcactttggaaggccgaggcgggcagatcacgaggtcaagagatcgagaccatcctggctaacacagtgaaaccctgtctctacgaaaactacaaaaaattagccgggcgtggtggcgggtgcctgtagtcccagctactaaggaggccaaggcaggagaatgatgtgaacccaggaggcggagcttccagtgagctgagatcacaccactgcattccagcctgggcgacagagggacactccgtctaaa

SEQ ID NO: 217299 - DNA, 204 bp, Homo sapiens
tcgagccggtccaacagtggtattctgtgtcaggctatacaatgttacagcacattataatagctctaatcctgacaaattccaaaagatttaactcaggtatcttctcatctgtaaagagagtctttattcatgtttccaaagaactttggatcacttcctgcactagtacacatcatactgtgttgtaagtgcttgttcata

SEQ ID NO: 217300 - DNA, 332 bp, Homo sapiens
cagaaaaaagaaagaatgcaagccccattgcgtgtaggatgtttaccagagaataatatatatgggagattgtccagaaggacagggtggtttcaaatgctaaaaagtccaggcaatgggaactgaatgagcatggaaattaggccactggacttggtgaccagcttctagactggcatggccagccacagtgctacaaaagcaggtaaaagccacctcttggcagatggagaagtgggtggaaaatgaagacataatggaaggtgctggtaaaagtaaaccactttccagagtgttggtggtgatgtgaggagagactgagagtagtttgc

SEQ ID NO: 217301 - DNA, 218 bp, Homo sapiens
ggggaccagagaggatgacacacccaagctcaccagcaagttagaggccaaaacaaactcaatttcattaattatggagttatttccatctgcaatagacatatctgtttgttttgttcgtttgggctttggcgggtaaaggggctacccacagggatactgattttcttttcttttcttttctttttttttttttgagaggagtctggctctgtcgc

SEQ ID NO: 217302 - DNA, 109 bp, Homo sapiens
gctgggacatttctttctctcttcccttcccatcccgtcccatccagtcccgtcccgtcccatcccttcctgtcccttcccatcccttcccgtcccttcccatcttcgg

SEQ ID NO: 217303 - DNA, 372 bp, Homo sapiens
ccacgcgtccgtccatgcgtccgacggctgcgagaagacgactgaagggggagcaatatctgccagagttcttccttccttttttgcttgcctgacacccttcccttcagagttcagttcttgctagtagaaaaaggctatgcagcatgataatacagtgattttaaaagttgattatcttgaagtattttgggacagttttggggaatgggttatgtggtatatatttatttggctctttgctgaatatggctgtataaatccagcctcctggatgttacaagtcatccccttgatttcttcttttgaataaaaaaggagcattgcttcatttttcttgcagaaacccttatttaaacaatgaaaacttca

SEQ ID NO: 217304 - DNA, 314 bp, Homo sapiens
tatgctttctccagtgcatgttcttggtacccttgtcaaaaatgaattgactgtaaatgcgtgaatttatttttgagttctctattttgttccgttggacactgtgtgtatttatgcccgtactgtctgaacatggtacatatttaaccccagatattaggtagccatgatagaggtatagatggcttataaaataaaactaattgtctttttttttagatttaaaaaaagactaacaagagtaaaaatttacagcaggggaatggttaatgtttttaaaactatttggtaaaattcaggagtgtggatatgaa

SEQ ID NO: 217305 - DNA, 522 bp, Homo sapiens
gtatagtaatgactaccattctgcatggttttgtggactaggcaaacctatttatgtcacattttatagagaattgtagattccatgatagtggagttatatacaaaaagttgtgttgcttttaagtatgataagaataagtaaagtttatgtaaatgatcattaacaaaaatgagttgtgtttttgtaagtttacctctttaaaattcaattttgaaaggatttttaggttctcctgggtattcactagtttattgtcacagcttttcctgttatttcatacaggatgttttccttcatagtgatagaatactagacattttgtgagttccagaattctaaagcatgtgctcatgctgtgtagtattctgaagaatatagtccctcaccctctaaaaccgggcttctgacatacacggtactatttgataacataacaatcaaacatttgaattttgatatagttataggcataaccaataatcagaggtgtttaagttacaatttctttgtttcaagttt

SEQ ID NO: 217306 - DNA, 350 bp, Homo sapiens
ttcacgtaccatgggattagccatttttttttacttgtttatgtgacgaccagcggattttaaagcgcacgggttagcgaccttcgtgttgttgaaccatcacctctgcctagttctggaatgtttccctcactccagaaggaaaccgcatccccatcagccctcgctgcccagccctggcggtctctaccccgctttgtctctgggtttgcctgtgcgggactttccgtgtgacatgtggtccttctgtgcccagttcttcccagcatcatgttcccgggttcacctgtgttgtggcgtgtggagctttcttccttttcatggctgagtaatattccagcgtgtgacca

SEQ ID NO: 217307 - DNA, 437 bp, Homo sapiens
tagtagtatctttatgagtttatctcagttatgctaggcagaaaggagctcttgtcagttggcaggaccgaaaggagagaataggcagggggaagaggggacagtaatcgaagtaggagcaccttgagcgaagtgaaatgtgggatggaaatggaagctcctgtttgtgatctcccagagaggctcagtccagcgccaggtgccgtgtgcttgtggaataaagagaccgaattccttctgtactgggggttcatgctgaaccccacctttgttgaaggggaggaaccagctgcccaaggcaaactagaagcatgcttgcaggagggaaggttaagacacacagtttatgtgcatagcagtgaaaaccatagtgtctgttctgaagtttgggaaaatagtgtgagactgtctagctgggtctgtcattggctgatgtg

SEQ ID NO: 217308 - DNA, 435 bp, Homo sapiens
actttctgtaagatagaccatatgatagccaacaaaatgagcctcaataaattttaagaaaattaaaattatatcaagcactttctcagaccacagtggaataaaactggaaatcaactccaaaaggaaccttcaaaaccatgcagatacatggaataacctgctcctggatgatctttgggtcaaagatgaaatcaagatggaaatgtaaaaattcctcaaactgaatgacaatagtgacacaacctatcaacctctgggatacagcaaaggtggtgctaagaggaaagttcatagccctaaatgcctacatcaaaaagttggaaagagcacagacaatctaaggtcacatctcaaagaactagagaaacaagaacaaacccagcagaagaaagaagatcagagcggaattaaatgaaattgaaacaaaacaac

SEQ ID NO: 217309 - DNA, 463 bp, Homo sapiens
caaggtttacatgaacagggaacttgtctgttttgtttattactgtatcccctatgctggcacatactatgtaataagtgtttgttgagtgcatgagtgaataaccattctaaaaaactctgatgtttaaagccctttgctttatataagaattttacttggaaccctggtatttttgtttgtatttgtttgttaataaatgtcaagagttcagtagtaagataggtttcagaaatgctaagttaaacagaataaagaaagaatatgtattacaggtcctggcagagccttgaatatgctaacatttgacagtgggagtctttgagaattatcacatgaagctgctgtacattacaacacattctaggaaatgctgtcttagacaaaaacctgtcatattagaattggggtaaggggcacgatactgaccgtgaggcagcagattcctatggactacattaaa

SEQ ID NO: 217310 - DNA, 344 bp, Homo sapiens
ggtgtgcagacactggagaatgaacaaggcagagaagaattttattgagtgacagaagagctctcgaaaatgagagggaacccaaactgggtagccctctgtgtgagagagggcccgaaagcaggtaaccatctgtgaggctgggttcagggcttttatgagctcaaagtgggagagtacatgctgattggtccatgagcagacctggtaaaagcactatttgactaaaaggcatagaggaagttctcactctagttgtgggctccaccttgaactggcagctcagttttcaggcttcatgctgtctttggctttaagttcaggttttactggcaacccatccc

SEQ ID NO: 217311 - DNA, 217 bp, Homo sapiens
aaactgatgttttttcagttctgtcttagggctagttagcagtgttatgagacacaaacaggaaggagtgaggtggaaaggtatggaaggtactgggcatggcagctgaagcttgcaaccccagcactgtgggaggccagggtgggacaactgcttgaggtcaggagtttgagaacagcccgggcaacatagcaagaccccatctccacagcaaatt

SEQ ID NO: 217312 - DNA, 391 bp, Homo sapiens
gcgtcgactttttttttattagtagtaatcgcatagggctctaaataatcttcaagaaaaaaataaaggaaagcactttgcttatatctaagaggctttataaaacctttaataaaatactgcagagataaaagatgttgctccaagaggcattctgtagttcacatactgcatttgtctgccagtgtttctggaaatcactgagtaaacactaagtgtatgtaataactagaaagaacttacatagcgaatcctcatatgaaggaaattaccaaatcttcagttatctctatttatgatttcatcttagatataggtgtctacaaactaacggaaagtgaatcacaattgacggctttggctggtcgacgcggccgcgaatttagtagta

SEQ ID NO: 217313 - DNA, 597 bp, Homo sapiens
tgaaaactctgaaccacatcggcgtctgataaaggcaaacatctggagatgccagtggcagatgcccaattatgctgagtctgatgaatggacacggagctatttggggctcagcagcaatcctcagctggacctgccgctaccgagggcgacaggcttccctctttccaggcaccatcctggccttcagagggctggacacttctgctcatccaccactagccccagccatcccaaccagccactgccacaagatctgctgccccatccccaaggaagaggagggccaggttaaattgattttctcattcacttttttatttcacagaaatatcatattttctataagaaagtgttaattataccacagacaccatcaaatggtactaagtgataactaaatgttcagaaggttgacgtgtatattatttcaagtagcttcgtgatttattgtctaatttagataaatggcaaatagtgatatcatgatagcccccttttattctggtttacgcctcattgtttctgggtatagaataaaatgaatcatcaaacagccccacgggaaagactggcagactggttaagggcataggc

SEQ ID NO: 217314 - DNA, 789 bp, Homo sapiens
ggctcccaagtagctgggactacaggcacccgccaccacgcctggctaattttttgtatttttagtagaggtggggtttcaccgtgttagccaggatggtctggatctcctgacctcgtgatctgcctgccttagcctcccaaagtgctgggattacaggtgtgagccaccgtgcccagccatctcatttaatttttacaaaaactcccttgaggagaacattattattttcccattttgactgagaattttgatgtttaaagggtatagttaacttgactaattttatatactaaagctgccattcaaccatttgaacaaatgtaatatgtaagcagagtccaccaaatgacttcacagttcgtgtttttcctagtagaaagcctcttggtatttaacacccaaatgtcctagaattcattatctctcaattcagtgtgttttggcagatcattataaaatacatatttacatttatgtcccagaaatacagccaaatactgcattttaaacaaaataatgtgtgagaagtctgtgttaaattccagatataattggtagactgtcagaatcacatgtcaacaatttgaaaggtgcaccaaatatcaacaaagaggatatgtagcatgttactacttgtagccactgttaaccttaggaatggtttttgctcaggaagtgatgttttcagcattttatatcctaacattggagtttgttacttttgtataggtgctttactgtgttttagttacactttaggaacttggttagttttttggggttgac

SEQ ID NO: 217315 - DNA, 492 bp, Homo sapiens
tgctcccttaacatataccaaaatatttgataaatgacacagtattttgaatttgtaggtggctggcttttcttttgcagaccacacctgttaatatcacctggccctgtcttgggatctacatgtagtcttgtcaccactggtcaattggcacatggttttccgaacatcagtcgcctgggacagctctgtaattacttgttaattacttgagtcgaatgattccgaactcatggtagttgcttcgccttcattgatcattcaccatttggttctgtgccagcaggatgcccggctgcttggtcacaggcattgcgcaagctggcaccgggatcgtggcctctttaagtcaacttctggctgagggaatccggcgacactagcccgcggagaagaagggctgaaggtggagcagggggacacgccgcgtcccaccagacgtacgccgcgacgcctgctggtggatattacccgggacctcaaagcggccgc

SEQ ID NO: 217316 - DNA, 611 bp, Homo sapiens
cacgtggcgcacgcctataatcccagcagggaggccaaggcaggtggatcacctgaggtcaggagttcgagaccagcctgactaacgtggtgaaaccctgtctctactaaatacaaaaaattagccaggtgtggtggcatatgccgataatcccagctacttgggaggttgaggcaggaaaattgcttgaacccaggaggtggaggttgcagttagccaagatcacaccattgcactccaccctgggcaacaagagcgaaactcagtctcaaaattccatctctaaaaagaaataattaataaattaaaatttaaaactaaaaactttataaagatcaacttgtcccaattttgtgattttaaaaagccatgttcagtaaaaacgaatctaagccattacttttctcagattctattcattcatagtcataaatcacctcctatgtttcagatactatgctagaacagtatcattgagtaatggcctctgtataatatgttttaaatattatattatgtgcaatgcaaaaaaagtttaaaaaggatttgtttactacattacctgttttaatatgaagtgggggaagaacattcacatgatgagggggcaa

SEQ ID NO: 217317 - DNA, 467 bp, Homo sapiens
atgttgagaagaaatttacccaatatcacagccatccagtgtcagagctgcctgacaagtttttgattccaaacactacaatcatacaggtagaagtcgtaattattatgtaactgagtattggggcctaaactcaatcccagtatctgaagttagggtctatcgggggaatgtcctgaaatgctacttctacatatttacatacagtatgttttgttgtttaggtgagatactaaaaaattcagaagtcagatttttacagggttttgtgcctctttaatttcagtttaagaaaggaggactaaattcagagactgtcagagttcatcctctcttctatttgatctgcacatacatcataatgccacatacatataaatatggcatacagtctacccaggggttctgcaactggggtccagactcccaaagggctggtggataaaaattttgggaatcccttttag

SEQ ID NO: 217318 - DNA, 601 bp, Homo sapiens
aaatctcttccaaaaaggagcctgagaatcatacatcaagagccgtgaaaactagccaggcatggtgaagcattcacgtagtctcagctactcaggaggctgaggcaggaggatctcttgtgcccaggagtttgaggctgcagtgcactatgattgggcctgtgagtagccactgagctccagcctgggcaacaaaatgagactgggtctctaaaaaacaaacaaacgtaaaggagcacgaaacctcactcatcctacactttcctttatgggaaagctcattggaaattttatgccccatctaaggggttccctgtagctgaaactcatgaattacctggttatgagatataagcttaatatgaaccatgaattcaataatgtcacaaatgaggcagttgtccctgggaaggctggttaatgtagagctgaactgggctttgaaaacataatttcttacaaacccctgacttctaggctttccacacctgcctgtatgtgctggtcagttaagaaacacaaaaggagatcagacataataggcacaacattaaaaacataataggaaaattacattggacttctataattttcattaaaa

SEQ ID NO: 217319 - DNA, 574 bp, Homo sapiens
gcgcagtgatggcttcgatcccacgtgatggggctttgcacacagttgtggatgtttaatgcgtgtagaataggttaacctgcttatctcaggcagctgtcagtaagtattgatgctgagccctgacaaagaggccgtttttattcctaggaagaaaaagagggagtaaactttgatcagaagcttataaacagtcattctttaaccagactaattttattcactaattgcagaaatgcccaaacaaacaagcaaaataaaaataaagacagaaagtgatggcctggtgcggtggctcacacttgtaattccagcactttgggaggctgagatgggcgggtcacttgaggtcaggagtttgagaccattctggataacatgatgaaaccccatctctactaaaaatataaaagttagctgggtgtggtggcatgtacctgtaatcccagctactcaggaggctgaggcaggagaatcgcttgaacccgggaggtggaggttacagtgagctgagattgcgccactgcactctagcctgggcaacagagtgagactctgtctcaaaaacaaaaaa

SEQ ID NO: 217320 - DNA, 354 bp, Homo sapiens
caatagagcatgtccatgagccacgctgctgcctacatcggcttctgggtgagttgttccctctgcaaggaacgttcctccccctcccatctggctaactcccatttattcttctcatttccacttaaaaacactaccttctctgaacagccttccataaaacataatgcagggtccccttgttagatactctccctgtagtctgccatcacagccatcattatatcccgatgagaccggggggactgactccctgccatggagcagagactaggtctgttctcctcacttctgtatccccagtgcctgggaaagagcctggaaccgagcagacgctcaataaatatttgtagg

SEQ ID NO: 217321 - DNA, 419 bp, Homo sapiens
aatgacctcagtttgtagacaacattttaagtaacactgatttaaaatattctctggggtaaataaatgtaagatctttctggcatttcagagttggagcttaccctcacacttctcagaaaagtaatgtaaataatactaatagtactgcagtgtaatgggccatcattcctgacctttaaatttgtattactctaggaggacattatcttatgaaaaaaatttgttgggtcactttctgtaagacactgctaggtgctagggacactaataaaaagatgtatatggaaaaatagtgactagtggtaaataagagtgcttgtaaagggatgtggtcatttagctcttgattgattgggtttagggtctttgtagaagagggagagagtattttgctggatactttattattttctgca

SEQ ID NO: 217322 - DNA, 425 bp, Homo sapiens
ccagcactttgggaggcccaggagggcagatcacgaagtcaggagatcgagaccatcctggccaacgtggtgaggccctgtctctattaaaaatacaaaaaattagacgggagtggtggcactagcctgtggtcccagctactcgggaggctgaggcagtagaaacgctggaacccgggaggtggaggttgcagtgagccgagatcgtgccactgcattccagcctgggcgacagagagagacttcatctcaaagaaacacaagatcctaagtggccattctgtctcttgccatggtctgctaaatcctcttcttactcctattggaacagccccaaccccacacttcttttcttctctatactcattcctttgaggatttcaactcagttcatggcctacagatgggtcctttttatgtcttca

SEQ ID NO: 217323 - DNA, 505 bp, Homo sapiens
aaggttaagttgtaggtaatgagttttcagataagtattatattatttcagtgaagagtagaaagaaaaaacattaaagtagcttataccagtagcttattcattccagcaatcttatcagagaggctctaaagggacattttgttcacaaacttagaaatttgcccatcatgatgacatttatgggtctagctttgtacttatcctcaaactagcaataattacaataatttttgagtgcttactatataccaggctttgtttaaagcacttttaatcatcagaataaacctatgaggtaggaattattttacagctgaggagactgagggttagagaagttaagcagctttctatggtcacacacgcacttcctaacagtattagtcagctaccaggtaacagtaaggattcaacccaggcagacaggctctcaaaccaatgccgtctccctgacttccttagatgtatgtttaggtatgaataaagaagaaatgtctatata

SEQ ID NO: 217324 - DNA, 261 bp, Homo sapiens
gctagtgcagagactgagttgggagtatgttcactgttcaaggaaaagcaagaaggccaatgtggccaagtcagagtcaacagggctgtgactaggacagtgcatgcagactgtgatcacataacgcctcgcagagcatggaaggagttggggtttttactctcactgtgatgggaagccactgggtcattctgagcagagacttgatgtgtctgatttacatttaaaaatatgcactctcatcacttagcatgttgggaa

SEQ ID NO: 217325 - DNA, 351 bp, Homo sapiens
ggaataatttattccattcctttcttgctactattttggaagccatgttcatttaaatctcctttatttaggctattgttcctctgaaagccttttacataagttgattacaatagagagtctcctagggtctgcctaagagacttgtgaatgttctagattttgagagcttggacatggtgaacatatcacggcattaatcttgcattaaggaaatgtagagaaaatttgcatatacctttgctgacaacccactgtgcaaatttgtattgtaatttaaaaggtgaaatagttgggtaggttttatttacattattatgagttactttacctacaaaaaataactgaatg

SEQ ID NO: 217326 - DNA, 387 bp, Homo sapiens
cgccattctcctgcctcagcctccagagtagctgggactacaggcactcgccaccacacccgactgattttttgtatttttagtagagatggggtttctccgcgttagccaggatggtctcgatctcctgacctcatgatccacccacctcggcctcccaaagtgctgggattacaggcgtgagccaccatgcccggtcctagcacctacctttaataagtccttcaggaaaggattacagctgcccctgtacattgaacacatggctagggcccacggacatgcagttttcaaccaaatatggacggaaaagaccggtgggatgcgaaacccactgtatatggagggcgatcgcctatacgtgggttctgcaaggcagactacaag

SEQ ID NO: 217327 - DNA, 382 bp, Homo sapiens
cgagcggccgcccgggcaggtactgctgtaaaaaagactttaggtgaaaataagttaccaatcagctcaccttaaaataaggtgatggtcttaggttatccaggtgggcacaaggtaattacatgggcctgaaacaagcaggagaggatggaaaagaatcagagtgatgtggatgaaagagtaggagagatgaagcagtggggtccgggggagggcagaccatggagattggatgcaggaaaagggttcaacttggcatcatgagctttgaagagggataagcagtcaccacctagggaatgtgggtggactctaggatttgggaacagtctgtagcttacagctagccaaggacacaaggatctcactcctattaccctct

SEQ ID NO: 217328 - DNA, 405 bp, Homo sapiens
ggtcaggctggtctcgaactcctgacctcaaatgatctgcctgcctcagcttcccaaagcgctaagattacaggtgtgagccaccgcacctggccttgaactaggctctgaaggatgaccaggagtttttcagatgggggaaagaggagcaaagcatcccagatagagagactactatattcaaaggctaagaatggtgaaagagcaaaacgtgttccagggtggctggccgtacacctgtctggcgttcaggacaggaggatgttagaggatgctgcagcagaatgcaaggctcaggtgtggttggggtcagatagggaggaccgtacacaaggcatcatctctagcttccttaggaacacattcccttctttgagaactgcattggcccctaatgagctgaag

SEQ ID NO: 217329 - DNA, 1667 bp, Homo sapiens
  misc_feature (861)..(861): n is a, c, g, or t
tgtggtggtgcgggcctgtaatcccagctacttgggaggctgaggcaggagaatcacttgaacccaggaggtggaggttgcagtgagctgagattacaccattgcactccagcctgggcaacaagagtgaaaactctgtctcaagaaaaaaaggtttcagtaagatgcttttgtgacttgacttagaagctgaaattgggaatttccttagatgagacagtacatagttcatctgtgatatcagatcagttcaccaatacatgctacatacttgtgcccctgaagctttgtaaaggcctaggacattccagttctcctcactcagtttggtgaacaaggacatgcccatgtcaagtacagtaccccatgagacactggctgagtggggttatgtgtcatttcccatgtcctcagtcagcagatcctctttggccagtctgcatctttcatgcaaggagagagcttcatacccacttcttggtaagcagggtcttcaaatgtcaaacgttctttggacagatggcttccagtccacagaagcacttcttctagtgcttccccttcactccccaagaggctgcttcttgactaatgactgtgggacctaacttggtcgttcaggtgacaaagaatgttccccaagtctgtagctgacaattgatggttctctctgaacagcgctttagggtgggcttttccccccactctttttagagacaaggtcttgctctgtcacccaggctagagtgcagtggcaccatcagtgactcactgcagccttgaatactgggctcaagccatcctatcccctctcacctcagcctcccaagtagctgggactacaggtgcacaccactgcantcagctaatttttaaattttttgtagagatagggtctcactttgttgcccggggtggtctgaaactcctggcttcaagcagtcctcccaccttggcctcccaaagcgtaaggattataggcatgagccactgcgcccagtctagagtgggctttttttattgtcctccaaaggtacagaggttgcttcatgagtcatctggtgaaaaggtatagaataacatcacctagaataacatcactgtccgcctgtgtccaggttcaaggtcctgccctgaaggtgacagctctacctgtactgaccaaacctctgtctgacctgttagcagagagaccgtcattccaggggtggggcttgtttcttcacagagccagggctgcaacacaaaaggtgtgataccaagtaccgtgggggcttcatccagacgcagagaacttctttgggtttacatggcaaataagtcaacctttctgtttcctaaagggtttcacaaaaaaaggcatctttgaatggcctcagcagtgctctcacagaagaaagtaagggttttatcattccgagaggcactggtgggctcctctactttcagttaggtggaaatggggtctctgccactacctcttcaccagtgttgcacagctgacccttggagagggtcagcatttccagcacacaccagccctggtgttagcttgaatctgtgcgacttatgccacacagttagaggagaggcctgcagttctggagaggagagtggcatttgaagttgctgggcgacagagcgagactctgtctcaaaaaaaaaaa

SEQ ID NO: 217330 - DNA, 172 bp, Homo sapiens
tgcatgtgtgtgcatccgtgtgtgcttgtgtgcatccgtgtgcatccctgtgtgtgcatgtgtgcatccgtgtgtgtgcatccatgtgcatccgtgtgcgtgtgcatccgtgtgtgtgcatctgtgtatgcgcatccgtgtgtgtgcatccgtgtgtgtgcatccgtgtgtg

SEQ ID NO: 217331 - DNA, 233 bp, Homo sapiens
ccaggtcggaaatccaggtactgccagcctctgccgttctacgtgtggccaggcgggggagcttcgccctcccatgtccctcaccccatgccccagacagcacggtcctgcgatccccctcccattccagtgctcagtatagccgtatccctgcaggctcaggcccccaccatggccagatcccccaccccaccttcaccctccgccagtccattgcacacatagcatctgga

SEQ ID NO: 217332 - DNA, 378 bp, Homo sapiens
taggttacagtgagctatgatcacactactgcactctagcctgggtgacagagcaagaccctacctcgagaagaaaaacaagaagtttctaatgtctatgctttggaattccagtgttgctaaaactttttttaaaaaattgtgcttttataatttttcattatggctccttgaaacaatttgagctggtcccaacttttgctgacaacaactctgaaccaggtattacaatgagattcctgaatgtttcaagaagaaaaaaatgttctgtcaaaagattgacaagattttggaatattcaaaggggtttatggcctttaaataccataagtctaaatgaaaataaaaatctgagttttatttatttaagtaataaac

SEQ ID NO: 217333 - DNA, 374 bp, Homo sapiens
tacaggcatgagccaccacgcccagccccaaaatgttttaagatggtttacaaggaaggagtacgctcagtaggagaagataaaatacgtgaaaaaagaaccaaaacatggagatgaaagaaaaacagcgcaggaaagggacagaatgaagaacagagttggcgtgctggtgttttccacaaggcttctgaagcgtgccaccgtccttacctcggcaccagggcggggcctgacacgtggtggatattgaatgaatgtgcgccgtgggagtgttgagcacggttctgtattcttaataggaaatggcaatatgttcttgtgcagaagacaattctgtcaatatgaccgctaaatcaaaattcagtattctaatc

SEQ ID NO: 217334 - DNA, 341 bp, Homo sapiens
ttctttgaatatctgatacaattcagctgtgaatccatctggtcctggactttgttctgttggcaatttttttttattatttcaatctcacagcttgttattggtctgttcagagtttctatttctttctggtttaatctaggggagttgtatatttccaggaatgtaaccaggttttgtagtttgtgtggatgaatgcgtttatagtagccttgaataaccttttgtatttctgtgatatcggttgtaatctttcccattttgtttctaattgagcttatttggatcttctctcttcttggttaatcttcctaatcatttatcaattttgtgtatcttta

SEQ ID NO: 217335 - DNA, 774 bp, Homo sapiens
tgatcaggggataacagggaatgacagacatgaatggcaagatataagggcgcagtgttataagatgccgacttgagagggattgtcaaaagagcattttgatggctaaatatgtaccagaaattgtgctaggaatacaagattccaagaggtataaagtgtaattctgacttttgaaagtcttcaaaaaaagtttatccaaattttcctccagatgatttcctctatagaatctagttttctttttacatagtaatcctttaaatatttgaagttatactttaatttattttagcattttatcctggaaaatttcaaatatacaaaagcagagaatccgtgggaccatcacccaataattcccaaaagtgactgtaccattttatacttccatcagcagttaatgaaacttccatttgaccacaccttccctaacacttggtattatcagtcttaaattttagccattgtagtgggtatgcctttctggttttaattgtaattcctgatgattaatgatattgagcactttttcactgcttattggccatagttttttgtgtgtcagttcactctgactagctggaatttaaatgtcttgcagccctgtgacaactctgggaattgtttagcttacagttgttcttttttcctttagttattctttgcccatcctcaaggaatcttaccctacacaggagctgtttagaattcaggctgaggctgaaggagagacctccttgcatatttctggaactctacttgttcctagtg

SEQ ID NO: 217336 - DNA, 261 bp, Homo sapiens
tgctgggattacaggcatgagccaccgtgcctggccaggtttccaacctttcttctgatgagatttcatttatagaaatcccctttcttaggaacggtggacagaaaagtttgtccactgtcaaattctgtgcatacagcctgatcagtgcttgtcaggtgattaatagtgatgacatccacttagaacttttcttctttagggcatcaagaaatggcttcgggggcgaaggtgggaggatcacttgagcccaggagttca

SEQ ID NO: 217337 - DNA, 104 bp, Homo sapiens
tcccaaagtgctgggattacaggcgagaggcactgttcccagccgttggcccgttttctaaagccacgtcttcctctgcgatcatccagaacaacacagattct

SEQ ID NO: 217338 - DNA, 634 bp, Homo sapiens
cttgatagcaagaaatcgcaagtttaagaatgtgaagtccaacagccctcattccgtttttctttgacccctcaaaatcgcacccatcctatcaagtaactttgctccgctgtcattgcctaaaatctttgggagggaggaaggaagcaggcttggtaccttgcagcagagaatgaaatctacagtttaccctctcaacctaattcctcttgcagatttcacaagtggtggacaccatcccctacataacactaacacttggccatacccatcagtgccacctccaagggacctaaagatgcctgggggaaattacggaacccaaattgaattaggactccttgtgtgtgttacaccaccccatatgctgggttcactggaacaggggagaaagagaagaggcaaaagaggaaaagttacttgcagactggagtcagtgtcacggccaccgtcggcgcggggcaaacctccccggccccggctttgtctgcctggcgggggctggcgtcggggcgcgacccggtccacgccgggcgccgcggggcgaggggcgccgagggcgggcatacggcgcacacggccaggcagtgcacaccgcgccgggtagggctcccccgcggcagcgccgagaagg

SEQ ID NO: 217339 - DNA, 751 bp, Homo sapiens
agttcacgatatgcacgcccttggcttcctccagcaccttccacgttctgagaactgtgcatttccttgagctttgcacagaaatgaagtaaatacttgtgcacccgtgcattttatttaaagttacctacaattaagatatgattgatcacttatatttcatactgggaggatgtgattgtactctttgttgtatgtaattgtatataattgcactgtttatttcaatgaagctttcttgaccgattttaacttcttagaagaattcttacatttctcttatttaccttagcctttgatcagtcttccagtctaaagtctgtgactttacctgttacaatttcaatttggaaaaagttatttcattaagtatttaatctttccacagaatttctatacagtagaattgtttgcttttagccatggtaatgtttgttgtaaaggcttccataatgcctgatggaagtgaatttgttttctattttagggtagagagaatagtatcagtgaattgactacaaaaggttaggcctctttagaactgtgtgtgttgtcacattaaattgaaatttgaataatgtcacatagccacaccacaacactacagacaagaagccggccggcccaccactcaccccccaggagaaaccgtgcaaaaacacccgagtgcgcacccgggcccataacagaaaggaacacgggccaagccggtcccaggagaaccgggcacaacacagcccaggaatcaccc

SEQ ID NO: 217340 - DNA, 1038 bp, Homo sapiens
ccatcagaaaaagtgccacgagttatccagagaaacctgcatttccgcggttctgccacctttgagtctctgtcctcaacattacatcagagaagctaccagagagcactcacactgttccagcctctgcaggttccccaacgatgtctgtgttctgagttttcctggtaagagtctccaactgcccactcaaacccaacaatgtatgttagagtccatttccattgatttcatcatgccctctattcctgttgatggcaatcacttagaaagtccaaggctctatagttatccctcatccaccagggttatccacatgtagctgtgttccaaatctatccccatagacccttggacctgccccctagaataacgatggtttcagttaatcccctcatatcctaaacttccttttgagcaacttttccttcacttgattgccctaataaaaattatattgtcttctgtaacagggactggaggtgaggaggtgtctctgttgctcctgattgtcttcccagatcattctctctccttccttcctaaaaacttccagctcctttgaagtatcatattatatatccaataaccttttttaaattctctctctctctcctttctcttttttctctctctctttctctcacacacacatatacccacaccttagtgacttccttatctatgtaaatgatcattccagtatcctggagttatattcctgatctcttattttcttttctctcttttttttttttattatagacaaagggaaacaccggtgtttcccttggtctctttttttcttttttttttttttggagagtggagttccgctctctcgtggcccaagcgggagttgcatgggcacgcaactctcagctcaccacaggcctccacctcccgaggtttcaggcatttctctttcctcagccctcccgagttagcgggtttccgggctgtgtgccaccacttcgggctatttgggtttttttaagtagagagggggtccccccatgtgggtcagccggttctcga

SEQ ID NO: 217341 - DNA, 284 bp, Homo sapiens
ccctggcgttctgctcaggtgtttttgtttaatgaagaacgtcaaacatctggcaaggtcggaatgattttgcgatgagcacgcctggattctgcggtgaaagcgacatgtgtgcgccttcacggcctcgctgtccctgcatcagcccatctcgtcaggcagatcaacatgaagctgtaaaacggatgacttaggccgggcgtcgtgatgggcgcctgtaatcccagctactcgggaggctgaggcaggaaaaccgcttgaacctgggaggcggaggttgcagt

SEQ ID NO: 217342 - DNA, 441 bp, Homo sapiens
gccccatgagccttgggtgggtttctcctcagccctagtgacccctaaaattacccccccgacccacccactgtcccctgatgcttcccccacccccggaaaaagctgtggcctccctctcatttggggcaggctgcctcctgttctctttttctggtgtttcagcaaggcaggccagtggaggtgaggtgaccagaagatggctaaagggaaaacaaaatggtgggcctctttttgggaaactgggccagggtttgggggccctgtgctggtggaggagagaagaccccagggcgatggtaggagacgaaagcttgggctgcagcgtaagcttggaggcccgctgcggtggctcacgcctgtaatcccagagctttgggaggctgagacaggaggattgcttgagcccaggagtttgagaccagcctgggtctcaaacca

SEQ ID NO: 217343 - DNA, 1048 bp, Homo sapiens
  misc_feature (871)..(871): n is a, c, g, or t
aatacgtttgtggtaggaacacatctcttggccacataggaaattgcattcctagatccttctctttgttctgagtttaatgttacatactcattgcactcaggaaactgtttaaaagatcctgggacagtttgttgcctggataagaaaattcagtgagcctgagttcccttccagactggagctccctaagggaggaaccatttcttattcatcattggtttgcattggctggcaacatgcctggcacataaaggcaatcaatgaaatatgacttaaataattgattaccattgccacaatgatagaggttgctgatgtgctgttattacagaacagggtaggctcccagctgtagagggccctttagggaccatgctgcctggagtggatcagacagtctcatctctgcttccatcaggccatcaccagggttctcagtcaggaatgcctgctgctgtctatatttgccatgcaataagattagacgaaggaaaaatggcccatttgggggctaccgctgtaccttaaaaattctaccattaatgtcactccctcaggatctttgttgctgttggggttttgtttatttgtatttttttgcaattacaggtcaatagagcttgggaacctgttagaaggagtcaaatcttaccaactcttcaatatgcaatatggctggctcacaactaatccaaagggtatgggactgagaagagaaacactttagcaagtaggcaggaaaggagacccattccagaccatgagaatagctccagttccttggtcagaaaggaatagtgctacatgggagtatgagtcctggagagggagtgtgcaccagaagtggcacccaggcgcaattctgcanccaggcgcacttctgcacccaggcgcacttctgcacccaggcgcacttctgcacccaggcgcacttctgcaccacaggcgcacttctgcacccaggcgcacttctccacccaggcgcacctctctctagtgatgtctgtgccatttatcaccccctcaccaccagaagtgcgcctgg

SEQ ID NO: 217344 - DNA, 428 bp, Homo sapiens
agtcttatttgctcagattcagttaaacctagcagcaaagtctcaggcaaaatggtaaagcagatatatatcctttttacggcttttggtctttttaacattctttttccctgtgtattctttctcttctcctatggttaacccctttttctatgtccctttacccgagacctaaaagttaatgtatgtaaggtttaatactattatccaatttttgttgttttgttttttaactaagactttcatttttgagacctcaccaaaaaattgatcccagcttttctactttctgctggccagtgtatcaactttttttttttttttgaggtggagtcttgctctgtcgcccagggtggagttgcagtgagccgagatcgcgccattgcactgtaacctgggcgacaagagtggaacttaacccccccaca

SEQ ID NO: 217345 - DNA, 450 bp, Homo sapiens
ataagctctggtgtacttcaatcctaggctgcagcaatttaaggcaaatttacttaatgcacatggaaagatctctaacattctagaagggaaaaagtcaatgaataccacagtgaaatactattcaaaactcatcagaaaggcaaaaagtaaaaagtctgtcaataccaagtattggcagggatgtggcgcaacagaaaccgcattcctacttatgggagcttaaccactttggtgaggttgaagaactgcatacactacagctctgcaattccatttctgggtatgtaccattcttgcacacgtgcacaaagagaatactgaaagcttttctaatagtaaaaaacaaaacaaactaacaaaaatactgggaacaaactaaatatccaccaattgctgaactgatgaacaaaatgtagtctatacatacaatagaatactacgcagcag

SEQ ID NO: 217346 - DNA, 173 bp, Homo sapiens
ctttgtttctaggtatccccctcgtttccagctgctctgctgttctttattctttattctgttctctatttttcagggccataatgattcaccttcctgcagcccaagttgttgcatggttgggaatgtgcttagagaaagaaaagaaaaggaaagggaagggagaagggatg

SEQ ID NO: 217347 - DNA, 509 bp, Homo sapiens
taggaattttttagttctattataatcatatgggacaaccattgtataagtggtccactgttggctgaaatgctattatgcagtttgcatgactgtactgaaagaaaaagctatccgtccaaaattcttgaccaggtgaaaataactttttatgttgtcattcctcccaccccaaatatcttcaaaggcaaaatagtgaagttttcagatataaaaaagctgaaagagggccaggtgtggtggctcacgcctgtaatccaaacactttgggaggccaagatggaaggatcacttgagcccaggagttccagtccagcctgggaaacatagccaaactggctatgttttatagactccatctttacgaaaagtcaaagattagctgagcatggtggtgtgcacctgtggtcctagctacttgggaggcaggaggatcacttaaggccaggaggtggagactgcacttaagcgcaggtgacagagtaagatcttgtttcttaaaaaaaaaa

SEQ ID NO: 217348 - DNA, 430 bp, Homo sapiens
aaatttaaatctacccgtaagcccaactaggtagatactgtcgtcattccctatttacaggtgaagaaatagaagctgagaaactaactttcccaggggcatatatttagtaaactggaaaacccaggcttctacccagtgagttcaaccactaggctttaattgctttcaggatcagagaagtctgttctctggtagctttaaactatgaacccaatacagagtgtcttcaaatttgggttgatatataaacgttatttttcccacagttgaggctgcaccgaggacacacttctggtgatgaatggcatatgagggtgctgggctgagtgggtggggtgacatcacatcacacccgtgacaaagagggagcaggtatttactgaagatacaggagccctgtgtcagggcagtaagcattcgtacataa

SEQ ID NO: 217349 - DNA, 610 bp, Homo sapiens
aaatttaaatctacccgtaagcccaactaggtagatactgtcgtcattccctatttacaggtgaagaaatagaagctgagaaactaactttcccaggggcatatatttagtaaactggaaaacccaggcttctacccagtgagttcaaccactaggctttaattgctttcaggatcagagaagtctgttctctggtagctttaaactatgaacccaatacagagtgtcttcaaatttgggttgatatataaacgttatttttcccacagttgaggctgcaccgaggacacacttctggtgatgaatggcatatgagggtgctgggctgagtgggtggggtgacatcacatcaattaattttgtctgtcttgaactttatataagtggaatcacacatatgtaccctttgagtgtgtcttttatttttggtacaatattgtgtctgtgagcctcatccagtgtgttgcatgaagcagtagttttgtctttgtcatgggtatatagtgttctgttgtgtgaatataacatttgtgatattgtgaaatatatttggccttagtcctctgttcttgacataaaactcctaaaatatttggtatcttcaaagtga

SEQ ID NO: 217350 - DNA, 357 bp, Homo sapiens
gatcaaggtggagaccatttccagcaccccgtagtctctgtgcccctcctagctcatacctctcagaggcaaccactgtcctgacctccagcaccatcaattaattttgtctgtcttgaactttatataagtggaatcacacatatgtaccctttgagtgtgtcttttatttttggtacaatattgtgtctgtgagcctcatccagtgtgttgcatgaagcagtagttttgtctttgtcatgggtatatagtgttctgttgtgtgaatataacatttgtgatattgtgaaatatatttggccttagtcctctgttcttgacataaaactcctaaaatatttggtatcttcaaagtga

SEQ ID NO: 217351 - DNA, 188 bp, Homo sapiens
gcattaatatttaactgtaaaacatttgtcaccaggcagctgtgattgcaagtagaggagtaatttcaaacaagaatgcttaaaagttagctatgccttgataaaataggtttatcattaatagattgcattcccatgacatgataagaccagatcaaggacagaccttacagaattgcaaacccatt

SEQ ID NO: 217352 - DNA, 594 bp, Homo sapiens
gtccatgccttcctttgtaccaaatgcctttagctcctgaatccttatttggttctgtggggcagatttgctgctgcttgtcagtattactctctgtagggtttcatcttcctccatctgtctccatatacattataatctaccttcatgaattaaagcttcagcttcatatatttcctggctttattgaagtttgttgatatttcttatttttcttgttgttctgtggtggaaatgtcattacactattagtttcttagtactgccataacaaagcaccacaaactgagtagcttaaaagagcaaaaatgtattgtcccacagttctgaaggccagaaatccaaaatcgagatgttggcagggccatgtttactctgaaacttggagaagagaatccttccttgcttcttctaccttctggcatttgctggcaatccttggcatctcctgatttgtagatgcctcacttcagtctttgcctccattgtcatatggctgtcttctcgcggtatgtttctttatttcttctcctcttcttataaagacactggtcatgtcatattggatttggatccattttaatgacctcatcc

SEQ ID NO: 217353 - DNA, 376 bp, Homo sapiens
tgtagcttatgttgtacccacaaagaaagaattgaaatttgacatttcagttatttcaaaaatgatctctttgaccttattttccttttattccagtctctcagatttcaccggcccttaggctatttgcttgacagcatctctgaagaaaaacatgttaagcttttctagtgagatacagctgatggcagccattgtcaaaagctatcagtggatttctttgtatcagcaaaatgcagttgacatctaacatggaacctgtgcattaatctttattcatacaaaatgttaaaatatttatacacttaattatgccttatcttgtccagtttgtccaagtatactaataaatttgaaaataatttcagttgattat

SEQ ID NO: 217354 - DNA, 471 bp, Homo sapiens
caccattggaaatataatcccctaaagttatgagtaaacaaatgatggtggggtgtggagggtagaaagaaggcctaagcttgatgtgggggccacagcctgggcaagagaaatttccagcaaagcctctgacaaatttctgacaaagcctctcatgttatctagttgtggcagaagcatctgaaccaaatggctaggaagcttggtgaacagtcagacccagtgagggttgattaatggatccatgtcagcctagactagagggaagtctccagcagtatgccttagggctcagtctgggcctgtgtcctctctgacatttttattgacaactgaccgaagcagcaggctcatcaagtttgcaggtgatagagctaggaggggcagttaatactttgcatgaaagagtcaggattcaaaacgatttcaacaggctggaacactgggctggaaccaacaagattaaactta

SEQ ID NO: 217355 - DNA, 183 bp, Homo sapiens
gaaaacttaattttgaaaaaatgtagcgcattctccttcatgatctattatttatgcagtggtaaagttgtatttgtgcctgactccatagtttgcaagatcggtaatctaatcagttgatctccatcctgagagcctttctttcttgttcccagctccctactaaatttccatgccccacac

SEQ ID NO: 217356 - DNA, 284 bp, Homo sapiens
tctctagccattctgtagctttgggaaagtacaatgtataccccacatactatctttgtttatgcctggaatttagtcacccaatttcttcaccagctcctactcattttttttttttttgcaatatatctgctctagaagctttctctaactttttcctattccattgcctttattctttctgcagagtgatatcaggggccacacatccccatggcaggcagtgcttagcttggcatagggcttctcactctgtttcctcacctgctttctgcatgtactgt

SEQ ID NO: 217357 - DNA, 443 bp, Homo sapiens
gtcatgaccatgaagttagttttgtgaaaattcaacaacagaaaaagggcttcatgcttacttttgcaaagcatgatgtgggaaacacaatgtgagactgcttttgagatgttttgtgttagatttatctaaaattcaaggccaggtgaggtggctcacacttgtaatttcttttaaggttttcttgagacagtcttgctctgttgcccaggccggagtgcaatggcactaccactgcagcatcagcctccccaagtgatcctcttacctcagcctcctgagtggctggtaccacagatacatgccaccacacctggcttatttttaaattctttctagagacgggttttctctgtgttgtccaggctggtctcgaactcctgggcttaagtgatcctctctcctgcatggaggactcttcagactcccgagactcctgggat

SEQ ID NO: 217358 - DNA, 244 bp, Homo sapiens
gtcatgaccatgaagttagttttgtgaaaattcaacaacagaaaaagggcttcatgcttacttttgcaaagcatgatgtgggaaacacaatgtgagactgcttttgagatgttttgtgttagatttatctaaaattcaaggccaggtgaggtggctcacacttgtaatcccagcactttgagaggctgaagcaggtggatcacctgaggtcagaagttcgagaccagcctagtcaacgtggcga

SEQ ID NO: 217359 - DNA, 434 bp, Homo sapiens
agatggggcgtctgagtcagctcgggctgccacaacaccagacactacatggcttaaacaacaggactttatttctcacagtactggaggctggaaagtccaagcttgaaggtgctggccaatcccgttcccggcgattgggcccctccctggcttgcagaggcctgagttcccgtggagtcaccacgcgcctttccttggtatgtgcacgtggagagatctctccttctcttataaggtcactaatccagccgggcgtggtggctcatgcctgtaatcccagcactttgggaggccaaggtgggcggatcacctgaagtcaggagtttaagaacagcctggccaacatggagaaatcccgcctctaataaaaatacaaaacattagccgggcatggtggcgggcacctgtaatcccagctactcgggggactg

SEQ ID NO: 217360 - DNA, 435 bp, Homo sapiens
aatgccaagtcccccacttgctgtgctttccctctcccataagcacagattctccatggtacataaccactgctggagagtacgggaggagtggtgttggtgattcaagacggtctttcctacctcttgagtgcctctttcagtgagaggaagtcaaaaccaggtactgtgattgcttacctgatggttagttcttatgatggtgcttttttatgtgtaggtagttgttaaaatgtggtattcctgcacaggggcatgattggtggaggcttctattcagccatcttgctccacctcagaactgttatattttcctgtttgagaatgaggcttcatgtttgcataaagaaaaagtttaaatgtataatttattttgacttaattcccatgttgtatttctaggttaaaaagtgaaactgtagggtactacaacca

SEQ ID NO: 217361 - DNA, 515 bp, Homo sapiens
gcagatgaacacacaacattactatatattttataagcacaactcagaacatatatcaagcttaatagagtatgaggtgggggagaagttggataaaacaggtgttcagaacaaaaggagaaaagaaagcttgagcaggattttagaatacttatcatgactatgtcccatgcactattaggaatggttagcctaattctctgcacttgaggtccaacaagcaaacaaaaccacttctattacacagcttgttagcagcaaaggcagaacttgaagcaaagttgcaagaatttctgttcctaattttattctctttttatattgcatactgcttttgtactaaatatttacataatatattcatgtgataaggatattgtaattcaattcaaatacatttattaagcagcaattatatgtaaaagattgattgtcttgggtgttcaaggacaacacagctagacgtataagccaaataaagcttggctaagtttggtctagttcaatttttttaa

SEQ ID NO: 217362 - DNA, 338 bp, Homo sapiens
  misc_feature (24)..(24): n is a, c, g, or t
  misc_feature (32)..(33): n is a, c, g, or t
  misc_feature (41)..(41): n is a, c, g, or t
  misc_feature (53)..(53): n is a, c, g, or t
  misc_feature (55)..(55): n is a, c, g, or t
  misc_feature (73)..(73): n is a, c, g, or t
tcccgctattgagggaaggaaggntgaggtgnnaggaaatntgagcctaggangncaggctgcagtgagccangattcacagcactgcactgcagcctgggtgacaaagcaagacctgtgtgaaattaaaaggaggtattcataaggacttaggagtgacacatttaagcaaagacctgaatgttgagaagcagctagccatttgaagatcttcatgaattccaggtagaaggaactgtaattgttaaatttctgaggtatgcctctacagttgatgttttgaaggcaattgagagaagatgaaattaataggggtactctatataaagtaatgggaa

SEQ ID NO: 217363 - DNA, 550 bp, Homo sapiens
cgtcccaagcgttccgggccgcgtcttccagagcctctgctcccagcggggtcgctgcggcctggcccgaaggatttgactctttgctgggaggcgcgctgctcagggttctggtgggtcctctgggcccaggagctgggagggctgcgccggcctctggagccccgggagccagtgccgaggtagggagacaacttccgccgcagggcgccggacggtcggggcagagcaggcgacaggtgtccctaggccgcagggcgcttccatagcgccatccccaccaggcactctactcgaaatcggaaagctcgaccttttgcgttcgcctctgccaagcctgttatttgtgctggccgctgggtctggagctgcgcttctcggcccctccccggtggagcgcagagggctggtctgcaagcgcggcctccagccccgcggctccccggcccaggagccaggcgcgggctgacccgggagcacccggcagcggagggggctggaagcggaccctaggcctctcctgtgccacccggccctaccgcgcggccgc

SEQ ID NO: 217364 - DNA, 345 bp, Homo sapiens
tggtgaccttcccgagagccacaggggcggcctcggcacccctccttccctcgccctccctgccgcccatccccaccaggcactctactcgaaatcggaaagctcgaccttttgcgttcgcctctgccaagcctgttatttgtgctggccgctgggtctggagctgcgcttctcggcccctccccggtggagcgcagagggctggtctgcaagcgcggcctccagccccgcggctccccggcccaggagccaggcgcgggctgacccgggagcacccggcagcggagggggctggaagcggaccctaggcctctcctgtgccacccggccctaccgcgcggccgc

SEQ ID NO: 217365 - DNA, 454 bp, Homo sapiens
gactccctgtcaaaaaaaaaaaaaaaaaaaaaaagaaaagaaaagaaaagaaaaaaaagaaatgagtgactatctcctgctgtcccctgtccctcatatctctcccctgggcagtctccatgtttgttcttgagttctccagtgcctgggtactcattacctgatgctttctcctgggtgtaggaatgccacgttgacccatcaccggggctacttggcctacccatcaccatccttaaagttgggagggccttacgaattagtgactacctgccatctctactaaaatacaaaaaaaattagccaggtgttgtggcacatgcctgtaatctcagctactcaggaggctgaggcaaaagaatcgcttgaacccagaaggcagaggttgcagtgagccgagatcgcgccactgcactccagcctgggtgacagagtgagacgagactccctgtca

SEQ ID NO: 217366 - DNA, 466 bp, Homo sapiens
gctctcactccagggagctcacactgcttaccttaaaatggcctaaagagctgctgctcctccggagggacatttcaccagccctggtagaaggtgccggccagatgcccagggcatcagcacccaggcagctccagacaggccagccacgtatgaccagtgtcctgcctcgcctgtgcttgtcattcgggagctgattgatttgtgtatttctttatttatttcacacatactaagtgctaagaactgtttttaaaagcttcatgaatattaaatcacttttttcaagatgatcaactctggtttggctaggctcccagtcactctctccttctcttgttcctgccatttgaatggctttttggcagaggactggcaaagcgtggggtgatggcagggtggcgtaagttgctccaacagcacttggtgagtctttggtggatggggaggttggaaatacctggag

SEQ ID NO: 217367 - DNA, 514 bp, Homo sapiens
ttatcagactaacatgcagcctatgcttctgataaacatttactttgtgataattttgaggaaatattttgagatagattctattagtatgtattttatagagagagtttccagctagtgtgttgagctcaaaatgtttctgtttgttagttgtcctagcatattggtgcttcttcacctcatcctttgagaattgctggggcttcctatttagaatggagctggctgggcacagcccattacatgcctgtaatcccagcactttgagaggccgaggcagtggatcacttgagatcaggagtttgagaccagcctggccaacatgatgaaaccctgactctactaaaaatacaaaaaaattatctggatgtggtgatgcgcatctgtaagcccagctactgggaagctgaggcaggagaatcgcttgaacccgggaggtggaggttgcagtgagccgacatattgccactgcactccagcctgggcaacagagcaagactccatctcagggaaa

SEQ ID NO: 217368 - DNA, 636 bp, Homo sapiens
aataacaaaaaatatttattcttgaatttaatttactaaactagttttggatatatgctacttttgtcccccttaaaccaaccagatgcagttatttgcatgagtattaatgaatagagcctatttgttgttagtaccagattttcaatccaggaagaaatgagggtttggggagagagactattaatgttttatgattacatactgtaattgtattaggttactaaaccagttaattatacaaaagattttgtaatctcagcaacaaggaataaagaaacagaaaatgagttagtattaaagattgtctttgttgggtgtctatttttgttaaaccttacaaatccaatttaaaaactaaactaacgcatacctgacaaaatattcttacatttctcagtctctactttagttgttctttgacccttttctccccaaagtaactattgcccaaattaagcttcaggagaaaacaaaatcaagaacgacaagcaacatttccaaaattatataaactttttggtccttaatgattttgaaacagagttgagaggccgtatagttcaacctacttttgtttttggtttggtatttaacttttgtttctctatctgcattctctccagattctgaaaa

SEQ ID NO: 217369 - DNA, 551 bp, Homo sapiens
gagaacctatgaatgtgtgccatgcatggccagcctcctccgtgagctctgcatctgcagatttaaccaaccacgactgaacacgtacagattcctgtcatgattctctaaataatacagcatgaccaccatctacacaggatattgcagtaggtattacaagtcatccaggatgtgcatagcttatatgcagatactacaccattttctatcagggacttgcacatccatgggcaggaggttgagtcctggaaccaatcacccatggattgtaaggaataactgtactattttaactactgttcaagttcagatttttcacttcagcctgagaggtactgtttatttaattgaaggattttcgatcatcattatattccaataacttgggacacagtaggcctttaaggggttatcaaaataactagttctttgcagtcttttttttttttttgagatggaatcttgctctgtcacttgggctggagtgcagtggcacaatctcagctcactgcaatctctgcctcttgggttcaaccaattaattctcc

SEQ ID NO: 217370 - DNA, 149 bp, Homo sapiens
tgctgggattacaggcgtgagccgatgcgctcagccaaaatgaaatcttttaatctgaaataagatgaatctgataagataaagacaaaatgacaccatgagagttcatgtaagagataaagccaagaagataagatgttaaaacagaa

SEQ ID NO: 217371 - DNA, 599 bp, Homo sapiens
ggtgggaggatcaattgagcccaggactttgagacaagcttaggcatcatagcaagaccccatcttttaataataattatagaattagagttaactttataataagtttagcacttaaaaagcagtatgttatttaatccttacaacaacccagttgttgctattgttattcttattttacaatcaaggaaataagtttgcagagattaaaataaagtgtccagagtcactcagtgacagaccctggacttgaacccagttctttctaagtctaaccctaaggtctaactgctacataactttaaaaaattataatattacatacattattaaaatatattagtgatataactaatatcactgagttttggctcaatgacagtcttaactatggtcattaatatttatgaggactctaaaggcctctctttgagcctaggaattctataataaacctcaagtagtgagcataaatgtatcttatttaaagatgtaaaacagcactcatgtttaactcatctgtgaagcaaaaaacgacccagaaaagcctttctttcctgactctaaatgagattctgaaaaatgcgttcgcgggcttc

SEQ ID NO: 217372 - DNA, 597 bp, Homo sapiens
tatcaaagttataaataactgagtagatcctgtatgaaattgggaacttccttttccataagataataaatgcctgcatcagggacatggtccttattctctttttgttccttttacttaaacttctcccttactggctgctattctatcctcccttctctaattacacatagacacatctatgcttccaccctctttctcctttcagaatgtgcttaaacacacttagtaaaaacagtccattttgggatatcattttctccttgcgcgggagtcttttaaggttttaggatgaagcattattgacaggtaacttgtgtcctttctaatcactgttgaatcatccctgcagtttctgtgtttattcttatgcctgatcacattcgataacaaagcttgtgcaaaatcaaaaacaaaaaggtcttgaactgcaatcaaataaaggggagctacctggttaacaaattttacaaaacatttattggaaaatatatctatcccatgagataggacacagtcaaaggaccacccactttctccattaacatgtggatagctgtctgcttcttactgcactttcattctctaaaaataacc

SEQ ID NO: 217373 - DNA, 775 bp, Homo sapiens
acggcgttcagtgctgaggatccagcacagccaagaggtgggctcgtcttaaggggctccctatgtagtaggggagatgggcagttaacacagagggtaatggctaaagagggggcgcttctctaaactaaaaccaggcataaaaggaccaacggcctaatgcggcataccaactggatcctcgttcaaacaaaccaactctaaaggtcatttctgacacaatcaaggatatctgcaggtggacaggtgatgtctaagaagcacagttaattctgttacgtgcagtagtgaagtgtggttatgcaagacaacgtcctttttaaaagagttgtatactggattatatagaggccaaatgacatgacattagacatttgctttaaaatatctcaggaataaatattcctttcagaggggaagggagaaaaagagagagaggaagccaaccaggcataatctcaataactgtggaagctgggtaatgagtatatggggctgattatgcattatgagtttgtgtatgtgaaaatgtttgtaatatttttgagagaggactgcaatacatcctggtagataccctcatggacatagctcgcataaaagctaaggaaatacagagcaaagagcacagaggatttgcaaaaccagaaaataaatctgccaagtttctgagtgttttaaatgccatttcatagtgaggtgagaagacatgttcataaataattacaatatagggtgagaaagggtaagtactgtagccccccctcatctcagg

SEQ ID NO: 217374 - DNA, 372 bp, Homo sapiens
atagtatctatgtcttattgctcaagatctaaactcttatgtttgggagtaggggtttgctgtgtatgtgtgtatttttttttaacatcttggcctcacagtgtaaagtgataagctcaggaggaatgttgtgctgcagaacgcctacattactagattacttacggcaacactttctttaatgaggatctctgtgaaaccatctttttttccacttacagtttcaataagaggagatcagttatgaaattaagtaggagagaacaatagagagagagagagttcagcattcctcttcaagctagctaatatttttaaaatgtcgacactgttccaggaactctgctttttaggccaaagattctgccctgg

SEQ ID NO: 217375 - DNA, 710 bp, Homo sapiens
cttggtttactaaatctctttctaggcaagtgcaagtgcaattcttcacaaccatgaagaactggacttgtacctcttctcttggagaagagatgagggcatcttttagatctgcctttcataagagagtgcaaattaatctgagcgacagaaggagaggattgcaccagatccagtttatctgcctctcaaatcttctgcatcacgcctgcccaagcctgagcaacttgctcttcttcctcttcggcatggccccaggatattccctggcataactgtgattgtctgcttgcttctgccatcacctcaccttctatcacatctatctcagcctcccctgaggtgatgagggcctggcctttgcccatttgctatcacttgcactgggacaggagtttcagtagctccagtgcccaggtacccctggatggattggctgtgtcttagaagctttgcagagtggcaggaagcacaacctggaagtaagaggaggttaacacatgcatattaaagtccaattttcgttgcacatcacaatccgattgagaaatggttcagtgttcttgcatagaacaagagaagatgacacttcagctcatgaggcacccacttaccaagttttttcacctttacaatttgctttaaacgctgaacgactgtggaatggtcaacgttgagtgctttgtcaacttctagtatagttttaagag

SEQ ID NO: 217376 - DNA, 496 bp, Homo sapiens
gtgtgatgaggtgttaggaacacaggaatcagctggtcaagtcaaatcctctacagcaggacagcacatggagtgtgggctctggaatctgaaattcctgggtttatatctttgctctgttatttattagatggatgacctagaaaccaaaaagtatctgagccatgtctgaatcagtttagagatttattttgccaagattaaggacatgcctggaagaaaggaacacagaatcacagaaacaatctgcagtctgtgcctttctccaaaggtgattttgaggtctttagtatttaaaggggaaaagtaggctggagggaaaaatgggaatgtatggtcacatgactgaatccacatgttgccagagaaaaggagcagataggggaatagtcaaatatgtattcttctcacgctcagtaaatcggggctttacataagataaggtgaacctagagtagctatctgtggagatagttaagcttttatctgtagctaa

SEQ ID NO: 217377 - DNA, 570 bp, Homo sapiens
cagatgatggtgctctgaggatgttggaattcaccattgcttcactaacagaccaccccaaagcttagtggcttaaaacagtgatttcttacttcccataattctgtggtttgactgggctcagctgggcagtgtttctgttccacatgctgcagactgaactcaatcgagcaggctgaggcaggagaatggcgtgaacccgggaggcggagcttgcagtgagctgagatggcgccactgcactccagcttgggtgacagagtgagactctgcctcataaaaaaagacttaatgcaccaactatatccgctcatccagttattttgtagggttcatgtgagagttaaatgaagttgaaagattggaattaaactgacatagtctggaatgcttagggatgtagcttctgtacaatttggaacaaaggagaagttaagactgcattttaaaatatcactggccaagctgaatcagagggactaactctagagaggagattccagaggcagtgagggaatatataatggaaatttattaaggcttagtgactaaacttgagggtgagagaag

SEQ ID NO: 217378 - DNA, 390 bp, Homo sapiens
gagcaggcagctgtggggtctgcatgacatgctgaggtgtcttgtctgccgggaggtcacgctggcaccatcttgggcagagctaggttggaaaggggctgtttgtcaaagcaaaacagacatatgcttgagctgtgttctgggatgctcttaagttgctcggagacaacttgatccctttgagttttgttttagcatttgctcggtgggaacacagcagattttaatgtaagattaataatattagttgacaatctccaatgcttggcaaggctgtagttggaaacgaggactcatacgctgtcagtaggagtggtagtaacatctatctggacatttatttggcattttctattaagggaaagatgtgcatacccttccagctgtagg

SEQ ID NO: 217379 - DNA, 423 bp, Homo sapiens
ctctttgtctttttctctcaccactctgatactctggtgtcttcagatgtagatcttctattctacttgaggttcactgagatgagcttcttggatctttagattaacatttttcatcaaaattttaaagttatcagccttggccgggcgcggtggctcatgcctttaatcccagcactttgaggggccgaggcgagtggatcacgaggtcaggagatcgagaccatcctggctaacattgtgaaactctgtctctactaaaagtacaaaaaattggcctggtgtggtggcagttgcctgtagtcccagctactcgggaggctgaggcaggagaatggcgtgaacccgggaggcggagcttgcagtgagccaagatcacaccactgcactccagcataggcgacagagcaagactctgtctca

SEQ ID NO: 217380 - DNA, 337 bp, Homo sapiens
tgcacccccctcccaccccacaccaccaccaagctgctgtctttctgagtcagcttctgtagggtaagtgttcacagctggtgcagctctttgggaaacctaacctcccagtgagctgagcccctggtgcggccgccacgcttgcttctgccccacaagggcagtaagcacaggacttctggatggatctgggagcctgccccttgggatttggcaaaacttcccatctccttagctacctgtccttaatcttatccctgacccctcgagggctttcaagatagcctctgttaacatcactaccctctgcctgtgtagaactttatagaaaggctag

SEQ ID NO: 217381 - DNA, 562 bp, Homo sapiens
agaaaaagttatatcaaacaaatacttgtcttgcttgggtagtaagagccaaataatacaggtatctttagttcaacagcggcacctttataagcttgtatttaaaaaatacttttgctttagttataattaatttccaaggctccacagacttgatggcaaactcaattgtctagcaaacctcacccatacagacatatttgagaattacagagagaaaaaaaaaagcctatgacaaatctaggcttcatagaggtatctctgagatgttgtctcagaatgttttgtcttactgaatgcacagttttaaattctaagtgaaggaatatatcgaaaatgtttaacaaagtacctgccactgtattatgtgaatttaaatgactgctcttattacaagtaggcatagtgatagtattgacaagtgacagtctaatgacaaaaagacaaaaatagcgaagcataaatgtaagaatgcaaaatgcttagtcacatgagatattttggcatgaacactggaagcccagtatgctttagtaatccctgaggacattgatatgcctta

SEQ ID NO: 217382 - DNA, 637 bp, Homo sapiens
agaggacccccaggtcttttcccctcaaacacacatcccatttgtatgtccttatgtcctgataagataatagcatgctgttagaagatttattgtctgagatgtgaatattcatacaaataaatttttcttgttcattttcacatttaaaaccattattttaagtggatggggaattggcttattaatggaatctcgctgaagaaggaacattggatgttctgtgattattgtggctcagtggtatatggaaccttgtcattgaacaggagtgttggaaggaactttcagatttttttagactagtaagggtatgattttgcacccaatgagatatttgcagtttctggagacatttttggttgttacaacttgaggggaagggagcggtgctactggtaggcatctagtggttagaggctagggatgctactaaacatcctataacgcacaagacagccccccatcccaaacaaagaattatccatctcagtagtgcccaggttaagaagtcctgctttggaatactgagtaaggagcaagaagatctgggctcttgtggcaaattttttcacttcagggcacctcttttcttcatttgcaaaatggagataaaaatattctccctggtcatctc

SEQ ID NO: 217383 - DNA, 293 bp, Homo sapiens
gaatggactaagaaaagactcaaatttctaaaatgagaaatggaaatgggacattactattgattttacagaaataaaaaggattgtaatgtagtactatgaaaaattctataccaacaaattgtataacctaatgaaatagacaaattcctagaaacataaaccataccaagataaatcatgaagaaatggaaaatctaaatagacttataactactaagaagatttggtgaatgtgaccaaacatttaaagaagaactaataccatccttctcaaacttttctgaaaagta

SEQ ID NO: 217384 - DNA, 226 bp, Homo sapiens
tatagctttataaagcgtaaatgaatttatatattttaactaaggtaccttctagttaacagtgcccatacattttagaaaatgttttagtctttacagaataagtaaggcaaaaacaggtccagaagtctatagctgacctcccctcaccacaaggccaagttgtttttgtttttgtttttgttttttcagaaagagtttcgctcttgttgactaggctggagtg

SEQ ID NO: 217385 - DNA, 408 bp, Homo sapiens
tggctcactcactttgggagagttcgggtgccatgttgtgaggacactaagcagccctatggagaagtgcacctggggaggaactgaggtctcctgccaacagccagcagtatcttgcccacctcatgtgagccattttggaagtggggcccctgtagagcctccagatgatggcagccccagcagacctctttactgcaacgcatgagagcccctgagccagaaccacccagccaaacagctcccaaattcctgacccacagaaactgtgagacataaagaacgttcattattgttttaagcctatatgtatagttatgcagcaacagataaccagtacattgggagagtatttagtctgcagtttttatggtcaaactgaggtaaataacaaaatcgtagggaaac

SEQ ID NO: 217386 - DNA, 740 bp, Homo sapiens
agcggacaggacggcttccgggatttggcggggcctttgtctctagctgctgcgggagctccaggtctagtctttactgctctgtgtattctgctcctagaggcccagcctctgtgactccgttatctgcaggtattgggagatgcacagctaagatgccaggaccacctggaagcctagaaatgggaccactgacatttagggatgtggccatagaattctctctggaggagtggcaatgcctggacactgcacaacggaatttatataggaaagtgatgtttgagaactacagaaacctggtcttcctgggtattgctgtctctaagcctcacctgataacctgtttggagcaaggaaaagagccctggaataggaagagacaggagatggtagccaaacccccagagtcttactgtgttgctcaggctgatcttgaactcctggtctcaagttatcttactgccttggcctccctaaagatgtgggattacagaaataatccactttgccaggctactatgtagcccttcatgtagaactgtgctagtcataatgaatcataacactgtcaccttttattttgaaaagtctttatttttatctgttttttaaagtacactaatcttgaatcaagtattcttggttaggaattttattactgcatcaaaatttgggaagttcttagcctttttcatctacaagtaacctctacattactttttccctacattcttctt

SEQ ID NO: 217387 - DNA, 1167 bp, Homo sapiens
agcggacaggacggcttccgggatttggcggggcctttgtctctagctgctgcgggagctccaggtctagtctttactgctctgtgtattctgctcctagaggcccagcctctgtgactccgttatctgcaggtattgggagatgcacagctaagatgccaggaccacctggaagcctagaaatgggaccactgacatttagggatgtggccatagaattctctctggaggagtggcaatgcctggacactgcacaacggaatttatataggaaagtgatgtttgagaactacagaaacctggtcttcctgggtattgctgtctctaagcctcacctgataacctgtttggagcaaggaaaagagccctggaataggaagagacaggagatggtagccaaacccccagttatatattctcatttcactgaagacctttggccagagcatagcataaaagattcttttcaaaaagtgatactgagaggatatggaaaatgtggacatgagaatttacaattaagaataagttgtaaaagtgtggatgagtctaaggtgttcaaagaaggttataatgaacttaaccaatgtttgagaactacccagagcaaaatatttcaatgtgataaatacgtgaaagtctttcataaattttcaaattcaaacagtcataagaaaagaaatactggaaagaaggttttcaaatgtaaagaatgtggcaaatcattttgcatgctttcacatctaacacaacatataagaattcacactagagagaattcttacaaatgtgaggaatgtggcaaagttcttaactggttctcagagcttattaaacataagggaattcatatgggagagaaaccctacaaatgtgaggaatgtggcaaagcctttaaccaatcctcaacccttattaaacataagaaaattcatattgaagagaaacccttcaaatgtgaagaatgtggcaaagcctttagtttattctcaatccttagtaaacataagataattcatactggagacaaaccttacaaatgtgatgaatgtcacaaagcctttaactggtttgcaacccttactaaccataagagaattcatactggagagaaacccttcaaatgtgaagaatgtggcaaagactttaaccagttttcaaacctta

SEQ ID NO: 217388 - DNA, 1145 bp, Homo sapiens
  misc_feature (49)..(49): n is a, c, g, or t
  misc_feature (76)..(76): n is a, c, g, or t
  misc_feature (138)..(138): n is a, c, g, or t
  misc_feature (155)..(156): n is a, c, g, or t
aaaaaaagaaggcaggtaaggtccggaattcacgggaacaggtctagtntattacagcactgtgtattatagcacnaaaaagacagcatctgtaaataagttataagaaggaattgggagaagcacagcaaaaaagcnaggaccaactggaagcnnagaaatgggaccactgacatttagggatgtggccatagaattctctctggaggagtggcaatgcctggacactgcacaacggaatttatataggaaagtgatgtttgagaactacagaaacctggtcttcctgggtattgctgtctctaagcctcacctgataacctgtttggagcaaggaaaagagccctggaataggaagagacaggagatggtagccaaacccccagttatatattctcatttcactgaagacctttggccagagcatagcataaaagattcttttcaaaaagtgatactgagaggatatggaaaatgtggacatgagaatttacaattaagaataagttgtaaaagtgtggatgagtctaaggtgttcaaagaaggttataatgaacttaaccaatgtttgagaactacccagagcaaaatatttcaatgtgataaatacgtgaaagtctttcataaattttcaaattcaaacagtcataagaaaagaaatactggaaagaaggttttcaaatgtaaagaatgtggcaaatcattttgcatgctttcacatctaacacaacatataagaattcacactagagagaattcttacaaatgtgaggaatgtggcaaagttcttaactggttctcagagcttattaaacataagggaattcatatgggagagaaaccctacaaatgtgaggaatgtggcaaagcctttaaccaatcctcaacccttattaaacataagaaaattcatattgaagagaaacccttcaaatgtgaagaatgtggcaaagcctttagtttattctcaatccttagtaaacataagataattcatactggagacaaaccttacaaatgtgatgaatgtcacaaagcctttaactggtttgcaacccttactaaccataagagaattcatactggagagaaacccttcaaatgtgaagaatgtggcaaagactttaaccagttttcaaacctta

SEQ ID NO: 217389 - DNA, 1040 bp, Homo sapiens
agcggacaggacggcttccgggatttggcggggcctttgtctctagctgctgcgggagctccaggtctagtctttactgctctgtgtattctgctcctagaggcccagcctctgtgactccgttatctgcaggtattgggagatgcacagctaagatgccaggaccacctggaagcctagaaatggtattgctgtctctaagcctcacctgataacctgtttggagcaaggaaaagagccctggaataggaagagacaggagatggtagccaaacccccagttatatattctcatttcactgaagacctttggccagagcatagcataaaagattcttttcaaaaagtgatactgagaggatatggaaaatgtggacatgagaatttacaattaagaataagttgtaaaagtgtggatgagtctaaggtgttcaaagaaggttataatgaacttaaccaatgtttgagaactacccagagcaaaatatttcaatgtgataaatacgtgaaagtctttcataaattttcaaattcaaacagtcataagaaaagaaatactggaaagaaggttttcaaatgtaaagaatgtggcaaatcattttgcatgctttcacatctaacacaacatataagaattcacactagagagaattcttacaaatgtgaggaatgtggcaaagttcttaactggttctcagagcttattaaacataagggaattcatatgggagagaaaccctacaaatgtgaggaatgtggcaaagcctttaaccaatcctcaacccttattaaacataagaaaattcatattgaagagaaacccttcaaatgtgaagaatgtggcaaagcctttagtttattctcaatccttagtaaacataagataattcatactggagacaaaccttacaaatgtgatgaatgtcacaaagcctttaactggtttgcaacccttactaaccataagagaattcatactggagagaaacccttcaaatgtgaagaatgtggcaaagactttaaccagttttcaaacctta

SEQ ID NO: 217390 - DNA, 1082 bp, Homo sapiens
acaaattcactggttatttaaaaagactatgcttgtaaatgacatatcatttttatactgcaactcacaagattctcttcttgtctgtgacttttgaaattgtgtttatatatgtgtttgttataaatatcattgtgtgtatcctaatttgttgagcttcttcatttgtacataactttttttttttttaacttttaggattttttagttatttatttttgtattttgcttatgtagtttgtgtaattttataaatttgatatgtaaaatatattcatctgagtctaggaagtggtgtaatttgttacttttatgtctttcagttatatattctcatttcactgaagacctttggccagagcatagcataaaagattcttttcaaaaagtgatactgagaggatatggaaaatgtggacatgagaatttacaattaagaataagttgtaaaagtgtggatgagtctaaggtgttcaaagaaggttataatgaacttaaccaatgtttgagaactacccagagcaaaatatttcaatgtgataaatacgtgaaagtctttcataaattttcaaattcaaacagtcataagaaaagaaatactggaaagaaggttttcaaatgtaaagaatgtggcaaatcattttgcatgctttcacatctaacacaacatataagaattcacactagagagaattcttacaaatgtgaggaatgtggcaaagttcttaactggttctcagagcttattaaacataagggaattcatatgggagagaaaccctacaaatgtgaggaatgtggcaaagcctttaaccaatcctcaacccttattaaacataagaaaattcatattgaagagaaacccttcaaatgtgaagaatgtggcaaagcctttagtttattctcaatccttagtaaacataagataattcatactggagacaaaccttacaaatgtgatgaatgtcacaaagcctttaactggtttgcaacccttactaaccataagagaattcatactggagagaaacccttcaaatgtgaagaatgtggcaaagactttaaccagttttcaaacctta

SEQ ID NO: 217391 - DNA, 1355 bp, Homo sapiens
agcggacaggacggcttccgggatttggcggggcctttgtctctagctgctgcgggagctccaggtctagtctttactgctctgtgtattctgctcctagaggcccagcctctgtgactccgttatctgcaggtattgggagatgcacagctaagatgccaggaccacctggaagcctagaaatgggaccactgacatttagggatgtggccatagaattctctctggaggagtggcaatgcctggacactgcacaacggaatttatataggaaagtgatgtttgagaactacagaaacctggtcttcctgggtattgctgtctctaagcctcacctgataacctgtttggagcaaggaaaagagccctggaataggaagagacaggagatggtagccaaacccccaggcagaactggccgtgaactgtggctcagggagctggaactgagtcatcgaactgcttcagaaaccacagtaaaggacaaggtctgcaggcctgcctgcgtggctataaatggctgtcttcctccaggcctctggaagggcacggtctctcccagactgtggctgggaggagtttgggatgattagagattatatattctcatttcactgaagacctttggccagagcatagcataaaagattcttttcaaaaagtgatactgagaggatatggaaaatgtggacatgagaatttacaattaagaataagttgtaaaagtgtggatgagtctaaggtgttcaaagaaggttataatgaacttaaccaatgtttgagaactacccagagcaaaatatttcaatgtgataaatacgtgaaagtctttcataaattttcaaattcaaacagtcataagaaaagaaatactggaaagaaggttttcaaatgtaaagaatgtggcaaatcattttgcatgctttcacatctaacacaacatataagaattcacactagagagaattcttacaaatgtgaggaatgtggcaaagttcttaactggttctcagagcttattaaacataagggaattcatatgggagagaaaccctacaaatgtgaggaatgtggcaaagcctttaaccaatcctcaacccttattaaacataagaaaattcatattgaagagaaacccttcaaatgtgaagaatgtggcaaagcctttagtttattctcaatccttagtaaacataagataattcatactggagacaaaccttacaaatgtgatgaatgtcacaaagcctttaactggtttgcaacccttactaaccataagagaattcatactggagagaaacccttcaaatgtgaagaatgtggcaaagactttaaccagttttcaaacctta

SEQ ID NO: 217392 - DNA, 420 bp, Homo sapiens
ttcccccattctttctttttgtgaaaggcaaaactcctcaaagtcataaactgttaagagagttaggtgccccaagaggagacgggagagcggtgatgccttcagggcagcagcagaagcaatggaaggatggatgaggaaccccacaaaggggagagaactctggagtctgtgaagagcggggagctgagacccaactcgttatgttacgggttgtgtgttgctggatccggcagagacagccttgatgtgtcacccaagctggagtgcagtggtgccatagctcactgtagcctccaactcctgggctcaagagatcctcccgcctcagcctcctgggcagctgggactataagcatgcttcaccacatccgacatttttaattttttaagtttaaaataaaaatgtgatgttttgta

SEQ ID NO: 217393 - DNA, 435 bp, Homo sapiens
agggtgtttacatgaccagcccccaggaaaaacccagggcactgagtctctaaggagcattcctgatagaaagcatctcacttgtgttgttacaactcactgctgagggattaaatgtgtcctgtgtgactctaccaggagagtctctaggatgcttgcctggtatcctctgggtttcaccccatgcatctttctcctttgctgattgtgctttgtatccttttgctataaaaaatcacagctgtgactatgattgtgctgagtcctgtgagtcttcctagtgaaccagtaagcctgggggtggtcctggagatccccaacacagtgggacctcagaggcctggatgccagagctggagttaaagccaccttttccagcttctcagtcacatgtttctcaggttcttcacatgaccccctccttcttctctttaa

SEQ ID NO: 217394 - DNA, 300 bp, Homo sapiens
tgaagaagagaagacatagctgtgtttgcagaacaggaaggtactcggtagggaaaggggactggggagggggagggaagaaggaaaaacttgtggctgcacaggtgggctgctcaagggatgtctaggaataagctgtgctgaaaactagaaaaaaaaaaagtcacctccagtggtccatctgatttaagttgaagaagatggccttgaatttaaatgataattgatataatgcatttcagcaggcattaactgtgagtctgctgtgtgccagcccccgcaccaggcacggaggataca

SEQ ID NO: 217395 - DNA, 501 bp, Homo sapiens
ggttcactttgttccacatggatttacagtgaccccagcaccgtttgttacaaagactgctcttttcccactgaattgaaacctttgttgaaatcagtttggtctgcttttggcttctctattctgttccattgatctgcgtgtgtgcctaccattatgccagcacaaaccctctcaactgcagctgtgtaagtcctgaaatcaggtagtttatctcatctttgttcttttttaaaacttttttagctattctaggacctttccatttccatctacattttagaattaacctgtcatttctaaagaaaaagaaggaggaggaggaggaggaggaggaagctgagattatgttaaacctatagaacaattgaggaaaactgacatcttaacatcactgagtcttccaatctgtgaacatggtttatctccatttacttagatacttaagttttaacctgccatgttctgtagattttgtaaaagtctcatatatcttatatt

SEQ ID NO: 217396 - DNA, 539 bp, Homo sapiens
ttaattttgcctctgtcctgtggtcctgtgatctcatcctgcctccacttgccttgtgatattctattaccctgttaagtacttgatgtctgtcacccacacctattcacacactccctccccttttgaaaatctctaataaaaacttgctggtttttgtggcttgtggggcatcacggatcctaccaatttgtgatgtctcccctggatgcccagctttaaaatttctctcttttgtactctgtccctttatttctcaagccggccgccgcttaggaaaaatagaaaagaacctacatgattatcggggcaggttccccgatataactagtttttcttgatatttgtgaaatcacttttgcaatccctgaaaatttagcaaactgcaccagtatattttccaaaaatgagtcttcacctccagattcatattttaaatcattcagaacaaatttattattattttcttgaatattttccatttcccattattctactgtcttctccaaagatgtcaattatggtttttcactatctgc

SEQ ID NO: 217397 - DNA, 246 bp, Homo sapiens
cagccaaattttcagctcaagaaataaaaacagggctcaaagaagtggtaactgctgtggaggaaatgacaagtaaaggaaaaccaggacaagaagtcttggaagacgaccaggaaaatactttaaaatatggtaatcaacaacacaagtttcttttgttgtagctgtggctgtttcgtttgtctttgaaatgtgatgatcaaaattttcaaaaatacccattaaatgttacccagctgtgttaca

SEQ ID NO: 217398 - DNA, 413 bp, Homo sapiens
aaatgcttatcatattatgagttccacagaaaagaggcttgaagtaatcttgtatcctagtaatttatttgagcctgcattaccatggaagcaggaatggaagtaaaggatgagttaggcaaaaaaaggaagagagaaaatacaagacatatttagctggctgtcacttcataatcacagttgatttcttcgtatgtgtttaaaaggagtctgtgaaatttctgtctctatccaagggaagaaataaaaagaatgtatatattggctctcatctttcattggtcagagttttcagggtgtcccctctgtgtatttctcaactatattttctagcctctctaaccagcccctggtgtagcaagatcccgagagagcagcaacagcacttatggcataagcagggcacattgaaa

SEQ ID NO: 217399 - DNA, 215 bp, Homo sapiens
gaatggaatcatctaatgtactcgaatggaatcaccattgaatagaatagaatggaatcaccgaatggaatcgaatggaatcatcatcatatggaattgagtggaatcatcgtatggactcgaatgtaatcatcagagactggaatcaaatggaatcattaaatggactctaatggaatcaccatcgattggaatcgaatggaatcattgaatgg

SEQ ID NO: 217400 - DNA, 129 bp, Homo sapiens
agtttccatgcctccttttcctttaaaatccctttggctaccctaaacatttgacatagtctttgaggcactagtccaccacctcctcaggttgccatctcttgaataaatctgcttttccttccacca

SEQ ID NO: 217401 - DNA, 529 bp, Homo sapiens
gctaaaatattacttaagtagatgtaaatttatgcgtagttttctgatttaaaaagtattatatgctcatgcaaaatttagaaattacaaaaaatataagagaacaaaaaaatatagtagaataagaatagtttttaaaattatcatttgatccaagcgttattaatattttggtatctttctagtattttacaccctccacacacatacaacatttataaattttgagtcatactaaacagttttatattctttttttctcaacgttatattgtgagcatttttctatgtcattatgtagacattaaaatatgtttttaatgacagcatatataagaatgagtcaagtgttttactaaaccactcttagatatataacgtttgttattccaaaaattttgccattataaatgatactgttataaacatttttatgcaaagtgttttttttttaccatattgcttattagtgtcataggaaataaaattactgtgttaaaaggaataaatattttaaaagcaaagatca

SEQ ID NO: 217402 - DNA, 340 bp, Homo sapiens
gggtagccactatcttttctcctaacaccacagattcatgttgcctatttcattttaattttatataaatgtaattgtacagtacatactgcttctttcttttgtgtaacattatgtttgaaggtagtttgttctcactgatatatagtattccattgcatgactataccacaatccatttgttcattctactgttgatggtcacctcaatggtttctagttttgggctatcatgaatagcgctgctgtggacacttttgtttgtgtcttctggtgcacatatgtacacatttttgttgggtgtatatacacatagagtagaattgctgcatcatagggc

SEQ ID NO: 217403 - DNA, 300 bp, Homo sapiens
ggaggtggcaggtgacgggttaggcccagccccctctggcctagccactcaggtacgaggcctttcccccccatcccccggggctgggatctcttttataaaaggccattcctgagagctctcctcaccaagaagcagcttctccgctccttctaggatctccgcctggttcggcccgcctgcctccactccagcctctaccatgtccatcagggtgacccagaagtcctacaaggtgtccacctctggcccccgggccttcagcagccgctcctacacgagtgggcccggttcccgcat

SEQ ID NO: 217404 - DNA, 484 bp, Homo sapiens
acgcccagctaatttttgtatttttaatagagacagggtttcgttatgttggccacgctggtcttgaactcctggcctccagtgatctgcccacctcggcctcccaaagtactgggattacaggtgtgagccactgagcttggcctaagaataggaagaatttgcatatgtaggcaggtattccaaatgtcagtagaagaataaaaaaaggcagaaatatgaaaatttactcattcatctattcaatcagaatttcttttttatttttggttatttatttgtcaccttattattttttgttttcttttctgaattgggatttcttaagcccctactacaggctgggcactatgctagaccctagagttttagagtccacttggacctgatcctcgcattccaggaaatttcaagcttagtagagggagcagttaagtaaccataaagatcctagagtattgtaaaagccatgatagaggtaatt

SEQ ID NO: 217405 - DNA, 458 bp, Homo sapiens
  misc_feature (344)..(344): n is a, c, g, or t
ggtttcattgagagtttagagctattcaataggtagcctcctatatgcaggcagttagttgtaagtcattcaaagaatgaaaccaacgagtagaagttaaatcactatactcattgggagcttaaaaaataaataaatatgatttaaaagatgatgtcaacacaggtgaaaaaggaaaaatattagaatctcctgaactgactagacagacatgtttagaagactggtcttctctggaaacaagtaaagctggcagagaaatccaaatatctctgtgttaaattatatactcatgagccaccacacccagccttatctttcattttgaatagtgagtcggattncatctagaatgcgtctctttatgtttattgccttaaccaaatattaattagccttattttatacatgtacaaatgttctaaaacaacaaaaaaggttgttttccccccttaaaa

SEQ ID NO: 217406 - DNA, 377 bp, Homo sapiens
agcgtgatttttaatttccatctttaaaacacctgagaaaaattcatgtcagctctaggttagtgttttattatgattgctttaagaaatgaaaataagaaaacaaacacattgacttcattgaaatagcagatatatctcagttattgtttaccaggccttacaaaagtcatcgtacacagttaatgcagtcatataattggaatttaccctttgaggcaaatgaaaaatatgcaagcaaagaaccaaaatagatacattaaaacttttggttaaaaaaaagaattatgaaaaccggcaaaaaaaaaatcaatgcatgctggtaaaatatgctaatcatttgtttgctcccacattaaaaaaaaaaaaaagatata

SEQ ID NO: 217407 - DNA, 627 bp, Homo sapiens
ttacattttctttatcagcttaattgtaaatcccagcccacataccaccaagctataggaaattccatctcaggcattatgggattgtcttcccctttttggtttacaccagaatcgggaggtttacatgatgctaagaaaatgaaaggggtctttgatttatagtcaccagtgatggtaatattgcctaaccttttagtggttgcttgattcctttacggcctccctgaatctcttggggcacagggcaggacctgataggagccagttaatggcccagattcttgtgcatcaggtagagtttccttcaaaatgtcgtatatcctcatgcgaactaaaaataaaatcctaaaattctaagccccccaactgactgaaaagacccctcttggctgggggaccccagagaaaccttaaaaactgagttcctagccatgacagaatgggagcttgtacacacctcattgcacccactctgttttacaacttagacacaacaactgaccagtgttaatgttaaaatggagatcataagactgacaaaatggactctttatggctataagatactaaattgtaaacaagacctaaggtcacgccaagcaagagttaagtcacatacccccg

SEQ ID NO: 217408 - DNA, 618 bp, Homo sapiens
gcatgatcttggctgactgcaacctcccacctcctgggttgaagtaattctccctgcctcagcctcccaagcagctgagattacaggtacccgccaccacacctggctaatttttttgtatttttttggtagagacagggtttcaccatgttggccaggctggtcttgaactcctgacttcagatgattcacctgccttgtcctccccaaagtgctaggattacaggcccagtaccatttgtgaaaatggtgtcctttccccattttatgtttttgtttgcttttcgaagatcagttggcttttaagtatttggatttatttctggattctctattctgttccattggtctatgtgcctgtttttgtgccagtactatgctgttttggtgactatggccttacagtgtagtttgaaattaggtagtgtgatgcctctagatttgttctttttgcttagtcttgctttggctatgtgcgctcttttttggttccatatgaattttagaaatgttttttctaattttttgaagaatgatggtggttttttgatggggattgcattgatttgtagattgcttttggcaacatggtcattttcacaatattgattctaccca

SEQ ID NO: 217409 - DNA, 393 bp, Homo sapiens
cgatgattcccttgccgatgaagaacatgaagtgtgagtccctagtgtgctaggctgtgtcctcgcgccctgtgcccccgcagcgggccctcagccggggtggggacccagcttgcgggcggcaggaggctgaggttgcccgtggccaccagatggcgctccagcattgtggaaggcaagccccacggtcctggcgtccggagtgcttgctctgctgaagggcgaaccaggaggctctcagaggagctgcagaggagcggcttgatgacatagaaggggaagaatacaagggaagtttgtaggatgcctgtaggtctgactgcctgcttccccctctgttttgacgacctcctgtgactatgccagcatttattattaaaatgtgtcctttga

SEQ ID NO: 217410 - DNA, 589 bp, Homo sapiens
ctacctggagaatgcccttccttctctcactgccagcagaaaacacttcctcagcctggcacggagcatgagtcaggtgagtccatgatgctttgtgatctatcctttgtcatctgttgttattgtgctctttcccatccttcaaggcttgagattcttaccaccccctccaggaggcctgactggattcttcccatccagaaaacattccctccttcccaagttcagcgagaagtggtcaacagggcaacactgtccaagtatgcccacctgggttcctctatttttcaagtccttagaaagcagagactaagagtcacaccacactcacaacacatcctgctcctaggccagaccctgtgggaggaacccagtacagcctgacaatggaagggggacccaagacggtccatgacctacaccagggcagacaaggccctgccctgtagctgagaagggaggaaggagccagtgctttacccagaaccccctccacaaagcactgtgcctatatgtttatatggcctcatttaatcctttcagtaacccttacatagagtgttatttcttttttttttttttttttttt

SEQ ID NO: 217411 - DNA, 425 bp, Homo sapiens
ttttgctaaagcatacatcaattgcctaaaatattagcagtcagtgcctgagatgagtgattatatattctggatggtttcctggactgactcttttccaagcaaatggctttgtcagatatttgtaatttctgaaatattttattaatgatgtcctcttgccagagggatggtccagagtacacaattagctgcatgcctcagaagcgagatgctgcccagcatccactaagatcaagcaggagttcaaggacacttctaatcaactgccatagagcagagaacagaaaatgtttttacaagttgaaggccgggtgtgtggcccatgcctgtaatcccagcacttagggggctgaggcgggaggatcacttgaggacaggagtttaaggccatcctgagcaacaaagtgagaccccatctgtac

SEQ ID NO: 217412 - DNA, 135 bp, Homo sapiens
aattacaaacttgttctttgaaagacaccattaagaaaatgaaaaggcaagccaaagactaggaagaaaatagtctcaatacatatatttgaaaaagaatttgtatctgaaatatataagcaattcctacaactc

SEQ ID NO: 217413 - DNA, 460 bp, Homo sapiens
cttacctgtgatctagaggttctgtgtagactgttaatgaatggcgatgcatgtaatggctgcctgtccctaacatacccaaataccccacacaagagtcagcactcattagaatgtcatcttatattcacatgacaccgatttgtctgaaatatttggagtgggatcaaaggaaatcttgtaatctagatccccttgggctactgaggatttctttttctatctaatgattacttttctacattgatgaaaaaattctagattcttctaaagtttataaatgtccattactttgtgatcttagtcatgtgcacttttgtcttattattattattttgaggcagggtctcagtcacccaggctggagtacagttgcagtgagctcggagggcgccacagcactccagcctgagcaacagagcgatactccatctcaaaaacaaaagggagagatgacaaa

SEQ ID NO: 217414 - DNA, 379 bp, Homo sapiens
tttttttgctttattgtcttttgataaacagaagcccttgattttaatgaagtgtaatttaatcagttttttaaaatgattgatgcagtcaggcgccgtggctcatgactgtaatcgcagcagtttgggtggctgaggtgggcagattacttgaggtcagaagttcgagaccagcctggtcaacatggcaaaagcccgtctgtactaaaaatacaaaaattaactgggtgtggtggcacatatctgtagtcccagctccttgggaggctgaggcaggaggattgcttgagcttgggaggtggaggttgcagtgagccaagatagtgccactgcactccagcctgggtgacagagtgagactccatctcaaaaaaaaaaa

SEQ ID NO: 217415 - DNA, 416 bp, Homo sapiens
taaaaaaatgttcctttgggaggccaagggggtaggattacttgagcccaggagtttaagagcagcctggacaacatagcaagaccctgtttctaaaataaataaataaataaataaaaataattagctgggcatggtagtgcacgcctgtggttccagctatttgagaagctgaggcaggaggatcattggaacccaggagggtgaggctgcagtgagctatgcttgtgccactgcactccagcctgggcgacagagcaagaccctctctcaaaaaacaaaaacaaaacgaagttctcttgtctctaaagtttctatagttcagtgtgatgacatttagaactctagaatgttgggtttgtcatttgtcaatgacacttaaatatctgtgtaatgggacagttccttccaaaaaa

SEQ ID NO: 217416 - DNA, 667 bp, Homo sapiens
aaatactcccttagttgatgccagacagtaatgctctatccgctaccttcttcttcattccaagttgtctcctaggtagacttacccagatcctctaattatcttattcctcatattcttataacattcagatatttcttcattccagacatctatcatgaaatgtaattccacatttctaaatgcttacttcttcttttaggtttccagtttcagtgactaacactatcattttttattagaaacctgagaattgctttaactttatttttccttctcactttcaatcacatataggaagtccatatttaattagtcaaaacctttgacagattatatatcctttatccataatatttctgacaacccttcactcttttcagagttcaccattcctttctttaccagaaatactgggattaagcagtgactatctgatcacatgcaaagagaacctcatcaggctaacagcaaacttctcagcagaaatcttacaagacaagagagattaggtgcctattttcagcattcttaaagaaaagaaatccaaacaagaattcatatcctgccaaactaagcttcataagtgaagaagaaataaatctttatcagaacagcagtgcaagggaattagttactattacaccaagtcttacaagagaccctt

SEQ ID NO: 217417 - DNA, 228 bp, Homo sapiens
aaatgttgcccatatgaatgcttagccagggatcaccagatagttattaaggatcttcagatagtaatgaatacttccaaaatgaaaggcagactgaaacaaactaaaaagaaacttggaaaaaatggaaacaaccaaagcagaagaaaattcaccgcccccagccccctttccaaatattcagagatctaagagattatagtgcatctatagaataagcacaccata

SEQ ID NO: 217418 - DNA, 225 bp, Homo sapiens
ggtcaacagaatactggtaccccaaagatgtgcatgttctgattgccccaaaagactctgcagatgcaattaaattaaggaccttgagatgagagaaattatcttgggcaattcaggtcagccctacataatcataagaaagtggaggtaggacaatgaaagtctgaaaaggatatgtggcaacagaagcagaggttggagtgctatgaggaaaaaaactgaaag

SEQ ID NO: 217419 - DNA, 579 bp, Homo sapiens
ctggccagcatggtgaaaccctgtctctactaaaaagacaaaaattagccgggcttggtggcagatgcctgtaatcccagctactcgggaagctgaggcaggagaatctcttgcacccgggaggcagaggttgcagtgagccgagatcctgccattgccctccagcctgagcaacagagcaagactccgtctcaagaaaaaaaaaaaaaaaaagcaatctgcccctccccatgaggtttcttttaacgtttctcagtattataaaagaaatacctgctgaggtaaagtcaaaataatcaaaatgactttaaaagtttcatttcatcctaatcttttttaaacgggaagataatatgctttctaaagcatattttaaaatgaacaggaaccacagcaagggaagttttaaaaaaaaaattacatccagcctttttatctataaaaacaaagcttgttacagaacaaacacgttcacagtaaaagaccactcgctgaggcacgaactgaagaaatgctactgtacttacaaaccgcttctagccacatcacatttggcttagatcacataaacgaaccact

SEQ ID NO: 217420 - DNA, 848 bp, Homo sapiens
ataccagtcatacagatgaggacactgaggcttagaaagagtaaatgtttttcccaccctcagccttagcaactttaaacccaggctgtgtgacttgagatttcgtggggttttttgtttatttcgctttgtttttgagacaaagtcttgccctgtcactcaggctggtgtgcagtggcatgatcttggctcactgcaacctctgtctccagggttcaggcaattctcctgcttcagcctcctgagtatctgggactacaggcacgtgccaccacgtccggctaatttttgtatttttggtagagacggggtttcaccatgctggcagggctggtcttgaactcctgacctcaagtgatccatcagcctcagcctcccaaagtgctgggattacaggcatgagctaccatgcccagtgagatttcgcattttaaactactgaccatttctttaaaaactgagtagagttcttagtgactgtaagtctggtagaatgcagcagcttccagatccattgtattttcttcctactgataacacttgccttttaacaataccttccactgagataatggcaaaattttttggctgggaaggatggctgtttatgtgaagtagcatactatcagaaaatgttgttttagccaaaaatgcgggataataaacctctcaaagagctcagtttcttgtttcttccatactgtaattcacattctcagaagatgacccttttgttcaaattgcaatggataattttagaaatactttatatatgtgatctggaaaagggatgatacagatttatgacttgggccaagatggacaaggaatgagcagagttgctgctg

SEQ ID NO: 217421 - DNA, 210 bp, Homo sapiens
ttccccacaactctatccccaacgcttttgggaaggctgataccttggaagacgtggagaaacacgttatgtgcatgaatgactttccaagcatggaaactaatacctgccctcacctcttatttttttcccatcagggttaaactatttggtattttcaaggtcaaaactactttcccttttgttagctaggttttgttgcaaaatttg

SEQ ID NO: 217422 - DNA, 516 bp, Homo sapiens
aagacagatcatggtgacagttgtacaacaacgtaaatgtacttaattacactgatctggacatttttaaagggttaaaatgatagaattttatgttatgtgtattttaccacaataaacacacacatacacacatattcagcaaactaggaatagaaggaaacttatttaacactaaaacggcatttatgaaaaactctgagtagggcatggtggcacatgcctgtagtcccagctactcaggaggctgaggcaggactgcttgatccccgggagttcgaagctgcagtgagccatgaacatgccactgcactccagcctgggcaacagagtgagaccccatctcaaacaaacaaacaaagaagttggccaggcatggtggctcacatctgtaatcccagcactttgggaggccaaggcaggtggatcacctgaggtcaggagtttgagaccagcctggctaacatggtgaaaccccgtctctactaaaaatacaaaaattagctgggtgtggtg

SEQ ID NO: 217423 - DNA, 310 bp, Homo sapiens
aagacagatcatggtgacagttgtacaacaacgtaaatgtacttaattacactgatctggacatttttaaagggttaaaatgatagaattttatgttatgtgtattttaccacaataaacacacacatacacacatattcagcaaactaggaatagaaggaaacttatttaacactaaaacggcatttatgaaaaactctgagtagggcatggtggcacatgcctgtagtcccaggcaagtcaggcgctgactcgcctgggagaggggagagcgagatgctgtagagcacatgacaaaataaaataaaat

SEQ ID NO: 217424 - DNA, 498 bp, Homo sapiens
ttcatggtagaaaaagcctggtagcattgaagaagagattgttgctagaaatatggatgttaaaagcaattctagtgagggctcagatggaagtgatgagaatggttgagaaagcttctataatcttagagaatatatataatcatatatatagaaagaatgttgctagaaataggaacattaaaggtacttctggtgagaccgtagaaagaaatgaggaacatattactggaaactgagcaaaggtgattcttataaggcgtcagagaacttggctgctgttgggcaaaaagcagaattcaagttggatgtttagctgaggagatttctaagcaaaatatggagggtgcagcctagtttctccttattgcttacagtgaagtgcaagaggaaagagataaattgaggaaggaattgttaagcacaaaggaaccagtactttatgatttgggaggttcttggtttctctgttgagaaagcacactgtggagagagctc

SEQ ID NO: 217425 - DNA, 445 bp, Homo sapiens
ctactctatcagacatggctcagaaatgctgcgtttcaatcactgcagggctgaaactcctcttcctgacacacaatggggggatttcatgagtgttctctgctttccccttcattctacagataaggaagctaagttccaggtcaaggtcagggtcccatggaaggccagcagcatggacgggtgggtgagagcagggctgtgtggatggagtgccgtgctgccactctggccaccacctcccagctacgtgtgcccctgggcatgtcagctctcctaaccttagcttcctcccccatcagatggggataataataatacctacgtcactgggttcttacaaaaatcaaattatgtgagcttacaacactgatgtgtcaggtaccattctaagctaaaatcatggcattctaatgatttattatacataaagcgttcagtgttc

SEQ ID NO: 217426 - DNA, 284 bp, Homo sapiens
ccgctctggccgagctcgaggagcccttcagtccgccactgtgctgtgggggcccctctctggggctggccgaggccccagccggctccctctgctagggaggagatgtggagggaagggcactggcgggagcctgggctgcgctccgctgggcttgatcctggacaagctccctctgagctgctggagtgccgggctaggtgccacaaagtcctgtagcgagtgccattgagaggtgaagcggctgggcttctgggtctggtggggacctggataacttttct

SEQ ID NO: 217427 - DNA, 427 bp, Homo sapiens
gcatgcaaatacccatacagttgtccctcagtatctgtcagggattggttccaggacatcctgtgggtataaaaatccaaggttgctcaagttcctgatataaaatggtatagtatttgcatataacctatgcatatccgcttgtatactttaaatcatctctagattacttataatacctaacacaatgtaaatgctatgtaaatagtcattatactttattgtttagagaataattacaggaaaaaatctgtatatgttcagtacagacacaacattttctttttttgagtatttttaattcaccaatggttgaatctgcagatgtggaatccgctgatatggagggctgacccgatatcccaaacgaattttaaaacatttttatggcctcattatctttttcaaatatatatttacccattgt

SEQ ID NO: 217428 - DNA, 1095 bp, Homo sapiens
tcgatagaagtatacaatttttgaatagtagagggaaaaataaagacaagctattaagttaaagcaaataatccaaatagaaaactgaggtttaagaacattaattgaattcatcaagggtagtaagaaactatatgaacataggattttgtgttttccgaatatctctagtccaaagccatcactatgtataaaataagatgttaattacagtttaatattcttgtaagtttaagcaaatttaccatttatacgtgatttatacaacatattacctcttgaatattgtctcaaatgactggcttcaagtagcacgttaaataaaaatagtagaataaatgtgtcaagctacacttactattcacaattattttatagttagattatggctctgttagatatacaattttatatttgcttatcttctgaattaatgttacagtaatagactacagtcatcatgcaatgtgttgtcaaatatattaataaacataagaaaaaacatagtaatatactgtgtcaaatttttctatcaagtggaaatttagcacattcttcaggaaatattgactgcaaaatctatgattaatatatttttcagaaatattggatataaatacaaaatgaagtgatgaattattgatatgtgcagttttactatcatataatgttactgataaaattaaaaaaatataactcatttttagcatcagatgaggaaacttggttcactaaagttagtattatctttatttgaatgctacaaccttgaaaaattattacatttgatagaactatttgggaacagtttgttacttctcattgtgactatggacattaatgggatgcccatattccttccattcccttttcttagcatagtggaaatgattacagatatcagttatgtttcttgactgatgttacagtcattccgcattatgaagtatgcaagactaaatttttacaaagggtatctcttatccttatgatagcctaaaaaggtgaaaatttgtcaagcaggtttcctaagatcctataaaattaggggacagggttccagcatcaagatgtagttttacttattgaattaac

SEQ ID NO: 217429 - DNA, 472 bp, Homo sapiens
cacattaccttactcatttcttctgctaccctattctcagtaaatgtgtttcccaagaaaacaggaatcccccctcagactttgcttctagaccatccactctaaagtcttaaccttgcatgcatgttttcttctctctgtattttacatgtataacgtgatcaacccacggagttattagaattcttccaattaaatgagatatagcagagaatgagtctattttattggctagcaaatagcaaagtgttaaattcaataatggctgaaattgttaccaagtagtaggctcttttattagcttatcggactaccaaaatagtataatgcatcaatatcaaacttaaatttcaacttcataaaacaattctgggcccaacaaatatgaaggtattgctccatcttatgtagcaacatcttgtatttctattgtttgataaatattccacttagaactaaaacatggatgtct

SEQ ID NO: 217430 - DNA, 436 bp, Homo sapiens
ctaatgaacagaatatggcaaaagtgataggatgtaggatgtcacttctatgattaggctccaaaagattgtgacttctgatgtgctagttctctctctctgtcactatctcttgccctcttctttgctccctctgatgaagccagctgccacagtgtgagctgccctatggagaggcctctatagcaagaaagtgaggccttcagtccagcaaccctcaagcaactgaaacctgccaacaaccacatgagtcagcttggaagtggatccattacccatcaggctttcagatgagaccacagccccggctgccaccttgattccaacttcatgagagatccagagacagagaacctagctaatctgtgactagattcctgactcacagaaactatgagataataaatgtctgttgttttaagctgctaaattctag

SEQ ID NO: 217431 - DNA, 618 bp, Homo sapiens
ctgtttgcaagggaatcaaagaagtaggatatgatacttcctcttcttgacagccttatggttaaggagctttcccttttctgttccggacggtcatcaccatgttcctgttggaaggtgctgcttctcaaggcagcccagggcgctgcagagcagttctagacagccacaagtcctttgcacactgaaccgtcatctgagcctctcctgtttggtcaggtgctttcccattcagtcaccttgctctgaaacattgcaactgtcagattccttcttcccatatgtctcctggatataggtaattttataaaattaaattttgagagattcctcttaagaaaaaaaaaaaaaaaataaaaaaaaaaaaaaaaaaaaaacaaataaaaaaaaaaaaaaaaataaaaaaaaccaaaaaaaccctaacaaaaaaaaaaaaggccaaaaaaaaaataaaaacaaaatatcgcgcccaatattgggcttcttgggccaattcccccttatggggctcgtttacaaataacgggcccgggtttaaaacagtttgctttggaaaacccgtggggtcccaaatatatcgccttgggaaaaatccctttttgcccggtggggcgcccc

SEQ ID NO: 217432 - DNA, 178 bp, Homo sapiens
agccccaacttgccaagcatgtgaacaagctaaactgaaagcagatcttcagccccaatcaagccttcagatgacagtaacctcagccaatatactgactataacctcataaaagaccctgaaccagaaccctctaagccactctcaaactctaccccacataaactgtgaaataata

SEQ ID NO: 217433 - DNA, 496 bp, Homo sapiens
tgctatatattgttttatacattacatctgagtgctttgcctttgtgtctttttacaacctaatgtaagagccttttgttcctggcttagaggaatttaacccagtggataaacttacctggactaaatagttgctgaaaatgcatctgtaaatttaaacttaactgtaaattttattcaattcctgaatatatactttcttatgtatttattatttatttttcacttgactaaggtattatcaagcgttttaaatacctgctccatatttgaaaatatgttgtatttgcctccacaaatgagaagtaatttggattaatatgtaaactcacttatcctttataactattgccacagtatattactgtgtttgcaaagtctagtataatatgtgattctctttcctttgtatgatctctccactttaagaaaacttgtacatattatctttcacaaaaaatgctccaaatttctatacattaaagttagaaagtta

SEQ ID NO: 217434 - DNA, 466 bp, Homo sapiens
gaacacttaggagtcacctcagacaaaccagacccacccagagggtcccccacctccccacattcccacctctggtgttgctctttccaccactgttctctcagccaactgcaagccctgtgataaacccttcctcccagtggaattttgttttcttgtctttgaaatagaggttgctgagcagcatcggcactgtccaatagaaatataacagcagccacgtatctcacttaatcttgtctatttatcacatgagaaaaagtgaaaagaaacaggtggaattaattttaatagtatgttttaaccaatatgcccaaacaattgtcatttcaacatgtaatcagggccaggcctggtggctcatatctgtaatcctagcactttgggaagctgaggccagagaatcccttgagaccaggagttcgagaccaccctgagcaacaaaataaaactccatctctacatt

SEQ ID NO: 217435 - DNA, 595 bp, Homo sapiens
ttgacctcccaggctcaagcaatcctcctgcctcagcccctcaggtagctgggattataggcacacgctaccacgcctggctattttttgtatattttgtggaggtggggtttcaccgtgttgcccaggctggtctcaaactcctgagctcaagcgatctgcccaccttggcctcccaaagtgctgggattaaaggcgtgagccactgtccctggccaagactctgggtttagtaagcctcttgcaactcactaggagtggatttctaggacctccccactttcttgcttgttgtttcttttgctagccgtaagtccctggagtacactgggtactttatgggaaaaagaggaacagtgtgggacagactttgccctgggctgcttaacgtgatgtggggaacagaggtgataagagcctgtggcagctcaggcagccctgccatgacctggagttggggaggggtatcaaggataacaagtcttatacacatgccatgctgtttctttggatcaatagatggataatttttaaaaccccctgtatgtatcaaactcactttggagatgtaaggcatggcctctgtcctggtgac

SEQ ID NO: 217436 - DNA, 324 bp, Homo sapiens
aataaaaatttttaaaaagtgtgacagttgagctatgttaagaggattaagtattggaggatgtggctgtctcatatggggggttggggttgcagtatattctaaggcacatggaatctggaaaaggcattgaaatgagtaaatgttaagagatttcagctttggagctatgtgttcagacacccacagtttatacagcttgagtggtggccctttgatttatgctgtttttaggcccctctagtaggaatcaaaagtgttttttactttttaagactcaactggagccagcgtgaaacctacccctctaatgtatttgcctgg

SEQ ID NO: 217437 - DNA, 351 bp, Homo sapiens
acaatatatattatatatattgtatatagtatataatatatatttgagatggagtctggctctgcactccagtgtgggacatagagtgagactctgtctcaataaataaatgaataagtaaataaataaataaatatggtccttggttgcagtacccaggtgctcggtaaaagcaagcacacatgctctctgcaagagtgccttcagcctaagcctcaaggaattttcatgaaatacaagctcacacacaaagcaataaaaggacaaatctttgagaaaatgaatgaagataaaagtgagaacactagaatgggaattttttgttaaatgtcataactataggtaatgcag

SEQ ID NO: 217438 - DNA, 467 bp, Homo sapiens
caaaccaggcaggcaggccaaattagtcagagcaatgtttgctggccactataacaagcaacccaaaatctcagtggcttaaaataaaacttacgtctttctcattcgaagtcattgtcccttcagtggccctacttggttggtctcctccgagtggtaactcagagataggagctgcttccatactataactctgccacctggaacatgtgggttcctggattcccacaggaggaaagaagagagtagtgtcttatggtcaactctggaagtggccagcgttccatctacacagcactggtcagaacacggtcataggctcccaacatcacccataagggagtctgggaaatgtagtcttttcaggtttccaacaagtgggggccacgcgatgaggaaaacaaggagttcaattctggacaaatcaatcggaatcgaccactcttgtcacacaggagcacacaatc

SEQ ID NO: 217439 - DNA, 779 bp, Homo sapiens
taatcttctgccccaggcatctgagagttaaatgggtttgaaatgtttttaagctttttttggccttggatctgacttaggcaaaacagaagaggagtgccttgtgtcagtcagactccagacacattagaacagacacacacaatacattttgaatgaggtctccagcagcttctggtaggcacttaaggttagaaaacattgtttaggaaaagaatagaatataaagcttagcggttggttgtagaaggttcttgctgctggatccactcagctcctgggcagttggtggggggccagcctccagctgaccagtgagtgggatgctgggctggagctgctggtattatgttaggaaggttattcctgagaaattcagatacttgttgactgaattggtatgatgcttatagtctttcttaaatgattaaagtttaacatattattaaatttaaaaatattgtgaaataatacttcttgtagaacatttagaccgtaaaagtggatgtgaaaaattatccattgccgggcgggcacggctgcacgcctgaaatcccagcactttgggaggctgaggtgggcggatcatgaggtcaggagtttgagaccagcctggccagcatacaaaaaattaaccgggcatggtggtgtgtgcctgtaatcagctattcaggaggctaaggcaggagaattgcctgaacctgggaagtggaagttgcagtgagctgagatcatgccactgcactccggcctgggcgacaagagtgagactccatctc

SEQ ID NO: 217440 - DNA, 805 bp, Homo sapiens
  misc_feature (232)..(232): n is a, c, g, or t
cttcgacggtgttctgttataatttgactattagatattctgggatcttactgatccgaatgtgtccaattcaattgacattttccaagtataaaccactgttaaagagttgcctatttttattcataaattatacttagtttgttagcatggccaccaaaatagccaccaccaaccccaactgtcctgtcccattgatcttcctaaaaaacactttactaatcatagcctncagaccaggcccttggacaaataagaaccatgttctcgaccgggcgcagtagctcacgcctgtaatcccagctattctggaagctgaggcaggagaaccccttgaacctgggaggtggaggttatagtgagctgctggtattatgttaggaaggttattcctgagaaattcagatacttgttgactgaattggtatgatgcttatagtctttcttaaatgattaaagtttaacatattattaaatttaaaaatattgtgaaataatacttcttgtagaacatttagaccgtaaaagtggatgtgaaaaattatccattgccgggcgggcacggctgcacgcctgaaatcccagcactttgggaggctgaggtgggcggatcatgaggtcaggagtttgagaccagcctggccagcatacaaaaaattaaccgggcatggtggtgtgtgcctgtaatcagctattcaggaggctaaggcaggagaattgcctgaacctgggaagtggaagttgcagtgagctgagatcatgccactgcactccggcctgggcgacaagagtgagactccatctc

SEQ ID NO: 217441 - DNA, 511 bp, Homo sapiens
tcctacacatgttgtctattctctatgcaaatttgctaaatttggaataatttttttctgtgattttttttttgtggtagttctgtttcgttagcaaaactgctttgattctcctttattgtacttgaaaaacaaaggtggcgttttaaattaagtattttacttgtttttccatttgagtaagggttttaaatatctagcaattttacggtaatttttttttcaatttcctttgtctgtatagcacaggtaagtattgcaagtcatttaagtataacacaggtgtccagccagtagataggatctacttgtagatatctgaactggctgtagttgttactggctttcttttttctactagaattcccagtcaggaaagacatatgatgtgtagtggtgacctttgtccttctatggtcaagatttaaacattataaccagtgtttctttcttgttctctgttctttggtgatattgggactttcagaaaataagaaataggtcttcctca

SEQ ID NO: 217442 - DNA, 357 bp, Homo sapiens
aatctggtcatggtactgttatttaaaatgtgtaacttttcaaactgtattgttaaatttgcaatattttagaggttgtggtaaaatttaacatgcaaaattgctttaattgcaaaatattgctttacagaatgatattcaaaaacattcagagttcataaatttcaacaaaaattaatgccagtcatgctttgtttctgagtttagtagattagtacaccacgtagtatcttttgggattgagtctactattcaaatgtatattttatacttttgggaaatacctaaaattcatgtaataaagaacaccaacttgtaataaatataataaatgtagtagtttttgaaaactgtaaa

SEQ ID NO: 217443 - DNA, 399 bp, Homo sapiens
tccaggtctctcttgtgtactcctgcccaaaacctggaggaagccattcctgcaaggcacccttcttgcctttattggggaaatggtgttttaagactgcagtctgggacccatggatgctcattgctactaagtaggtcattgtttctaggccttattagtgggcagagctaggaaatattataggttgcaggctcgctctctttctttaaaaatataccatgaaaatatgtgtgtgtgcatgtgtgtgtgtgcatgcatttatggtaaactagctcacaagttctgatgggtatttccaaatcaaattcaagaatatagggtttttacttaactctttctatcctgtatttgtttttttgtttcgcttgggtctcaagaagccaggggatgatagaa

SEQ ID NO: 217444 - DNA, 421 bp, Homo sapiens
gcaccttttcaacagggatttgttgaataaattaagaaaggaacctttactgtcatattttaaccacctaatttcagtttatttcagtcgttttattgaaaattattctcaaaatcatttttgaaagaaagctatgagtttaatattttattataaggacaagtttccgtgacttaacattgcattgtttattctaggcatactcatgtaagtcatgacatgctttaatgacttctgtattccagtagacactaaaggtcaatgaaagcagaaacttttctctggtagctgctctatcctcaaagccaagaacatagcctagaatgtagcaggtaggtaatcagtaaataatttttgaataaataaaggaattatttaatgaaatataaaagccaagaaaagacaggaagaaaaacaggaa

SEQ ID NO: 217445 - DNA, 519 bp, Homo sapiens
gtctgcaataaattgggagggagaggggaggaactagttcttcactatagacaaatgtcagtttagaagatctatgctgtttggtttgggaaatgaaaggtttgggctacatttattgtttgaatttggagggacagagagattactagggactagagtggtttgagcaggatttatggaacaagtgtgacttcacattgttacaaattataggtgaagaatgaaggaacattccaggatcaagtttcctaaaatttggaaataaactgtggaaattctcctaaggtttgtatctttcttgtctgaatctaagaatctttttctattatgatgagtgagatcaggaaatgaattaaaatattttaatttcctccttggttttgaagttctttaaagaagggatttagaatttaaatagtatggttattagtatctttgagtgaaggagaaagcgtaaattaaatgtcttctcattttttaaattaggtagaaaagcttactcccacttaagaaaaagaa

SEQ ID NO: 217446 - DNA, 457 bp, Homo sapiens
gagagagtttttcttgagtctttatttttccaaggtggtaaattgatgcatgtttaaagacagttggaaatttcagggtggaagttatggacaaaggatctatacttgatcctgctgagaggttctagggaggtaacaatgatgaggccccctgagactagccagaaagctaaccagaagtcgtaagacagaagaggactaggcctctcatatgatgtagagactgtaaatgtagtcctctggcttccagggaaaaagaaatatctgccatacctggttgaggccctttaacacctaaagaattccagcaaaaggtcacagaaaactcttgaagactgatacaaaggttttgaaagaatcctaaatatagtctggggttggtcttcagacctctgctgatacaacactttctctcacgtctctcacgctcctttggttgcttcagaggaaaagcttc

SEQ ID NO: 217447 - DNA, 359 bp, Homo sapiens
ctgggtaacatagtgagaccctatctctacaaaaaaataaaaaaatgagcctggtgtagtggcacacaccagctgaggagggagaatcgagcctaggagttcaaggctgtggtgagccgtgatcataccacaacactccagcctgaggtgactgagtgagaataagaaaaaaaaaaaggatggcctgagcccaggagtctccagcctggggaacagagagaccttgtctctaaaaaaattcctcccatataacgagcttccaatttctaaattttagcttgactaaaagtgcttttcaaaatagtctttgccactgtttaattatattaatgttacaaaaaaaaagcccttgccattct

SEQ ID NO: 217448 - DNA, 297 bp, Homo sapiens
actggccaaaaagtatctaagttgttttaccatgtgttcatatgcatttgcacaaactgtcaaagtgctcagaaataggaaaccttatttaaggatgcctccaactagaaatccttgaatggaaagactggcaatatggtaaaagtgaattgttatttatacatcaccgatttctttcaagtgtatgctttagttaagaggcttatcaagtgaaccagctttccctgaattgagctccgaaggaagataggctaccccagtcctgcttgaaactaaactgtcttttactgttaacag

SEQ ID NO: 217449 - DNA, 665 bp, Homo sapiens
tgagttttaaaatccaacgtgatcagccaataagctaggggcttcatcatatcagctgtgaataataacagttgtatatcttttccatttctttcttttcttcctctttctggcttgctgaagtggctggaaccgcctcagtgagcatagcatgtctctattccccttcgcatcagacgaggcagcttgaaggctggagactggaatcatgttaagagccttgtggttggtacctggaagacttaaatagatgggggttggcacagctgggaatccttgggtatctttctcttcaccatggtggctttagggctccaaaagcacatgtcccaagggagaaggagacacaagcaaaagttatggtgtcaccgtctatgacttggctttgtgagtcacacagtatttttcctgtcaccttctatttgtcagaagtgagtaaactagggctgccccatattcaaggaggggacaattagactccaccttttcgtgggaggagtatcacagaatttgtggatgtattttaaaagcagcacaatcgatgttctaccccaaattatttacatgtttccttcatgcaaaatacacttgcttcatcccaggacttgcaaagttgtatctattaagagatcaggtttaggtttgaggcccagggtcttgtcatc

SEQ ID NO: 217450 - DNA, 273 bp, Homo sapiens
gtcaaatagagaagctgataaagctgaacagaacttaatctcactatataagtaaactgtttaggacaacaaattgttttctctcatttgactttcactattatttcagagattagaaagctgacctcaacatacaattataattattcatcattacctcagactataacaaccaagtcacacaactcctatctcttatctaacattgaaagagtgcttaatatgtatatactaacaccatgcctaccattcttgatgtaccatctcaatcct

SEQ ID NO: 217451 - DNA, 499 bp, Homo sapiens
acagccaagtatcctgtccgtagggtaggctaagggatgatgtctgctatgataagaagctgagtttataatggcatcgcccagtgttcaattgattatatgcctgaaacactggaaatatatgtggactttgtcctctgtaccttgttcctaggatagaaaaatctagttggggtctaactctgataataataataataatatgtcacttgaagcattcctcctgcttgagagaccaggaatccaggcaaagccacttgctgtcccttttcctctcctagggtcaggccagagagaaagagaagggttggactttaatgtgaggttgctgcctctttttctagattttcttccctaaaaaatgcttaaatcatgttgaccagagataggacctgtagacctctcacccacttttctgcctctggcacttgaaaggcttttcaaggatgtcagcactgtggctgggggaggcgggtcgccctcgccagcctctgctgtg

SEQ ID NO: 217452 - DNA, 415 bp, Homo sapiens
gatcacctgaggtcaggagtttgacaccagcctgaccaacatggcgaaaccccatctctactaaaaatacaaaaattagccgggcgtggtggcgggtgcctgtaatcccagctactcaggaggcggaggttgcagtgagccaagatcgcgccactgcactccagcctgggtgacagggcaagatttcgtctcaaaaaaaagaattcataattattatatgttctaggaaggaaacaaacagtgtactgagacagtaaatgatttgtgggagataatcttatcttagataggtttgtcacttttaaaatgagacctgaatctgtaatcccagcactttgggaggctgaggcgggcagatcacgaagtcaggagttcgagaccagcttggccaacatagtgaaaccctgtctctagt

SEQ ID NO: 217453 - DNA, 269 bp, Homo sapiens
gtgtctggcctgctggagtctgacccttccacctagaagcagggtctagtgaagaaaaagatttatatccctattaaaaaaaaaaaaaaagtggccgggcatgttggcttacgcctgtaatcccagcactttgggaggccgtggctggtggatcacttgaggtcaggagttcaagaccagcctggccaacatggtgaaacccatctctactaaaaatacaaaattagctgggtgtggtggctggcgcacgcctgtaatcccagctactt

SEQ ID NO: 217454 - DNA, 249 bp, Homo sapiens
gagaagaacaaaattccgtctcaaataaataaataagataataggactctgaggctgtatgactgccaccctgtaggtcagaaatgggatctgattccagctcttatccgtaagctaggtgaatgcaaactgacatgcccaagcttattgatattgcaaaattatttattacacaaaagattggaagcaacccagatactcatcaataagagactggttaagaaaaatgatgacacactatgtagttgc

SEQ ID NO: 217455 - DNA, 643 bp, Homo sapiens
agtcccagctacttagggggctgaggcaggagaattgcttgagccagggaagcagaggttgcagtgagcagaccactgtacccagcctgggttgcagagcaagaccctgtctcaaaacaacaaaaacctgaccctggtccctttgtgacatgtcccttttgactccccagagcggtttgcctctcctcccaggccccatgcttgcttcctctaaacatcatcatgtgcccgaatttgtctgcaggcatgtttgcccaaattgcacaggcactgtacattttatatactttctttcagttagtcttacagcaaccccgttttgaaataggtgctgttttctttttttttttttcaccagtgttacttgccaacaggtggtttttaaacctgctttacaactgcgaaatctggaggctcaatgaggttacaaaattgactgtgctcactcagctaataagtggtagaatcagaattcaaatccagaatgtgtggcgttgagctgaggttccctcccaggctgagttccgtgaagggagggagtgtgtgtctgttttatccttatagcagtagaaccagaaacacagttggcgcctgataaatgtttgagctgaatggagtctcccaaattaaaagtttttcctgg

SEQ ID NO: 217456 - DNA, 592 bp, Homo sapiens
tggacagatcatgaggtcaggagttcgagactagcccggccaacgcagtgaaaccctgtctcaaaacaacaaaaacctgaccctggtccctttgtgacatgtcccttttgactccccagagcggtttgcctctcctcccaggccccatgcttgcttcctctaaacatcatcatgtgcccgaatttgtctgcaggcatgtttgcccaaattgcacaggcactgtacattttatatactttctttcagttagtcttacagcaaccccgttttgaaataggtgctgttttctttttttttttttcaccagtgttacttgccaacaggtggtttttaaacctgctttacaactgcgaaatctggaggctcaatgaggttacaaaattgactgtgctcactcagctaataagtggtagaatcagaattcaaatccagaatgtgtggcgttgagctgaggttccctcccaggctgagttccgtgaagggagggagtgtgtgtctgttttatccttatagcagtagaaccagaaacacagttggcgcctgataaatgtttgagctgaatggagtctcccaaattaaaagtttttcctgg

SEQ ID NO: 217457 - DNA, 459 bp, Homo sapiens
gtggttgtatgctgtgtaggtggtaggtgttgtgttgcataggatactttattatttttgtatttattttctcatttgatctcaccagcaaccttttaggggtccttacctgaccttacaagtgaggaaacaggtaaggaaggccgggttactcaggagtcagtttaggagagtaattaagagcctgtacctgagccaagatactgggtttgaatcctgaatctgccacttaccgtgaccatggccaaattgctttctctctctgtgccttggtttcctcatctgtggaatggggataataacaggaccttgtattgtgagggttaaataagttagtaagtgttgacagcagtgtgtggcacatggtaagtactgtgtaagcgtaagctgctatatttatgtgtgtatttgagcctgggcaacagagtgagactccatctcaggaaaaaaaaaaaaaaa

SEQ ID NO: 217458 - DNA, 453 bp, Homo sapiens
gtatctagaagctttgatgttggatgtatttacagttgtcccttggtgtgggattgcttccagtacctctgtgtgtaacaaaagctgcaccattcaagtcccacagttgccctgcgaaacctctgtatatgaaaagttggccctccatgtacatgggtttcccatcctgtgagtactgtatttttgatcctcatttggttggaaaaaatctgcatataagtggacctgtgcagttcaaacccgtgttgttcaagggtcagctgtatatttacagttgttatattgtcttgataaattgatcctctgtcattatgtaatgatgttctttgtcttgttttacagtttttacttagtctgttttaagtatagctacccctgctctctttggtttccatttgcctgaaatgtctttttctagcctttcactttcattctatgtgtgttcttaaatgt

SEQ ID NO: 217459 - DNA, 347 bp, Homo sapiens
aaaatttaagatattctcctactgagaaacagtagtcctttacccaattataatgtctgtgtgctttcccagctgttacaaactcttcagagtggaaacatgaatttaaacgtctctgatacaccacccatgaaaggaaccttttttgaggactagactacattaggaaaaagtatagttacagtatacaacgcaggaactcagttgaaatatgctaaaacatgtatgaagagatcctagttttcaagaggtagtataataaccatgaataagttctagcttttccagaacttggcttcagtgtacatctgaatgttttagtagagttgttagaagcagttaaaaaa

SEQ ID NO: 217460 - DNA, 576 bp, Homo sapiens
ccattacaaaccccagtattcctcctacacacacacttacacacataccagatatgcttgctcattgaccccgaactaaactagtaaacatctctctttccctttaggtcaggatgtatgttcttccatttccacctcctggctcttgacctcatctcttgtaaatggatccctcgtggacccaccctacagtcctgcagacatgcccagacatggctaaatcccagagtgaacacagatcttgacatctactacactactaattagcaatgaagtactttccattatatacacacagcctcttttgcagattgttgctgatgatttacataacttgccctttatttctaaaaagaaaaaaaattatattttagtacattgaatacattgagaacattcaaagataaaaatatatcacttatgtggatggcactttgtggtcttccttccaaaaatccataactgtggtttaaccatgagaaaaacattagaaaacccaaatcaaagaacaatctagaaaagtatctgactagtactacaaaactgtcaaggtcatcaaaaccaggaaactcagaa

SEQ ID NO: 217461 - DNA, 434 bp, Homo sapiens
gacattattatttcaccaaatgtatattcttactcaagcttgcataaaaattaataggcatccaactaatgcttgtgattgccctgtttggtgactgtgagcagtcaccaaaggtaaaaggccttgagtataacatttattgtttatgaattctatttctttccctttgggtgcccactatttttaattctctggggaacttggcagtggtactcttcttgataatactctgtcctaaacattttctttacctagaattatgttttaacactttgttttatttttaattaaaggatacagtcttcttttttagaataaaaatatattttatgatttcttagagtgagtacatacatctaaatgtagttatcaatcactgttttaattattatttatattgcatcataaattataatgagtttgttaaggtattc

SEQ ID NO: 217462 - DNA, 529 bp, Homo sapiens
ggttagatggtaaggattttctgtttcacagatttttagactgggaattgtgctattataaaataatattttacattaaataatgctatctaggttgtaatcaccttaatagacatgatttatttgggccacaaatgaactctggtaagaatggagggctggttacattattttagttttacagatgaaaataatcagtctcaaatagcttaagggaattcctttagaccatatggttagtatatggaaaagccagagctagaacccaggttctgatttccagagcagttcttatttcatgataccgcataattttataatgtccctaaatccgaatttcatttctcatgatgtgaaaggattctctttatttctgtttggttagctgcatcagagcatgacagaaatggagcagaatttgagtattctttccccagatgggtcagttagcttttcttaaagctattctgtgcttacattgttaatcagttgtccctggttcctagacaggatgttgatccatgtgaaa

SEQ ID NO: 217463 - DNA, 470 bp, Homo sapiens
ctttgcagaaagaaacatggtagacattttcgaagttttctttattaaaaaagttttttgacgttttctgtggccatatgacttgctttggccattgtggtataatcattgtggtataatcaggagtgatatggctcactttggaaccgaatctttaaaagccaattaataatttactgcttgcacttcccacagctctggtgatcacagatgctcatgtcaacaagcctccattatctcacatccctgagtcactccaagggcagattgatctaatgatctacgtaggacatgtacacgaaatgcaaactttccatttgtcaagcaagcaaaattttgaagttactttatactgcggaattactgaccccactgtgactgtcagaataacaacatgtgtcttcattcgtttctgtaataactgtgctaccctacctgatatcttctgaataaaaggatatctaaacact

SEQ ID NO: 217464 - DNA, 977 bp, Homo sapiens
aggagactacaaaaaaaggaaaggaaatgcattggaatgtccaggaagaggtgaccacaaaccagtctccccggaaagctgcagcccagattcacgttacttgaaaaaggaatctgaataatcctatttatttaaagaaaatcttcccacaaagaaaactctaaactgggcgtgttggctcactcttgtaatcccagcactttggaaagctgaggcgggtgaatcacttgagctcacaagttcgagaccagtctgggcaaaatggcaaaactctgtctctactaaaaataaaaaaagtggccaggtgccatggtgcgcacctgtagtcccagctacttaggaggctgagttgggaggctcacttgagcccaggagcagaggttgcagtaagccgagatcaccgcactgcactccagcctgggcgacagagtgagacctcatctcaaagaaaaaaaaaaaagaaaggaaaagaaaactctaggccttgatattttcattgtcgttttctaccagtcaaggaagactatctttctgaaaggtatttaagcagaaaaataaatgcccacagaaaatagcacaagggaaacgccctagctacacaattttagtacatttctcattcatattcccttcaacaatgctaaaacgtgttcatttcattacactaagcaattctataattactcaaaatatggtgaaagactttcttctctaattctatctagtctttcatattgctcactatattgactgccattactataatctgttaaataatgagcatttcagaaagtattgtaatacctaaaaatgttaaatgatagtctagtcgcaggaatcaaaaccacagtccatccacatctgcacactggtgacaagtcgtctgaccataataaaataataacttaatattatatattttaatagtcataattttaaaattattctctcttgttagtaataaaaattattcaggt

SEQ ID NO: 217465 - DNA, 739 bp, Homo sapiens
gagttactaatatttccttaaggattttttatttatgttaatgaaggatattagtctgtggttttcttgtattctctttggttttggtatcagtaatactgacatcagtttatgagattaaaattacaagtatttccttttctattatttttttaagagattgtataataattggtgttatttcttctttaaatgtgtgatagaatttgtccttgaagccatccaggtctggagattttttgcagaagatttctaattacaaattcagtttcttaaaataattataataggattattcatagttgtctgtttcatcttgtgtgactttatgtagtttgtgttttttgaggaattagtccatttcatttaaattatccaattcatgtgtatggaatttattattgtgttcacttatccttttaaggaattagaggtctgtagtgatgtctcatctttcctgatatcccttctttccattagtaatttatgtctgctgactttttttcttggttaatttttcaggaggtttttcaatttttatttttttccaaggactggctttttatttcattaggttttctctgttgctttcttgttctcaatttcgttgatttctactctttattatttctttctatttactttaggtttattttggctcctttttgccaagagtgcgactgcaaaagtctttggtgggaaaagggggcgagatgggccttatgcccaaaagaaaaaa

SEQ ID NO: 217466 - DNA, 653 bp, Homo sapiens
gagaccatcctaggcaacatggtaaaaccccatctctactaaaaatacaaaaaaattagctgggcatggtggcacacatctgtaatctcatccactcaggaggctgaggcatgagaattgtttgaacatcacttaaactgaggaggtagaggttgcagtgagcggaaatcgtgccactgcactccaacctgggtgtgagagtctgtctcaaaaaatagtaataataataattttataattaataatgctaagaccatgcatttgtaccacaatttaaatttttatacaggcctttcagatcaatcatcttgaattctgaactctaaaagaatcctcctaatttttatttatttattttatttattgagacagaatcttgctctgtcacccaggctggagtacacaatctcagctcactgcaagctgagactatagtcgtacaccaccacgcctggctaatttttctatttttaatagagatcgggtttcaccatgctgagtatggtggcgtgcgcctataggcctagaactttgtaggcccgggcaagtggatcatttcgagccggcagttcgagaccatcctagggaacatgccccctatctctaaccaccttcccgacctcagtttgccatggtgcatcaccctggtcccc

SEQ ID NO: 217467 - DNA, 298 bp, Homo sapiens
tacctctgggatacacgctgtatgggtttttactttcattcaactcaaaatatgttctgatttccctcttgatttcttctttcaggccctgtatctgttatgattacttgttttgtccagtgttaaagtttccaactataagtttggattttcctacttctacttcttacagttttattagtttttgttttatgcattttgaaactttgttgttatatatgtatacagttagtgttgtgtctttgttgacttgaccacttctattggatatttccctttattccttgttctgaaatct

SEQ ID NO: 217468 - DNA, 445 bp, Homo sapiens
ggaacctctgccagcgcatatggatatgccctttggactgattctcaaagctcagtcttttactttttcaagtgtatgtcattaaaaaaaactttaaacatacagagaatatgaaaattttaaaggaatagtacaatgaacagccttagacacatcattcagattcaacacccatgtacctactacagagatgttaacatattttgtcatatttgaatatatctgtacgataagaagaataagaatattctcttacataatcacgtactgttaacacatctgagaaaataaacagtattacagtatttttctttattttctttttctttttttttttggagacggagtctagctctgttgccaggctggagtgcagtggcgcgatctcggctcacactgcaacctctgcctcccaggttcaggtgattctcctgcctcagcctcc

SEQ ID NO: 217469 - DNA, 298 bp, Homo sapiens
ggctggggaccctgcccacagcacctctgcaaagagtagctggataagctctttcaatagaccagtcccaggttttgaaatggacagagcattcaatctacagtgactaaaggctgcctggctgcccgggacccatttctaaagagaagtggtctctctgtgctgtgcccccaggctccctatgggaaatccatgctgcactgagtcaggcatctgctgccctgctaattccggctggctgccaaggcaggggccttcctttgacagagccataaatacagactttattttaaccctt

SEQ ID NO: 217470 - DNA, 602 bp, Homo sapiens
ggctggagtacagtggcgtgatctcagctgactgcaacctctgccactcgggttcaaatgattctcctgcctcagcctccccagtagttgggattacaggcatccgccaccacacctggcttattgttgtatttttagtagagacggggtttcaccatcttggccaggctggtcttgaactcctgacctcgtgatccacttgccttgggcccccaaagtgttgggattatgggggtgagccactgtgcctggccggaaatctttactttgttagtatctaaatattaccggagtatgtttggtctgacataagaatcccacctctgaagtcatcttctggtgactccattctagatttttaggggagtgggggaagcagggagaggggtgagagggtggcatcctccaccctgtagttagattccttcccctctgcttagcctctctcatcttcttttaattagtgccgtgcttaattacccgctgcacttgcttgtgtatgcatcattgcattccccccaccccccacccagaagcctgacacagctcttactctccaagtaatgatagtaattgctggtagggcagtcctgttcctcatc

SEQ ID NO: 217471 - DNA, 533 bp, Homo sapiens
gaatggaattgtcaaaaattgttaatgtgtttgacaaagtgtggctgtcagtatgatctttttgttacattttgacatgaacaattgtccttttattggggctgttaatgctattttagaatatcatgagcatctgaaggcaatagtttagcagtgtccataaagcatcaaataccattataatatctagtaaccctaacagcaatatttcagaatccctgcctgtttaaatgggctatctgtgaatgtacttgctcagggatgcatgacccacatcacctataaatttgattggaagctaacagtactggcgtagcctgatggatagcagattagagccctgattaaccatgtgattcaaagactgggaatatattgtctaagcaagattcatcagatgcaatcagaatttcaagtggtcagatgaaattcaaatgtgtgttgtggcttttcctcccctattgcttttcctcctaggttgcctttttttccttctttccccaaagctgaaaaatacttctttgatgaatctg

SEQ ID NO: 217472 - DNA, 531 bp, Homo sapiens
tcagagagtagcagttggattattccattataccaaggttggcaagcttttgctgtaaatggccagatagtaaatattttaggctttgtgggccatatggtttctggtgcaactattgtaacacaaaagaagccataggcaatatgtaaatgagtgagtgtggctgtattccagtgaaacttaatttacaaaaacaggcagcaggccagatttggcctgcaggccgtcatttcattccacaaactctctcagtcacatctgcgcacctgctagcatctttatttatcctcccctctagttactatagatggatcatgtttgctcctttctaagttcacctcttcagctcgttcactagattccgtccgttctaacctgaaggacttcactgctgcatttctttcctatcctttatcatcaatttttttatttttactagatcattttaataagcgtgcagtcatactgtaattcctcccacctttaaaaaacaaaaaataaattgaaacaaaacaaaacaactcctttatc

SEQ ID NO: 217473 - DNA, 363 bp, Homo sapiens
ggagtcccagcatctgagaagccagagggcgatgcatcctctctgctctatgggtgtttattgctgccataaaaattaacacaaaacaagtggctttaaacagcatctctttatcatgtcacagtcatgtgtgttacaatttcaacagtctcatggggctaaaatcaaggtaaggggaggtctgtgttccttctgactctgaggaaaaatctactgtcaagctcattcaggttcttgtctgaattcacttccttgcagataggactgagatccccacttccttgctggctcctgtccaggggccacccttagctcctagagccctctctcagttcctcacacatatcccatgcaacatatcca

SEQ ID NO: 217474 - DNA, 263 bp, Homo sapiens
aaacaaagaggtttactaacagcttcttcctaataatctgatccttctaagaataagctaagctcattcatcaacatcttaattgtttaattgctattaagctacttttaccagagtagatacattaataaatgataacctggtaatgaaatagattaaagtagccgtctagtcctttctcccttgggagattgtttcatcaaatacactatgttgcaaaacttcctccttaaaaataaaatgtgattttgcaatcacttctt

SEQ ID NO: 217475 - DNA, 172 bp, Homo sapiens
gaattacgcaaatccaaaatttgatattaggtgagaagtagactaactgcaagtataacgtagatgatgtgataaatttgaagcaaactctgagaactatgagaaaaataaattgccaaaaatttacatatgctatgtgcaactcaaccaacgtattattagcatgaatgtg

SEQ ID NO: 217476 - DNA, 374 bp, Homo sapiens
tacccagtggtaattccacactttctttcttacgtggcctgaatcccacactttctttcttacgtggcatgaatcccacactttctttcttacgtggcatgaatcccacacttactttcttatgtggcctgaatcccacactttcttatgtggcctgaatcccacactttcttatgtggcatgaatccctcactttatgtggcatgaatccctcactttctttcttatgtggcagattgtgtttggtaatgtcagatttgaagacttgtttattaaatcagagacagtatcttccaaggtgaagactggagagagatgagccgacagtcagtggcttctggagctttccaggtggagactccaataaatgaatt

SEQ ID NO: 217477 - DNA, 188 bp, Homo sapiens
gggctgaaggctgaggttgggggtcactatcattagataactcttagagtgagcaggtagcagcctaattcttctgccatgtcctcagcctgtgctgcccacccagagctgcttcacctcgcccctctgtgaactgtgttctggacccagagccacctgagttctctcctctgactataggtgtccct

SEQ ID NO: 217478 - DNA, 342 bp, Homo sapiens
cactgtgccaaattctgcactgccctggagctccgcaggtatcgcatcacaactgatggctttctggcctaacctgaaacctgctccagctggaactccatccccttcccatctgttgaccttcatactgccccttttaccacccaacagtcagcccaagattctgatggaatacttgttgcaaataagcctcatgccttggaggctttaacttgcatcttttcatttaatgccaagtagacaattgtgagtaaagggaggaattctctctcccctcccctctcccagcttcataccccagggagaaatggtggtgcttctaaagtggtgtggcaaaagaac

SEQ ID NO: 217479 - DNA, 581 bp, Homo sapiens
ctgcgataagcatacgagtgcaggtgtcttctggtagaacaatttattttcccagtcttgggattgttggattgaatggtagttctatttttagttccttgagaaatttccatactgtttgccatacaggttgaactaatttacatgaccaccaacaatatataagcattccctgttctgtgcatcctcactaacatctgtttttttgtttgtttgtttgtttgtttaactttttaataatagccattctgactggtgtgagatggcctatcttcttgtgggttttcttttcccatccttcactggtaccaagatctctttgtggttgtaatttgtatttctctgatgattagtgattttgagcattttttatgtttgctccctgtttgtgtaccttcttttgagaagtatctgtttatgtcctttgctcactttttaatgaggttatttgggtttttgttgttgatttgtttaagttccttatgtttctgcatattagtcctttgtaagatgcatggttcgcaaatgctttctcccattctgtaggttgtctttttactctgttgattgtttcttttgca

SEQ ID NO: 217480 - DNA, 506 bp, Homo sapiens
cacctgagctacacagaaagacccaatgggagaagggaagcctctccccacgcaagttaatcaactgccctttgggtgttgcggctgatacagaacctcagaggcacagtctggcctcatgcacaagtcatttttcctgagtcctggattccttgctaagtgggaataatcacaataatcttggtgtgtaaaatataaaggcttaggcaaggccaggcgtggtggctcacgcctgtaatcccagcactttgggaggccaaggtgggcagatcatctgaggccaggagttcaagaacggcctggccaacatggtgaaatcctgtctctactaaagaaaaaaaaaaatgcaaaaattagccaggtgtggtggcgcacacctatagtcccagctacttgggaggctgaggcagaagaattgcatgaacccgggaggtggaggtttcagtgagctgagaacaagccactggactccagcctgggcaacagagcgagactccatcaaaaaa

SEQ ID NO: 217481 - DNA, 384 bp, Homo sapiens
ccataggtaaatgtaccacggtggtccggtgaccagagatgcagcgctgagggttttcctgaaggtaaaggaataaagaatgggtggaggggcgtgcactggaaatcacttgtagagaaaagcccctgaaaatttgagaaaacaaacaagaaactacttaccagctatttgaattgctggaatcacaggccattgctgagctgcctgaactgggaacacaacagaaggaaaacaaaccactctgataatcattgagtcaagtacagcaggtgattgaggactgctgagaggtacaggccaaaattcttatgttgtattataataatgtcatcttataatactgtcagtattttataaaacattcttcacaaactcacacacatt

SEQ ID NO: 217482 - DNA, 353 bp, Homo sapiens
gagatagggtcttgctctgttgcctgggctggagtgcagtggcgtgaacacagctcactgcagctttggccgcctaggctctagaaattctcccaccttgccctcccgaatatctgggaccacaagtgcatgccaccatgcccagccaagtttttaatttttttttgtaaagaagaggtcttattgtgttgcccaggctggtcttgaactcctgggcttgagtgatcctcctgcttcggcttcccaaagtgctgggattataggcgtgagccaccactccagtccctgactctgtttttgatgtttaactgctgatgactcctctttttttttccccttctgtcgtcttctgg

SEQ ID NO: 217483 - DNA, 516 bp, Homo sapiens
aatagtaatggcactgtgtccgagagtccaaagaagatgcgtagacagcgaacaagacttgggtttattgggggaacttatatatagggatggtccagtggtagtaggctggacagaagaaccactactgtttgtaaaaagcatgcagtttatatagcattttcatttagcacactccacctagcaacctccatttaacccaaagcaaaggaccttgatcccctatattgcctgtgttgtaagggatgggctgggggttcagacgtccttcatagataaggagtgaaactcagggttagtcgctcctgtttccttagtttgggattctgagcacacattcgttttagatcacagggtcgttctcaggatatggttgttactgctgtcaggtgcatcctctctatagcggggtactggctacagtttttgttcactagtgataattgttagagctatgcccttaatatatgtcttgtgtgtattatacttcaataaaaagttaaattttaaaaaacc

SEQ ID NO: 217484 - DNA, 695 bp, Homo sapiens
cgtggtggctcacacctgtaatcccaacactttgggaggctgaggcgggcagatcacgaggtaaggagatcaagaccatcccggctaacacagtgaaaccccgtctctattaaaaatacaaaaaatttgctgggtgtggtgatgggcacctgtagtcccagctactctggaggctgaggcaggagaatggcatgaacccaggaggcggagcttgcagtgagccgagatcgcgccactgcactccaacctggacaacagagcaagactctgtctcaaaaaaaaaaaaaatttggatccagggatattgtttttttttttaattctctaagacttcttttagggcttagaggaattcagggccaggccattttaaattaaggtactaataaatttctctacagaaagaattctaaaactcttctctccttaattccacctacatcaatttcatggttacccaaagcccccaaaccctgcagataaacaactcacccctttcctttacagaaaataggtcaactggcataagctccctccgctgctctctggtcccctctacatctaaacctggcttcagccctggtctgaggaggaagcatgctacccactcctgctctggatctcaaccaaccctgagaccctgttaccacagacacttttctcatccccacctcaccaccaccttcacactggct

SEQ ID NO: 217485 - DNA, 473 bp, Homo sapiens
tgctcattctttaccaaggcctggtcccaaacctgttcaaaagaagaatcattaactacagaagagaggatagatttatttcaaaatcttacacatctgtgtagtgttttttttttgtcctattgttgcttgccagatgctctgtagagcatccttatttgccatggacagtttgacaatctatgggtctgctggatcataagccccaagtggtggattagcttaacctgcagtctgaactcactttcttttgttcttctcacttgaaatctacaggtaattctgtaaatgagtcaaagtcacacactgaaatgtggtatgtgttgcttccaaaatctaaaagacttttactattgtggataaatagtaaagtatattttctcatttaagaatataattgacttatctaaatgcaaaaccgatgtattgtggggtttataatatttgtagaaataaaatgtgtggcagcaata

SEQ ID NO: 217486 - DNA, 473 bp, Homo sapiens
aagaatgcccaggatgcaggagctgactcagccaagggcatgaaaaagctggagaggttggaaagctagcatttcatctgcataacaacctttgagctaagagttaatattccatatagagaaggaggccaggcagggtggctcacatctgtaatcccagcactttgggaggccaaggcgggtgtatcacttgcggccgggagtttaagaccatcctggccaacgtggtgaaatcccatctctacaaaaaataaaaaataaaataaataaaaaccatggagagaaggaacaaggctgaaaaaggtatcatgatttgcccaaggtcttgcctctaagaaatgacaaaatggagagtagaatccagttctctagacttcctctggaaccctttatgagtgaggaccagagtacctcccacatggcccctgcagcctgcctcacccatctcctgtcagtgccatggtctcacaggg

SEQ ID NO: 217487 - DNA, 544 bp, Homo sapiens
ttttgtaccaccctctgctccttttttccttcatcttttcctattcatctcctccgtccccaactcacaatataatagcagggtcggaaaaccaacccacttttgaaacatcaagtcttaatgtccaatcagtcctcaggcagcaactacttctgaacccaggaaactcaatagctacgaattgtacccaaagctgcaaaaaacaataagcaaattctattatgttgtttctttacttcttggattacttttctgagctaataaaagcacataaggatatttcacaagtgtgtttatgtttctatttaacaaaccttgaatttcatagcaggtatcaagcctcagccaaacccatgcagactgacagatcaacaaagacaacaggccctgaacaagtagctctcctgagaacagatgtgtaaacagaaacacaatgtatgaattagcccagtgctctttcccaggtagactgagagaatctggacactacctgtggctgagccctggagccaccagaatttaatcagatacgtgattaagaaaa

SEQ ID NO: 217488 - DNA, 231 bp, Homo sapiens
tcgctgtcagaaattctagggagtaactgcttgtcaaatttcaaaataagtcatacaatttatagaaaggaaatgaaaccaaatgcaggttttctaaaggtactcacacacttaagaacaaccactaagaaggcaaaacagtgaaaaaataaatgtaaaaacaaaagtcgtcttctactttaattgaatattgagctttcaatttagaagaaaatcatgaagcaaccacag

SEQ ID NO: 217489 - DNA, 490 bp, Homo sapiens
aagaggaacgtatttgagttacatagttctcttccagagaaagatatcagtatgtaatatctaaaacaaaaaaataggacaaaaattttatttagaaagatggatgttgatgttagagaaaacaggtaaaaaaactgagtggctatttctaggaagagggaattaaagttggagatgggtgggacataagactgttggtttaagtcttcagtgtaaactacaacttttcaaactacatgtatgcatgactttcataaaatgtgaaaactgaaaaaaggacaataagttaggttagaaatctcagaataaaatgtagtatatacatcttctgaagtctctacaatgtagggaaaaaaaaaacaaaacaaggatgaaactataaaatgatgtttcttttgcagttgtaggagtgataggagacttcagcacatttgggacataacaaaatatagccaagaactcagcaaattaaggacaagcttgctgttaa

SEQ ID NO: 217490 - DNA, 552 bp, Homo sapiens
tagaatataccatatgggctggtgtggtggcagatgataccatctaggtttgtacaatgacaaaatcgcccaatgacacatttctgagaatatatccctgttgttttgactgtatatgtgtggcttttatttttaccccccttatttgcaattagttttgcttccagtattttggggtaccagaatcaatacattgcaacctaccaccaacaaatgttcctttaaatatctacaatagactccacctctgtattaaaaatgaggctgtgggacaggcacagtggctcacgcttgtaatcctagcactttttgaggccgaggtgggtggacagcctgagctcaggagttcaagaccagcatgggcaatatggtgaaacctccttctactaaaaatacaaaaaatgagccgggtgtggtggcatgcgcctattatcccagctactcaggaggctgaggcaggagaattgcttgaacccgggaggcagaggttgcagtgagccgagactgagacactgcactccagcctgggtgacaaagtgagaccgtcttcaa

SEQ ID NO: 217491 - DNA, 528 bp, Homo sapiens
attgataggatttttatttctgccttaagaattctttccatcaccttttcattttaagacacttatcatttctatcccttcctttgtcccctgtgctgtccttccttctgaagttctcacccggaaaggcattacatctttgatgctgcagttcacttctgtgtgcacccctgagttcttccagtacatcctccagttcctctgctttccatttcacaacctggttacagttagtcacactgtaacttcctgttactgagtatttcaggggccaaagctctctatgccctatgctgtccacttagtcatctctctccacatttgtattattcacagcaagatgcatgcacacaaatcctttaagtccgtcaggcttttctttccatttcccattcaaatatgaatcacctagcaacatttattgaagaccaattgcacatgaagctgtgttcccattattgtgagcctcacaaaggaagtaaaagccatggtccttgccattaagaagtttatcctctactaaaagct

SEQ ID NO: 217492 - DNA, 429 bp, Homo sapiens
ggggtgaatgctgtacactttttatatattctacactgaggaagatcttcacacttgttgatttgttctcactctcccaacccttgccagggaatcttaagctggcatcattcagtaatggctttaattggaaataattaagtagaaagagagtaggagcctagaaccttagttggttttccttctgtgtttattgcagcattcccagttagctgagatgctgctctctcctttcctggcctacttgttatgttaggagacctactaaacaaataatctactttaattagcaggcagtgatcaaatacagtctagatgatcatggctgtggtcagctctattgatagacattggcatggttccccaagctctttgatttgcatcttccctcttacctcatagcaccttgccattctaggctttgaagtc

SEQ ID NO: 217493 - DNA, 358 bp, Homo sapiens
atctatacatttgccctttagtggtgaaatggagttgtttgaggtgtcagcttggtttggagtgtcactaaaagccttttaagcctgcttcatcacagtagccctgggaatcaacgagaaatgtctctgagttaagagctaaaattacaaacatccagtctgacctgatcatgaggtatcttacaatggttccaactcggtgacattcgacattcgtactgtagcactgcctctgtttgtttgttagtggtcatttaacattcaaaggaagaagatgctaatggccaaggttcagagataatgtttctagagtttgctctgtgttatatgttttgttttgtttgagacggagtttcgc

SEQ ID NO: 217494 - DNA, 350 bp, Homo sapiens
gagctgagattgtgccattgcactccaacctaggcgtcagagcaagactccgtctcaaaaaaaaaaaaataaataaaataaagaaagaaagaaagaaaagaaaagatgtatcggtattagaacatggaataaaaattctgtgacattaagggttcatggtaatttgtatcagaatgtacatgaaagaaaatatcaagaaggaaggtataccagttcaggatgtgttatctactaaatagtgtgccagaatcctaataggcatttctatttacatttggctcctctgaaccttattacttccttcaacttgtcttttatgaacaacatcttttattagtagacaaaaaaaa

SEQ ID NO: 217495 - DNA, 419 bp, Homo sapiens
ctgctcattccaaatcagtaacagtaacatagtagattgcattgtatagtcatcagtcatacaatcattcaaaaacatgcatttatcaaaacgtaaagcaaacaaacaaacacacgcacacataagaaagatgctgagaaagaaaatgaagcatttccaacctacaggcaacctgccatctcatcaaaaagcataagcacgagtatgcgtccatctcagctccctcatgatccccacagtgagagctctttctgaactgaagcaattccagtgttcaaagatatgtatttttgtacaacacggtcctaaatacaaaccaacacctttatgcatgcacaaaagcaagggcaccactcactccaggagacttgaaaggtttattaaagtttactttgactcttgctggttttcttattaca

SEQ ID NO: 217496 - DNA, 353 bp, Homo sapiens
gagactgagtttcacttttgttgcccaggctggagagcaatggtgtgatcttggctcaccgcaacctccacctcccaggttcaagcaattctcctgcctcagcctcctgaatagctgggattacaggcatgcaccaccatgtccagctaatttttgtatttttagtacagatgcagtttctccatgttgaggctggtctcgaactcctgacctcaggtgatacacccacctcggcctcccaaagtgctgggattacaggcgtgagccactgcgcccggcctgtctgtgttttaaatatagaatacaaaaatctagtttaactctagtctatggtaaactgaaaaatgaagaat

SEQ ID NO: 217497 - DNA, 505 bp, Homo sapiens
aagcatatagtgattatggggtatgatactcaaagcttagtttttcagatgttggttttatctttcttgcctcagaataatcttggatgaagctgctttacatctatctgacaaatgcaatactgtcactataaatctgagtagaggtaagagttaaaaaacaaatggagtagataaattctgctttatttttgtgcgtaaataattttaaagcattttaactctgggataatgctagtgaactaagaatcttattaaagatccttaaagattaaagggtctttaagtatatagtgatcatgtggtatatattcacagcttcatttttcagatactggtttttcagtttgaaattgtaatgttcttataatgctagttaagtacatcaaattactatatatactacaaatttttatttaagataatttttgtttctaacaaaaaataaagtgaattttaggacttctatgggatgaaactattttcattgcattataattatttg

SEQ ID NO: 217498 - DNA, 443 bp, Homo sapiens
tcaatactaaggcacatagatcattcttagttttattgtcaagttttagccactttatcagggtatcgaggtagcctcaacatcaaagggatacagttgtcaacttgtttaagcagacaccaaattagtggaagtaaatgctaaagaaattcagagggtttggggatagagatcattatgacttgggtaccagtcagaggtttctttctttctttccttttaaaatagttaattgtataaatatttattttttagagacatggtctcactgtatctcaggctggtcttgaactcctagcctcaagtaatcctcatgccctggcctcttgaattgctgggattacaggcatgaaccatcacacctggccctagtcagaaagatttaattgggacctaaattaaatcttgaaagggttagacgtaaataagggcaagcgtgctag

SEQ ID NO: 217499 - DNA, 411 bp, Homo sapiens
acttttgacattctagattttaatagtgttgtttattgtaattacaaatatatttagacgtatcttgaccatcttttgtattgtctactatgtctttgctttcccctcctacgttttgcagggttgatttttctttataaccttttcttcttcactgctaatttggaagttgtatatatcaactttattggctttctgctattactctattttcatagttatcttgcaattttgaatacatacttaggagacagaaaccacattgcacaggtaaccaaacatgaaaaacttaaccaccttttactagttagcaattcttgtatttactactaaacggggtagaagtggactctaggggatacagaatatcaacttcaggatgcagatccttacccccaggggtaagggaga

SEQ ID NO: 217500 - DNA, 744 bp, Homo sapiens
gtgatatttaagtattttgtattttagattatatctactgagtaatttggtgacaaatttgcactgcttttacctattggctttcagtaacaatgctgcaataattacaggtatgcaaatgacctatatgatcatatatgtgtaagtttatatatgtgccgcattctgttctactagtgtacgtttttacctttgtactcataccaaattgttacaattctgtagctctgtaatgtgtttcaaaatcagaaactgtaatgccttcaaaattgtttattttattgcagatttttgggtactttattatctcttaagactttatatactttgggggttgctgtttctatttcttcaaaaatgcatgagaaatttgaacaacattgcattaaatctgtaaattacattgagcaggatggacatcttcacaagattaattattttaacatttcaacaagcatgctcaagagtgtattgttttaatttctatgtatttgtgaatttttcagttttttcttcttactgttctatactcatttcattttggtcatagaaagtaatccataaaaatttagttttaaataatttgttaagacttcttttttggtttaccaggttttctatcaaggagaatttcgtatgaggtattgagaaggctgtttatcattatgttgttgagtgttctttatgcctctgttattaataattgttttatactcccttcaagtccggtttctttaccaatat

SEQ ID NO: 217501 - DNA, 511 bp, Homo sapiens
ccccagtggtccgtggcaagtccacgaagctgaaaagctggtttctctcccagcgggtcccaggcagcttcaggccctcttgtttgtcacacctcttgtgttctagaacaacttggggtgagggatgcactcttgacaaggtggagacataggatatgggccacagggtcacgtagcagagattcagatgcggacctcaagagacatagaagcaggtgccaggccgggcatggtggctcacgcctataatcccagctctttaggaggccaaggtgggtggatcacctgaggtcaggggttcgagaccagcctggtttggcaacatggtcggcaacatggtgaaaccctgtctctactaaaaatacaaaaaattagctgggtgtggtggcaggcgcctgtaatcccagctactcgggaggctgagacaggagaatctgggaggcgaaggctgcagtgagccgagatcttgccactgcactccagcctgggccacagagtgagactctgtctc

SEQ ID NO: 217502 - DNA, 454 bp, Homo sapiens
tgataagtgtccttatgagagagaagagagacagaaaagaagaagagaaagccctgggaagacggagactgagactggagcaatgcagccataaaacaagaaatgcctggagccaccagaagcccaagaggcaaggaggggatcctcgcttagagttcccagagggagcaccgcccagctgaccttgattttgaacatctgtcatccagaaatattagagaataagttcctgtggttttaagtcacaagcttgtgttccttttgttatagagttcctgggaaagtaacattcaatgcctttttttcactgcaacctctgcctcccgagttcaagcgattctcctgcctcagctacttggaattggaaatcgcctgaacccaggaggcggaggttgcagggagggagactgcacccctgcacttcagcctgggtgacagaggaaaactctgtctt

SEQ ID NO: 217503 - DNA, 375 bp, Homo sapiens
tgataagtgtccttatgagagagaagagagacagaaaagaagaagagaaagccctgggaagacggagactgagactggagcaatgcagccataaaacaagaaatgcctggagccaccagaagcccaagaggcaaggaggggatcctcgcttagagttcccagagggagcaccgcccagctgaccttgattttgaacatctgtcatccagaaatattagagaataagttcctgtggttttaagtcacaagcttgtgttccttttgttatagagttcctgggaaagtaacattcaatgcctttttttcactgcaacctctgcctcccgagttcaagcgattctcctgcctcagcctcctgagtagctgggattgcag

SEQ ID NO: 217504 - DNA, 403 bp, Homo sapiens
gactccagaccgagaggccaagtgtactggatgcacggagcctggatttctgaacaactgcatggcaagcacttcctgaaggtgcacctaacaaggaatactgtggtaggttgtggactgaaggagaaagaaattttaactgtgttaagtcattgaaataggagttttttgcctaaccttacgcatccagtgatttatttaatgggttagactaagcagtcgcttcttggctcctgttgtcagggcttcttactctctaaaggaatgtatttcttcaaaatgttaagcagtctgtggttcttacattgcaagaaaaagcaaaaatgacaatgcccagcatgctccgcaaatgattttatatattaggttccaggcttaaagggtctgagttgatgtttgggtt

SEQ ID NO: 217505 - DNA, 586 bp, Homo sapiens
gggctgtttcccccatgctgtttctgtgacagtgagtgggttctcacgagatctgatggttttatacggggcttccctttgccaggcacttctccttccttccaccttgtgaagaagctgccattcttaccctttgccttgtgccatgattgtaagtttcctgaggtctcccaaacatagtgaactatgagtcaattaaacctctttcctttataagttacccagtctcaggtagatctttatagcagcgtgagaatgactaataatccttccttcctttacctggagcttaagactccacagatcaatgtggcgacatcatttcttgcctcttacaacagggtgaggtacagacctcagctcctccaggggcatcttctgcctttcagaagctgatgcttccttggttggtggacaaccttaccctaccttaccttatcctctttcagcagtaaccagtcagttccaacaggaagtgagggaaacagaaacctctcctattgagaagatccattccaggaatgcctgctgtggctgtcaggcaactctagaaggaggtcattggaagtttgctgtctgcccatgg

SEQ ID NO: 217506 - DNA, 456 bp, Homo sapiens
taggaccttcctccgggcagcgactgctgctaccctgccgagaagtttgctgcccgtggcattgctacttccatgaaggaaatctatcttctcttttcatgtctttgttctgaaatttcgctgtggtatttctgagtataagttggtttggctgtgttgcctggcgctggccgtgtcttctcacctgagatagctaagtttcagttcccagcccttcccggccatctgtcctcccgtggcacctctgcaccctgacataattcttgttctggatctcctaaaagggagtagcttgcacccattcagtgtcttctccatctctcaaactgcgcttcccagtattggtctctgtgttctcagtttacgatcttccagtttactagttctgtctccatccaattagtttgtttaatctgttgagtttttaaataaaaccgcattggtctctatttctaa

SEQ ID NO: 217507 - DNA, 151 bp, Homo sapiens
gcctccaagtcggtctttgctgttttcctgagggaaaacccagatccaggttcccctttgtctttctttggtcctgggtgcgaggcttgtggacttggatgacaggggacttggttggttggtcttgccctcaagctctccctcgacgcag

SEQ ID NO: 217508 - DNA, 356 bp, Homo sapiens
aggaatgtgttttatttttgcacgtgctcagcatcaatttgctctaccttatctgaacttcatcttgaagcaactgcatgttagtctgatttgaacacaggcgtttccactcatgatgcagctggttttcatgctaggctacatggttcttactgagaactaattatttcgtatagcttttatactgttcagagtcttgagaatctcactgaatgatgattggcatatattactacctcacagattatattaaacaggcatatctcacattctaattgtattgccactctttagcccttgcactgggtcctgcacattcaggaatggtctcctctcctattctgtcatcttggtta

SEQ ID NO: 217509 - DNA, 655 bp, Homo sapiens
tataatttcccatttaatatttttggaccatagttgactgttggtaactgaaactacagaaagtaaaaccacagataaaggggggaccaactgtatctaatttcatgcagcagtggtggtggaagaagctactctgataggaatgtttgtgttccctccaaaatttatgtcgaagctgaatccccagtgcagcagtattaagagataaggcctttaggaggtgattaggtcatgagggttctgtattcatgaacagcttagtgccatttaaaggggcttgagagaccaactttgcctcttctcccttctgccatatgaggacacagtgctcgtcccctccagagcaggggtccccaacttctggtccgtggcccattaggaaccgggccacatagaaggatgtgagcagctagcaagacttcatttgtatttacagctgctccccatcacttgcattgctacctgagctctgcctcctgttggatcaagagttgcattagattctcataggagcatgaatcctattgtgaactgtgcatgtgagggatctaggtttcgtgtccttgtgagaatctaatgcctgatgatctgtcactgtctcccattatccccacatggcaccatctagatgcagcagaacaagctcagagctccc

SEQ ID NO: 217510 - DNA, 449 bp, Homo sapiens
ataatcaacagagtaaacagcctgcagaatgggaaaaatatttgcaaactatgcatccaacagagggctaatatctagaacctagaaggaactcaaacaacccaaaaatataacaaataacctcattacaaaatgggcaaatgacatgaacagacatttctcaagaaatggacatatcaacagccaacaaacttattaaacaatgtccaacatcagaggaatgataattaaaaccaccctaagttagcatctcacccagtcagaatgggtgttacaaaaatgaaaaaataatgtgggcaaggatgaagaaaaaaagggaacacttacattctgatggtgggaatgtaaactagcacaaactctatggagaacagtatgaagatatttcaatcaactgaaaacagaaataccattttatgcaccaaccccactacaggatatatacagaa

SEQ ID NO: 217511 - DNA, 507 bp, Homo sapiens
caaaccaccacaatcatgactgtgaagtgcaacgctaaagtcatctgtcagtatgcagtcatggagtgctgaatctgctttcagaaaatctttctgttattagagttctagtatcttaatgaagcagcctacatcaggatgtggatcctcaggtaaaataagaataattatattcaagcttgaaaaaaacaattgggaaatgtattggtttgtgtttttgacctgcaggcagaaacactgaaatcatttctacttccactttaagacttctactatttgctatttggaactttatattaattcatgtttaaacatacttttttttttttgcaaataggaaactatatattataggccacatttctcccggtgccaacaatatttagctcagttacagatgatacaggatatgcaattataggcacatctcatgttattgtgcttttctttgttgcactttgcagatattgcacgtttttacatattgaaggtttgtatcaaccccgc

SEQ ID NO: 217512 - DNA, 331 bp, Homo sapiens
gtcacccagtgcctatcacagtgcacactggtgggcttagaacacacttggggagttacaatacatcaaggcaccagaaagttcctgttaagcccctgttacagatttaacacatgacaattcacagttaccttgattccagtgtgttgatgcagtttcttcactttgcaggttgagttctgtactttaaaaatcaggggattcagccaggtgtggtgactcatgcctgtaatcccagtgctttgggaggcaaaggtgggaggatcacttgagccaatgagttcaagaccagcctgggcaacatagtgaaaccctgtctctacaaaaatta

SEQ ID NO: 217513 - DNA, 709 bp, Homo sapiens
atccatcctaacatataattggtctcttcttgtgataacgacgttaaatactaaagatgcagctgttccaaaaaacattgactgttgtttgggctaccagcgatactgtaaaatattccacatggctttccccaaacttttggtgacaaaaggtgggcatttataatttgttatatcctttcaacaaaggaaaagcagctttccaaaagctctggacactgctgctttaagtatcaggttgctgcaaaagtaattgtggtttttgcccttccattcaaatgacaaaaactgcgattacttttgcaccaacctatatagtttatcatttaaggaacagcaatgtataaaactgagagatctggggccatgttaaaaacttagtaagtctctttatttattcattcgatcaatgtataaatagaaccagtctatatttgctcatctagttaaaaggtcaaaagccataggcagccttgaaaaatgatgcaagagggctgggcgcggtggctcatgcctataatcccagcactttgggagaccgagacaggcggatcacgaggtcaggagatcgagaccatcctggctaacaaggtgaaaccccatctctactaaaaatacaaaaaattagctgggcatggtggtaggcacctgtagtcccagctactcaggaggttgaggcaggagaatcacttgaacctgggaggcggag

SEQ ID NO: 217514 - DNA, 147 bp, Homo sapiens
gcgtccctgttgcagttctgccctgataccttatcaaggaaaacaagtacttcttgaggacatggcccaagacacattgactgcggccagtgagaagaaagtccgggactcagctggacccactgacaatggctgtcaggtaattgg

SEQ ID NO: 217515 - DNA, 175 bp, Homo sapiens
taaaattagtcatctgtttgccaatttgacataaaattctagttatttagatctttatattccagagcctaaatgaacaaaaatacataaattgtctcagaatttccttttagccaaaagattcagggagatgggcctctagagtttttcacagttttttttttttttgtaaaaa

SEQ ID NO: 217516 - DNA, 475 bp, Homo sapiens
ttcccttttctctacatggacatttagattgtgccatatttttgtgattacagaaagtgctgtatccttgtacatccttgtctgtatatatacagtctcaggagtactttttaggtaatactaaaaataaaactgctgtgtaaaagagttttaccttttgatacatactgccaaattgccctcccaggatgattgtatcagcttacatgcccaccaataatgtatgagagtgtccttttttttctgtgccctcttaacattggatatcatctttctaaaagtttttcaatacagtagatgaaaaatgtaccttgttaattcctaatcagtaatgattagccattggatttttttccctttgtgaattgcttctttatatatttatgttgtatgcctcttgtcggtcatgtgttgcagtattttttccaggaatgctttgtcttttaactttgcttttcatgtgttttgggcttca

SEQ ID NO: 217517 - DNA, 637 bp, Homo sapiens
gtagttagtggtatgtcctcagcagaagccacaggactgtgatttgaagagaaggatatggggttgaactgcttcttactgccacggcagctctctggccccggaactggggcagttccttcattgtcccacctctgtcatcgcaggaatcccaagctgtcacacttctcagtattgtttcctttgcaatttgatgtggacttggcacatttccaaggtggaaacgacccctcattcattatttttgggacctcggtggccccgtgataagggaaatgatggatgcctggacttgtcttctggcattgcgcaccagatatcagggccctccacaggaccagcctatgagacaggaagaggctgaggtcttaaagacatactttcttgggagtttgatgtttcctcttgcttccacagctgtcagaaagggcttgttctgagggtgacctgcaggttgcaaggctgtggaaacatagcagtgacagcgttgaatggcttgtccccatcagtaagctttggtgtcacaccagccggatgactttctggtggagggccagcttcctgcacttccgtgacagcagcctgacagccccatggaggcatggctgtagacattaagacatttctgtagacattt

SEQ ID NO: 217518 - DNA, 361 bp, Homo sapiens
cactgcccattccatattccctttgccctcagcaagcactcagatggttgtggttctttacctagagggataactcaaacctttcttcctgaaaatctgaacctagcagttctgcctgaattggtagttttccattgactttcatcacagggctcagtgatactagtaagagatgccccaagtgttctcctgcattccagatgtactcctccttgtgtctgttgtgtcatagcaacccatgttccccttagtaatcaggataatccccccagcccacacagccacgtccttctttgcctgttggttcagaggcataaggagcccaaagtggttgggtggcagtttcagcttccaggtcagt

SEQ ID NO: 217519 - DNA, 460 bp, Homo sapiens
aatctggatttttaaagaaagcatcttgaacaacagtggcaaaaagttgacattttggcagtttgcttaaattttataaattgtagaatacttaatatgttcagatggatatataacatgtatatgtaaagaatagtaataaaacgaatactcatatacgcaatatccagcataagaagtagaacacagataccaccattatctttgaagcccctcattttccttcccttagacatgaatacttaccattgtgaattttgcggatcattcccttgcttcattttgcaattttatgacggatatatagcccaagtaacatttttttttttcttgagacggagtcttgctctgttgctcaggctagagtgcaatcacttgaacccgggaggtggaggttgcggtgagccgagattgcgccactgcactccagcctgagtgacagagcgagaccctgtctcca

SEQ ID NO: 217520 - DNA, 397 bp, Homo sapiens
ttagtataaagcatgtaactcctgacttggaaatccactgcaattttctgaacttctttgagtagcagcgaattacaaactactaaaaacatcttcacttaatacatggagaagtttttgtcttctgttatttaaactaaagatttgttagaatccatactgacacctgtgaacttaaatttaaaggtgtagaatttaagactataacaaactaataggtctacaggttgctttaacataaaacaactaatcaaacaactatgttacatgctcggtagtggtaagacactgaaaaagcatctggagacagaactgaaactatattgcctttaaaaattatggttcttagcctgggtgtggtggctcatgcctctaattccagcactttggaaggctg

SEQ ID NO: 217521 - DNA, 722 bp, Homo sapiens
tctggtcatttccttcccataaagccagggctcacccaatctacgccattccaagtgtggatgcaggtttaacctttaattcctgaaagcacagctaaaatgaacatagcatgtaactaactttactaaaacctgggggtcactaagaggataatagactatgggtgaaaaagtattttaactaattctcttgtttccttctcaagtctttggccatgccccttttggggccccttgcagccttgtctctccttagccccctaaggtatccccctctcacagtggacagtttacctcccccaaatgggaggtacctcagccttgcccctatgccttcagtccagccccaactgctccttcctgtgctcagccaaagaaaaatgtgttcacaaaaatctttacagagatccaatgttttccgcaaatgagacaagttttatattatgtgcatataacttaatctatcaacgtgaaacatcttcattcagattatagtgctattcctaagaactctgggtgtcctacctgtctcgacacctaaaccaatcgcttccagagcttccagaacacagggagagcctgctgggacaacttcggctgccaccccacatgcagaacctcttaagacttactaaagagcaattattttcgttgccaacaatcttaagatccagactctaccctggccacagaaaaacactcctcacagatttccaggagtt

SEQ ID NO: 217522 - DNA, 348 bp, Homo sapiens
gaattgtctagaaaagaagtgacaacttctgggtcgttgcaatgaaaaaaggtggtaacttccaggtcattgccatggcatttgcaaaccatcatggccctggtgggagggtcttatgccaatgagcaatgatggcagccagggatcaccctcctcgccgtcccctgattcctgtctccacttcatcccatccagcccagatcctgttttggtcagtgggtcagtgaccagaaaacaagtcctgccaccttcctacctcatcccctctcttcagagatgagatccttccccttaatcttaagggggtgcagaagggcagggtctgtcttctgggattgcttcctgctg

SEQ ID NO: 217523 - DNA, 499 bp, Homo sapiens
taatatttttatttacatagagacagggtctcactatgttgcccaggctggtctcgaactcctgagctcaagtgatcctcctgccttggcctcccaaagtgctaggattacaggcatgagccactggcctcatgttgctttttaaatcttaaatcttattgtacagtggtcttaaaatttgtgaccagtgacagaaactgaatgttttacttcttgtttctccccctgcatttagcatggtgcttttcatctagtaggtacccaataatttgtgtactaacttggctgtacattgctaagtcttttcagttttttatgttcgtttttaaaatcaggcttgtcttctgtaatctgttctggcttaactatgtctgataattagatactctttcttaatgtcattgtcaagtgtgagtatatcttttcctggtcagtgagaactgaggttgaaacgagcagtttgatttctggacttaaatttgtactaaagtgtattggg

SEQ ID NO: 217524 - DNA, 499 bp, Homo sapiens
agaagaccggaacttagcctttctggctctcaagctgtccctggtgtgggaacgggatgcaaagtacaaatggaaaggatagatcatgaaggaaaaaatggacacgcttttactgagaaggaagagatcctggatgagatgcacgtgagatggtcactgccaggaccaagatgctgctaatgtatactggaatagccccatggtttacctgtgattggcatccatcctgactggtctgtgcctatgctctcacttgttatacattttaaatatcatctctgtcaacttccagtgaaaacgttagggagtcaagatatgtcctcaaccagtgagagcaatccctgctttgaaagcacttttgcaccaatgaaatataaatatataaacaaataaattccaaaaatgtaaagccattatttcaaatgattttaaatggccaaactgaatgttttggcagcttggtgactttatggaaaaaaataaattgctgatgaattgg

SEQ ID NO: 217525 - DNA, 488 bp, Homo sapiens
cccagaaagacctacccatgcttctttgaatttggttttcctttaaactccctcacaatccctgtcttaaagttcctagaagagaaaacttttctcagagaccgtctccttaggaaaaatcaacagggatattgtttaaaacctcaaactgaagataaaaggctggcagtgaccattgaaataattgaggtctatgtatcatgcattgaggaagaaccaagcacattgaccagctaataggacttcactgaatgtccactttattttgaaagccagtttgggattgtgggggaggggatgcaaaataaatagaaaatatagtctcttcccataagtagcttatggtttagaagttcagttctctaatacaaaggataaccaaggacccatgcaatgcaaacagagactaaacagcaaaaattagaaatgacaactaaagttgtagccaggaaaaaaaaaataatctgattctatgagcataccttttt

SEQ ID NO: 217526 - DNA, 385 bp, Homo sapiens
tctgttttatgtctgccattagttgttaggtggggactgtccctgtcctggcatgcaggactctgctaccggaaattattatagcatacagagtaagagttccagtcccagacttagactgtctaggttcaaatgccagtttcactccttactagttgtgtgaatttgaaaattatttcatctctcagtgcctcatttttctcaagtagggatgatagtaatatctgccttttagaattgttgtgagctttcaatgaattaatttaaagagaaaatgtttcaaatagtgcctggctgggcacggcggctcacagctataatcccagcactttgggaggccgaggtggctggatcacctgagatccggagttggagaccagccttg

SEQ ID NO: 217527 - DNA, 410 bp, Homo sapiens
tttaatagcgttgccacagcaaccactgtcaccagaaaagggaagatagtgttgccccttctgctccaagcagtgagttagaaccttggaaaagataaactatccagatttccccatattcctcagcccactgggctctttaaagagagatcacaggctgtcaacagcagcaacagacaggaacaaggatcacctcatcatacctagactacctatacctgtatttgcatgacatagcttgggtgctgtgtaaataaaaacacattataaacacattttggtacttactgccagaatacttagtttggatgaatacacacaggaactcagaatcctgtcctacagtccaaggcagagaaacctaaaaagggactgaatcctaaaaatcctaaattctagcctttaaaaat

SEQ ID NO: 217528 - DNA, 522 bp, Homo sapiens
tctcttgaactgctgcaggagccccaggacctccaggtgcagggcctggagacacacacaaggagagatgcctgaggggctgggggccaggcagtgggacaggagccatggagagggaaaccgaggcagaagctcatgcctcagccacttggggctgtgtgccagagccaggcatttcctctcagtgtcctgtcagtgcccttgccacagcgggggcacgtgcccccagcctcaccattccaggcctggaatcagttcaggtgttcccagagccatcctctgatgagtggacttcagcttggacgaatgactctaaaacgatggggtgcgaggagggcacagcagcgactcatttctcagggcctcactgcagtcttcatccacgtgaatgtcattcccaccatccgcacctttctctcctgctgttttcccctccttgtgccacactgttttctgtgttatgaccgtgtgttcagaaccatcactgcagcggccacagccactccgccagtgcgtctgtgc

SEQ ID NO: 217529 - DNA, 499 bp, Homo sapiens
ttcttgctttaagtagaagccacagaaaccatatactggtagaaacagacatgagaattatgaagaacttttggaggctaagtgtggtctggcttgagggtgagaaactgatagggtggcatttttaagtagggccccatccctttttggggaaccccctatcagataatcacaaagaagagccaacaaatacctcctcctgattctggcacagagagggaaagaataacctttgtgaaataatcccagaatattctctgtaaataagtttactcttcaagggaaagactttgccagaagcttagttcatctgtgaaagcacatttacttgacgctagctacctccagcctttctggattacctacagggaggaaaaaaaaaaggtaaaaaacaattgtgaaggtcacagtccagaagaaactaaagcaactagaagaagagggaacatgatgtttaacttacccttaggctttcttatgtagtgagaagaaagcatca

SEQ ID NO: 217530 - DNA, 473 bp, Homo sapiens
caacatggcaaaaccctgtctctacaaaaattagccaggtgtggtggcacatgcctgtaatcccagctactcgggaggttgaggcaggagaattgcttgaacccgggagacagaggttgcagtgagccgagattgcaccactgcactccggcctgggtgacagagcaagacttcgactcaaaaaataaaataagcgtatctggatttttcttttgaattcttgactgataagtttgagaatgtatgtttttggaattttacagttgactcaagtgtgaaagtatacacaagtaatttttcttttctagctatgtgaatgtaaaatacttgcagataatgtatatattgtgtaatatatgtatatttggtcataaaagcagataattggaaacattgtaaaattaagcactttaattcctattaaatattaaacatttgtatcttgtaaataaacacatccttaaattaaaaaa

SEQ ID NO: 217531 - DNA, 414 bp, Homo sapiens
atagaaatgtaaaacatggctgattactttttattttaaatccaacaaatctccatttctggttagaaaatcttgccaaaaccaaccaaacaaatgcatagaagtatatgaagaaggaaatgaaagattccctgcctcccaatcccacttgcttggtgtcagccattatttatcacatggaggaagggggaaaggcacccaggaagtcccaagtcctgttctcacaatcatctggcctccctgggcaaagggaaaagagggaaggcaaaaagaatatagcactacggtttgcagaaatttccccttggtacaggaaactctggtaaactgagagagtatgttttccatgagggaggcctcaagggctcttctctggccctaagcccaaactggattttgcctcattttctgagg

SEQ ID NO: 217532 - DNA, 443 bp, Homo sapiens
ttgagagatagtaactgtgaagtacttagcacagggcctggtaagtaatgagcctacaataaatgctagctttgtaggtaagcaaaacatttaatggactatccttagttattgctgtggtgaatgcagtgggaaatatgaaagaagaatatgatgccccattcattgaatattcacaggcattatgctaggtgttttacaacactttttttcactctcataacaatactttgatatattttcattagagaaggaaatacaccagttgagtaatggaaggtcatccagcaggtaattacgagtgctgagattggaactcaggtttgtctagttttgaaacccatttcccctactttattactaagacttaatataaacattcactcatacattcgtgctttcaatccacaaatatttattatatgcttaatatgtgggagaaa

SEQ ID NO: 217533 - DNA, 508 bp, Homo sapiens
ctggcgctgggtgccagcctgagcatgtggcgaggctgggctgctgagcctcctcctccacagccaatgttccctcaaactgcttgggggtggggggagggactcatcctcatcccattagcctggctgggtattccctacctttctggtctctgagagacttacctcttccaagaagtcctcccgaatgagtagaagggagagagctggattggaacttaagtgacatctgggaggagcctgaagcccctccggttggggctgagactcctataccctaggtctggtgtctgggttccacctgggtcctctaccttggcctggattcctgctttcgttttgccagtctctcccaggatgggggtgcatggctggttcgtggctcagagcaacatctgcctctgtgtccccccatcatctgtccgccccctaacacctcttgccatattagaattgctattgctctgtcctttcattcatgtatccaacaaatatatattatctgaaa

SEQ ID NO: 217534 - DNA, 258 bp, Homo sapiens
ctggcgctgggtgccagcctgagcatgtggcgaggctgggctgctgagcctcctcctccacagccaatgttccctcaaactgtttcgttttgccagtctctcccaggatgggggtgcatggctggttcgtggctcagagcaacatctgcctctgtgtccccccatcatctgtccgccccctaacacctcttgccatattagaattgctattgctctgtcctttcattcatgtatccaacaaatatatattatctgaaa

SEQ ID NO: 217535 - DNA, 433 bp, Homo sapiens
caagactcaatttcctcatctgtgagatgggggtaagaagaatcagtgggaataagaggagataaaaatctgtgtagtacttgggcggggtgcggtggctcacccctgtactcccaaagtgctgggactacaggcatgagccaccacacccaacctcattttttaaatttttagtagagatgggatcttgctacattgcccagtctgatcttgaactcctgagctcaaagcagtcctctcagatcagcctcccaaagtgcagggattacaggtgtgcaccaccacaacccattttcctatggggatgctgaggcacagaaaggctgagtgacttgccccaggtcatggagctagtcagtgtcagggctgggatttgaacccaggcagcctgcgtagtaactgtatatagtgtctacacttgattgcttgttaa

SEQ ID NO: 217536 - DNA, 480 bp, Homo sapiens
gcgacgtggtctcactacattgcccaggagggtctcaaactcctgagctcaagtgatcctcccaccttggcctcccaaagtgctgagattacaggcatgagccaccatgcctggctgcaaatctcatttactacctcatatttcaggtagttatgtacacatcttggccttaggacttttagaaataagcttatggtggtaggctttgtgtatgtgtctctgcagcacggtggctttccgtctctttgaatactagactttgggaggctctcttgaagggttcacctggacctatgttgccttccacccactgctatgttgttgtttggatgcaatgcctcactgtctgcctgtgttccatcagaaattcataaaacaatgctctcaaatgtttctgtaagcacgtttccctagcccctacttgctgttagaacgttcttcttacctcccgcagcaagatttatctcactgaactcaagt

SEQ ID NO: 217537 - DNA, 434 bp, Homo sapiens
gattctaggacctcctgaggataccaaaatctgtggatgctcaaatactgatagtatttgcatgcaacttttgcacactcccttccatgtactttaattcatctctggattattataatacctaatacaatgcaaatgctatgtaaatagtttttatactatattcttcagggaaaaatgacaaaaaaagtctgtacatgtttactccaattgcagttttttttttttttctgaatattttcgattcttggttggttgaatccacagatgtggaacccagtgaatatggagggctgactgtattaccaatccaggcatttctagagaggtcaggattctggtatataaggaaaaagaggacctaagtagtttcagaggtaaagaaaggattttttctgaccacccttgtggctttttgagctttttagtttcag

SEQ ID NO: 217538 - DNA, 469 bp, Homo sapiens
actgtggaagcctatccttttctggtttaggaggagggtagaacgttgagagcatttgagcagacatggctttcagagccagagaaagtcaagggggaaaaggctttgctcagagactatggctgatggctattaaagatcacttcgtttcatttgtcattttatagattaaaaaaatgaggtaggccgagcgcggtggctcacacctgtaatcccagcactttgggaggccgagactggcagatcacgaggtcaggagatcgagaccatcctggctaacatggtgaaaccccgactctactaaaaatacaaaaaattagccgggcgtggtggcaggcacctgtggtctcagctactcgggaggctgaggcaggagaatggcgtgaacccggaaggtggagattgcagtgagccgagatcgcgccactgcactccagtctgggcgacagagcgagactccgtctcaaaa

SEQ ID NO: 217539 - DNA, 540 bp, Homo sapiens
aatttttgtatttttagtagagacaggattttatcacattggccaggctggtcttgcacgcctgacctcaagtgatctgcccccctcagcctcccaaagtgtagaaatatttctccatagcataaatttatgcatgtactatattccgctttctccttcagtatcacactcaaaatttgaatctacctctttcagtttgaatctaaaaattcttgtaaatcagtttttgaccattgacacttaacgcttgtattagtgaaactggccacttttcttacttgtgatcatgatttactctggcacctttaggattaatattataattttgaaacacattgacaaatactgaggttgatgctacatttcctgtttggttaaagctttgtttaactccccccatctgccgccttgcaagtcagcttgtttggtgcctggctggtgatcactgtgttagtccatttgcattgccatacagaaagggtaatttataatgaaaagaggtttaattggctcatggtacctcaggctgttcaagaagca

SEQ ID NO: 217540 - DNA, 434 bp, Homo sapiens
ggacctgtctgcctttgtaggactaacaaattagctacaagattagaaatgacagtttagggtcaggcagcctctggctgcaagagtctgaaccttcccaaattgttcctggggatcacatcactattgtaaaacctaagatcagtgcttgaggtattttgcagcccctgcactggatggatcagctgacaccacccagaccaattatttggctcaaccagttctgcaatccccgctcgggaacagaagacagcgagaaaacttcacttcgacccccgtgtgattccatctccatcctcaccaatcagcactttccacttcccaagcccctactggccaaattatctttaaaaacttccatccccagtcggagcgcggtggctcacgcctgtaatcccagcactttgggaggctgaggcgtgcagatcacctga

SEQ ID NO: 217541 - DNA, 550 bp, Homo sapiens
aagacaaatccagtacaaacaaagagaaaactacagaccaatatcccttatgaacacagatgaaataaaacctcaaaaaaagttagcaaatggaatctagcaatatataaatgtacatccatacatatgtatatacacacatatatacacacatacaccaactggagtttatttcagggatgcaaggctgtttgaatattcaaaaatttgtcactttaataaaacactgcattaacaggctaaagtagaaaaattgcatgatttcatcaatttatgcagaaaaaagcatgtgacataattcaacacccatttatgataaaaactctagccaaactaggaatagaggataacttcctcaatataataaaggacatttacaaaaagaccacagctttttgtactttgtacatgtactttgtaacagtaacatggttaatagtaaaagtctgaatactttacacttaagtttgtaaacaatgcaagtgcaggcactttcaccacttttattcaacacactactgaaaatcccagatagagtaataaggcaaga

SEQ ID NO: 217542 - DNA, 660 bp, Homo sapiens
gtgagtccaagtgtatggtgctctggagcaagagtgcttctgtcttttttatgttttggagtgcagtgcaggatttcaaaatgtttggaaatgactgaggtggtccgagtccttcattgacagatagagtagctgaggcccgaagaggggaagtgacttatcctgtagctggtgagtggcatgcctgcaatatgggctcctggatgaccaagtactgagtcctagactgggagttggtcttgagatgagcccaggcttgcctcagtgtgctttgttattccaacagttagctcccgctgtctttcccagcactacaggcagtgcttcaggttgggaagagtcactgggaaccaacccccaccctcacatacagtgactgtgttgaaggattctgggtgggtgaactacactatattcctgggtttcaaaccttgttggggatgctgcctagctgacagtcaaggttgcaagcattcaaatcgtggctccattgcttaccagctgtgcaacctctctgtacctcagtttccttatctgtaaagtaggggtgataattattcctacctcgtgggattctcttaggattaagtaagatagcatatgtaaagtgcttagcacagtgtctgacacacacagtgttattatcccagcaaggctggc

SEQ ID NO: 217543 - DNA, 437 bp, Homo sapiens
cagggacaccaggcctgactccttggcgcccccgcatggcccgggactccctataccagttcccaggcgatcctggagaggtttcatttcccacactacagccatcgtgatcctaaggcaaatactagaacagacacttctctacctaaatcctcagtgcttaccccagaattaaattgaaatcggccccttgccgcagccttctgggccagatctagggatcttccctccctccctgcactctagctgcaggagcttcctggtgtctgcccagagcttgcccctaaactgagtggctcatctttcccatccctgctgaagtcacctcctcttagaggcctcctcagagtggttcctgttgttctttttcagcaccctctttacttcctgctcagttctgataactatttataattatttatttgttggttaacatg

SEQ ID NO: 217544 - DNA, 416 bp, Homo sapiens
acatccatcagtgaatgaatggataaacaaaatattatatacacatacaatggaatattattcaacctcaaaagagaataaaattatatatatagtacaacgtgaatgaaccttgaagacattatgctaagttaaaccagacacaaaagaacaaatattgtatgattccacttctgtgaggtacctagagtagtcaaattcatacagacagaaagtaaaatagtggttttcaggggcttcagggaatggagagtggggagttatcttctaatgggtacagagttttagtttgggatgatgaaaaagttctggagatggatagcggtgatggttgcacaatattgtggatgtgcttaatgccactgaactgcatattttaaactgtaaatttaatgtttttaatattttaacacaat

SEQ ID NO: 217545 - DNA, 850 bp, Homo sapiens
cagccaccaatatgtcctaagctctgcactttctttgaaattacaagaaacgatgaacttactcgtgctttttagtctcccgtgtgaactgaattgttctgtattttatcttgctctgttatgggcaaaactaattcatgtcatcagtggcatttccctcttcactaggttgtaaatcctgtgaagtcagacacagcgttattttcatctttattttacccaaacacctacaattttcccccctcatgtgacagcctttgaaataagttaatcttccagaggagagaaaacactaaacagtcaaacataaggagagggtaaaggttttcctcataacctcacaattttcagtgttagctttaaaaaaacaaacaaacaaacaaacaaacaaacaaaaactctttatttgcaaatagtttgaaacttgaaaagttgcggaaagaaaaatagtacaaagaatccccagatggtcctttacccagatccacctgttgttaagattaaatccatttgcttaatcatttgtgtgtgctggaattctctgtctgcaaatacacactcatacggatacacatacagacacacagacatgggctaacaaatgcaaatatacagacatacaatatttttccaaaccctttgagatttcagggaagattacatacactgtagccacttaatcctaaattcttgaatgtgtatttcctaagaataggcatattctcttaaataaccacagtaatacgttaccactttcacaaatttacattgatgcagtacttttttctaacctgtccatattctaattttgggagttgaccatataatgtcctttctagaattttccctt

SEQ ID NO: 217546 - DNA, 339 bp, Homo sapiens
ctgaggcgggcagattatctgaggtcaggagttcgagaccagcatggccaacatggtgaaaccccgtctcaactaaaaatacaacaattagctgggcgtggaggcacgtgcctgtaatcccagctacttgggaagctgaggcatgagaattgcttgaaccctggaggtggagattgcagtgagctgagattgcaccactgcactccagcctgagcaatagagtgagaatctgtctcaaaaaattaataaatacggataaaccacagttatgcaattcatatggatggatgttggaaagatgtgtggcgaggtgaacaagcaagttgcaaacgtacagta

SEQ ID NO: 217547 - DNA, 122 bp, Homo sapiens
agtttatgctgcattagggttcactgaactctttagatcataggtttattgatttcatgaaacttggagacagtgtggtccttattctgaaattatttttgtcccccttctgtcgtcttctc

SEQ ID NO: 217548 - DNA, 432 bp, Homo sapiens
caagtcttttcagttagtaacatacttgctgagggtttgacaacaaagacttaatgaagattgtgataaattcacacagacacccaagtaaatgtaagcatccacagaaatgaggaagatttgttttatagactaaaattaaaaaatcttcaagaaagggaggagaagttccttcatccgtggaaaacaaaactcttgttaaacacccgacatcaggagctgttttcacatttcctttgccaacacaagaaacagttttacggtatctcatcctctgcccaagaatgagcaagaacagcttgtacacgcacatattataagaactgataactgagtccagcaatgttgcagcatgaaaaatcaacgtacaacagtcaactgtatttctatgtattagcaataaaccaaaaattaaatgaagaaaacaatttc

SEQ ID NO: 217549 - DNA, 750 bp, Homo sapiens
gcttaaacagtgcagctccaaagtgagggaataccagcaccagtaattttaagctaacacattccactgctgtgtaccagggacagtttaagtactttacatattttagctgatttaatcctaaacagcagtcctgtaaagagggtgtttttactatcccaattttatagataaggaaactgaagtgcagagagctagtaagtagtatggctaaaaaaattgaacccaggcagtttgactttggagtccatcttctgagaagttactgtatagtgtattagttaaggccttgctacaagagactttacagtgtgttcgagaaatagcagagttggtgtgagtatagcagaatgaatgaagataatggtaggagctaaggtccaagcagtggtatttagggaaggaatgaggtgggaagatttgactggacgtaagccactgtaaagactgggcttttaagtccgaagtggagcgtgtgagagtctttggatatttttgaacaggaggatgatatgatctgactttttacaaaatattttttactgattccttggacctttccttccttggagtctatgggtagaattcaggagggcccctggaatttagaagaaattacatctttattttcactaacttataactgaagcagtgtttccttcactcaatgtagccagttaaccatagtaatattagaattacctgtgactgttaccaccaataaaaatcacctctttgttgcatttatgg

SEQ ID NO: 217550 - DNA, 466 bp, Homo sapiens
agaatgagttaaagaattacttttcccactttgaggaccaggctctaggctcttagccctctggccattcctttggctacttccatgcttcccttgcctcccacacccacactttgttatatagcacactctcttacaaaggctgctgcactcaaagcattgtcacatcctgaagtaccgaggagcagcatctgagcaagcctgatggaattgctctaaaccaataaattgatttaaaaaaacaaaacatgtatgtgactattacttattttatattttctgaagataaaagatttttgtaagcccttaaatttctaccagattaaagtgaaatttcaatatgaatatcttacagtattgtgtctggctattttaaaattcattttagcattttacttaggaatttcagacctatgcaaaagttgcaagaatagtatactgaactcctatatgctcttcaccttgg

SEQ ID NO: 217551 - DNA, 330 bp, Homo sapiens
catttgtttatgtgcataactagtgtattatacacactaactttaatttggaatacagtaaatattgtattagtgtgtcatatatttactgaattaaaaattaaaattggttgggcatggtggctcatgcctataaactcagcactcagggaagcagaggcaggtggatcacctgaggtcaggagtttgagaccagcctggccaacatggtgaaaccttgtctctactaaaaatacaaaaaattagctgagcgtggtggtggacccgtgtaattccagctactcaggaggctgaggcaggagaatctcttgaacctgggaggcagaggtt

SEQ ID NO: 217552 - DNA, 417 bp, Homo sapiens
tacaaatgcacccccatagacaggttctggcatgctcatagcagcactgttcctaaagctccaacccagacactacccaaatgcccaccaacagtagaaagggaaaatcaattgtgatcccttcacacaacagaatgcaatacagcaatgagagtggccagccactgctactacatgcagccccatggaggactctcacagatacaactctgaacgaaagaggccaggcgtgaacagcacaggtggaactgaggagtcccaacccagggcaggaagggcacaagaacatcgtcctgtttgtggactcacctggtagttacccggatgtgttcacttttgataatttattaaggaatatttttatgattggtgcactttcctgtatgcatgttatatttcaaaaacaagttttcatga

SEQ ID NO: 217553 - DNA, 432 bp, Homo sapiens
ccccattatcaagctaaaagattttggcaacttgtgctctgttccactattgtccaaaaatctcagtgatccaccattctcatctagatgagacttcttctatagccactcagaggcggcctcattcttccttgcccactcctccgcagaactacatggacaggactggtgaccaagaggaaaagaaggaaaagaatgaagtctccctctgagactcatcttctaagatgaatcatattctatccaacaccaggagaaatatgctttgctttaggcatattttgcattatgccattgtctttgcttaaaatccttcagtgaggccgggcgtggtggcttacgcctgtaatcccagcactttgggaggctgaggcaggtggatcacctgaggtcaggagctcgagaccagcctggccaacatggtgaaaccct

SEQ ID NO: 217554 - DNA, 324 bp, Homo sapiens
agtagagacggggtttcaccatgtagccaggatggtctcgatctcctgacctcgtggtccaccaaccttggcctaccaaagtgctgggattacaggtgtgagccacagcgcccggccaagatttgaatctgtatttgttagaaataatttattcatgagtgttattaaattgccaattaaaaaactggcatccagatgtagttttatttctcttttattgtaaaatcctattaatacgtaatccagagttaagatggaaaatgtgcttacaatgtcctcagacatccagactcctttaatccttacctttctgtcatcttaggc

SEQ ID NO: 217555 - DNA, 507 bp, Homo sapiens
aatatgtcaaaggaaatggttatgcagtctgtagttatagtttctctctctctctctctctcagctacctcaaagaaaagatgaaattccctgtgtcaggattttgattctatgctcaaatatttttatggtgaattaccaccagtgattgtcatgttactaagaggtcaagaataactagccccatgtcataaagaagcacggctgaaggttcgatgttactttgaaaccaccctggtactctgcagcagaactaggagcaagactcaaaggctgctgtgccgtctttatttcttagctcattctttcattctttagaagggactatgccttgctttagaagatgctgtcattactttgtgacatttattatgagtttaacattaagcatacttgttacctgtatctgtgttggatgagtttgtatattaaacatctgtagccacttgacacagatgaggacctacttatactgtttatacatttataaagcttctttttttaaaa

SEQ ID NO: 217556 - DNA, 430 bp, Homo sapiens
aatcaccagccccaggtggtttgctgggtgagagctagcagatttgcaaggaacagagagttcccaactcacccaaactgttcaccagcatagaaaaatagacatggccactcaatttatagctagcaaaaccctggccccaaaaccaggtaaggagagcaagggaagagaaagctataattcaatctcctgtaaaaagaaatgcaaatagcaaaatgaaaccatgacagaatgaaaagaacaatatacacatgatcaggtagcttttatactaggagttttaaaaaggaaactatcaatatagttttatatttaaacagattaaagaccagaccatgtaattaccttaatgtaacccacgctgataaaattaaatcaatgatgcaagtaaatgctttgtatgcaaacagtgatgccccagcacacatac

SEQ ID NO: 217557 - DNA, 149 bp, Homo sapiens
aggtactagctaacacagccaagaaagttaacaatagagccgtaagtatttcccagatgaagaaaacacaagtttagcttcacttttgttttggaatgcaaatttatactggttgagcatcccaaatctgaaaatccaaaatccaaaac

SEQ ID NO: 217558 - DNA, 629 bp, Homo sapiens
attccataaaaattagactgcatttctggagaagtgccatctggcaggaactgataagaaaagagcttcaggaactaaaatgaacaattactttgaaatgtcccttcttacttaccatagtcaatgaagaagatatagacatggattaataatgaaatccagaggtatttgttcatgagtatacaaataccttaagaaggctttaaatatctgagccatgctactaagacatcaagaaactatgatactctcagtagcgctgtccaatagaactttctgcaatcatggaaatgttccatatctcctctgttcaaaatggtacatactagccacagtagctaataagcacttgaaatgtggctactggggctaaaaaagtcaatttcgtttttgttttttaagttcatgtagatgtgactagtagttagcattttggacagtacagctccacaatatctatgattcacattaggagcttactaaacatggaagggctactggaatctgggcctaacaattttatctgaagacagttctaaatcaagggtttaaaaataaaaggtcttcatcctattccttatcaatatagctggagaaacaatctactttataaaagaaatcagcataaa

SEQ ID NO: 217559 - DNA, 500 bp, Homo sapiens
aattcatggttccatgagcctttttctttttactcaaagaaatagctaagccttagagagccatctcaagatgcctatggatggggagggcaatgcagggacatattacaccttctttgagtggctttgggctgtctgaacatttgaatcccagcttctaaatggtaactgtaaaaagccctgatgtcattggattatgattaagaataagatttttaggccaggcatggtggcttatgcctgtaatcccagcactttgggaggccaaggtgagcagatggcttaaggctaggagtttcagactagccccagcaacatggcaaagccctgtctctaccaataaaaaataaaaataaaattagccaggcatggggatgtgggcctgtagtcctagcttcttgggaggctgaagcatgaggatcaattaagcccagaagattgaggctgcagtgagccgtgattgtgccagcctgggtgacagaatgagaccctgtctctaa

SEQ ID NO: 217560 - DNA, 377 bp, Homo sapiens
agatgataaggacaaagtacaagatgaagggaggtccattggtcctttttgtggagggagaacttagaatatgtatacaaaggctaaacaagagctgtggaataaaagctaaaggtagaagaagaggaaatatgtcctatatcactctggtgtcatatgctgccgcacaaaaactcagttgtactcttcaacatgatatatactagctgttcactttccacatatccatcatttccaaaaacattctcaaccactaaaagataaaaatgtctgtgaccccagggctttcaagttcctgttcattcagccttccaaccattcatccatctattcaacaaatgtttattaagcacttaccctgtcctggtttgtacacg

SEQ ID NO: 217561 - DNA, 592 bp, Homo sapiens
gctgggactacaggtgcacactatgcctggctaattaaaaaaaattttttttgtagagacaggggtctggccgtattgtccaggctggtctcaaactcctggcatcaagtgatcctatggcctcggcttcccaaagtgctggtattatgcacgtgagccaccgtgcctgatcttttttttctatttcctttttgttttcctatttctatcttcctttttgtttgtttgctttttttagagacagggtcttgttctgttgcccaggctggtctcgaactactggcctcaatcctcctgcctcccaaagtgctggtattacaggtgtgagccaccatgcctggcctttttttttctatttaattctgccttcttgtttgtttgtttgtttgttttagagacaggatcttgttctgttgcccaggctggtcttgaactgctggcctcaaacagccctcccaccttggcctcccaaaatgctgggattacaggcatgagccaccatgccgagcctaatttctgcttttatctctattaactgccatctgctttcattaggtttgctttcttcctttatgttcatcctttctcttca

SEQ ID NO: 217562 - DNA, 509 bp, Homo sapiens
taatacctagttgacttcatggtgcatggagactatccttccaactccatgacttctcaatttttttacctcttactttatttatgttacccactcactccctttatcgtcccctagtctttgtgatttcccagtaacatcacctcttgcgtgaacctcacttgcaagaatctcactaaccacccctaactgcacagtgcataccttctggttcccagactccaacaacctccctcccaagtcctcattttggccctaagtagccaaagtccatagtccatcattataattaattctctgcagaaaccatcagctaaattggtctgctcttgccccatcatactcacctgacaaaattccaaccataattaaatcttactccatgcctgcacccataaaccaaactttgctgaagataattacactaccatgctgaccatgccttctttaaattcatggtcactatcttcaatttggacccttaatgctgcctggcaatacataggcaa

SEQ ID NO: 217563 - DNA, 347 bp, Homo sapiens
atattaggactagtgtgtactgaatttactagtaggacattatttttcagatcttcaagaacattggtaagctggatgcagtggcctgagcctgtaatcccagcactttgggagactgaggcaagtggatcacttgaggtcgggaagttcaagaccagcctggctaatatggcaaaaccccatctctactaaaaatgcaaaaattaacaatgcttgatggcaatgcctgtaatcgcagctatttgggaggcagaggcaggagagtcacttgaacttgggagttgccgtgagctgagatagcgccagtgcactccagcctgagtaactgagactcctatctcaaaaaa

SEQ ID NO: 217564 - DNA, 363 bp, Homo sapiens
tgacgcatgtcttacactgttaggagatgaaacttgctggccagtatgtgcaattaacggttcctgatacactgttattgttatttggtatgtctggtaaacagccacaaatatattactcattgtttgcttctcagatatatttctgattaatggtttttgccttacaattgttgaaccccaaatttttcacaaatcaactacaaaaggacattgttattacatacgaaataaaagttctttacagtacagactatactagttagaaggttttgtatgtaaacctctgcttatcccaagtcacactgaattggcactataatttccatttacttcccctttcaataaacttttaaactctga

SEQ ID NO: 217565 - DNA, 302 bp, Homo sapiens
agtcaaattaggtaccccttgacattttagtcagcttgcgttatcttggtgagtggccttctgctgacaccgcaaaagaagattgtggttagagcctgttctgagttggctcaagttgactccactgttgttcacaacttacattaatgggatgactaagtaaacaagtaattaccttaaaaaaaatcttagaagcctggcatggtggctcatgcctataatcccagcaggtgggaggattgcttgagcccaggagttggaggccagctcgggtaacatagcaagacccccatttctaaaaa

SEQ ID NO: 217566 - DNA, 455 bp, Homo sapiens
tagatagtgggatactttcctttctgagcaaacaatgagaaaggctgcttcctctccaccctccctatccccgaccctgggcatcgcactcctctacctagacatcactataaaaagacagccaacaataaagatgggtctggacagtaggaatgcatgtgtggcggtatgatctctagtatgaggaccaaaggacctctacaaccaaaagagatttccaagaccttggtatatctaaagaggactcctcaaagataagaccacaaaagtgaggaacaattcaacaaggcaaccacacatgaccctgtgtaaagcattcctgaagctgaagggaaaacaaacttcaaaaatcatgacattgctgaatgaaagcagaaagtctttaaaatgcgagtttttcattaaaaatattaaatgcaaaggcgataaatgcttaaagaatataataaaagtcg

SEQ ID NO: 217567 - DNA, 413 bp, Homo sapiens
ctggaaagtctcagcaatagaattgaacaagtagaagaaattcagagctcgaagataaggtcttcaaattaacccaatccaacaaagacaaagaaaaaagaacaagaaaacaggaaccaagcttccaagaagtttgggattatgttaaaagaccaaacctaagaataattggtgttcctgaggaagacaattctaaaagcttggaaaacatatttggggaataatagaggaaattttccccagccttgctagacacctagacatccaaatacgagaagcatgaagaacacctgggaaattcatctcaaaaagatcttcgcctaggcacgttgtcattaagttaaaaaaaaatttttaaagaaaaatcacaaatcccaacatccagatagagttaaacaaaaatcaaatgcatc

SEQ ID NO: 217568 - DNA, 395 bp, Homo sapiens
gggattggcttggaggtgaggaaggaggaagaaaagcccagcactggaattagtccattgttatttcaagataactcactattttatggattatatttgtgtaagtattttacagttacagaatgcattaaatatattgaatcattttgatccccacaatgtcattatgagggaagatcattagcttcattttgtagctgaggtctggttaacttgccaaggtcatgcaggttgacccaaggctcaaaaccaggccttctggctctgggatcactgtttcccatcgtcacctcatacatgggtggatagaagtttgcgacagaaagagtgaatgaatgattctgtctccctagctagatactacagaggatatggaggtaaataatatttggttt

SEQ ID NO: 217569 - DNA, 389 bp, Homo sapiens
actccacctcaaacaacaacaaaaacaaaactagctttagcattaaagatgcactaatgcgagataaaatttggttttctcttttgaagaatatttttatgtaatattgacagagagagacaatgaaagatttttatttggctttggagtaaactattaaaaaaaataaaagaaagattcagttggcctcatgctatcttcactgggttttgttgtttagaaagctgagtcttctctctatcagagtaaaggtttttcctgttacaaaatgtttgagttatcattgtggctaaatgaattacttatggtgacctgggattctactttgtgatatctagtgtttcaaacctttgatatttaacatacttcccaagatcaaattctaagtt

SEQ ID NO: 217570 - DNA, 466 bp, Homo sapiens
ttttttttccttggtagcgatcaaaatgtcgcgagtttctacacacatattttacagacgttccataaatcttcccgtggtgcctcttctctataagtaaggtcccttgggaagtcattgaggcttcctcactacatgtattcaagagaaaattggttgtaacacttagagaaggcggctgtccgggagggggaggtaggggtggggagtgtggagaagctagtccaagttcagttgccaaggacagagagacaaggaagcctccttttcttggaaattcctgaaatttccaaactgtcttttacttctcatgcacaaataatctctttgtgctatcttttttatcctttttgtttacttatttctaatcgccagaggggtcattctttcgcacaaaatctgaaaaagtagacagaagtagaaagaaagatacaaccaaccaaataaacaaaaatcccacgacaaa

SEQ ID NO: 217571 - DNA, 534 bp, Homo sapiens
atgaatgggcttaatattctacaacgttcatttattcaacagaattgtattgagcagctattatgtactatactacatggtgtaagcccaagatatgagccaagaaaaattaagtattctacataaataaaatttacattaaccaaaatattgcaaaacattttaaaaaatcatttttatattttgcccaaatccacaaagtttgtaaagccaataatgtaaaatctccaaggacttgttaacgaaagagcccacctctaaataatctatggatcaaacaaatctcatgggaatttaaaaaatgcattgaactcaattaaaacaaattcagtatatcaaaatttgtaggatgcagttaaagcaatgcagggaaatttctaatactaaaatgtactaaagagtacagcagaaaaggagaagtttcaaatcaataatcgaagctcactcctcaagaacctagagaaagaagagtaaaatcacccaaaggtaagccaacaaaaggaaataataaagagctgaaatcagtgaaactca

SEQ ID NO: 217572 - DNA, 517 bp, Homo sapiens
ccaaatatcagttattttaggtgctgttatgtttttcatatgctgttccactcttacatagaagatgtttcacctgcttagatgttgtagaccgtggtctgaagccagagctaaaggctttattttagttgttgttttgagaagcataatctaagatgatgcttaagattttgatatctggggttaaataatgtcataaagaaaaaaattttgaattattttggagtggaaagcttcagattctgaccctaaagaatgttaagaaagcattcaggcacattttggtcaacatctgtgcattgaaatctaggtcttaaaacagtttatattttaagattatttcagcagcaagacaagaattttttaatgccagtacattttgtgacaggttaactggctccctaagaactatatttggcttgcaaatgtattttgtttggcccacatagtgttttttttttaattggaattaattgccagcatttaaaaataaggatatttcataataataataata

SEQ ID NO: 217573 - DNA, 694 bp, Homo sapiens
tgctgtggctcatgtctgtaatcccagcactctgagaggctgaggcgggtggatcatctgaggtcaggagtttgagaccagcctggccaacatggtgaaaccccgtctctaataaaaaatacaaaaattagctgggtatgatggtacacgcctgtaatcccagctaattttttatttttagtagagacagtgtttcaccatgttggtcaggttggtcttgatctcctgacctcaggtgatccgccagccttggactcccaaagtgctgggattacaggtgtgaaccgccatgcctggcgcactcacacagttcttaaattgttgttataagaatggtatgtcagaccaagttacagtgaaagataatccctgaagaagagcaggtctttttagacttggaaaaaacactaggtggagatagttaaaatcctgattctgccacaatgagtacaatacactattagtttctttttttaaaaaacgtatttatattataagaaagtagaaggaacacaaaacatttacattcatgtaatgtgaactcaaaatttaggcatggtcaaaaatggctcttgaaaatggtgacatttatatttttgaaatgtatcagtatctaatttcccctttatataatgagctactggaaagaaaataccatgtttcaatctacagtctctatatttaatagattcct

SEQ ID NO: 217574 - DNA, 410 bp, Homo sapiens
  misc_feature (13)..(13): n is a, c, g, or t
gggaaaggggggncccccccccaaattggaaggagaatcttttgtatctctcttggtctcatacctcccctgaattgtctaaaagggaaccaggggcatttgtagaccaaaatgatgatcttcatgccctgagccagagccccatccactgtcactggccctgctcaaccctgtcatgcgagaggctgcagggggaggaagagcgtcagctttcagtcctcatgaggggtcctgttccacacgcaatgaccagaaacaccaaggccccagctgcccctgtgatttgggcaattaactgttttaagagtctgccccctcctctctgaggtcaggccaccatcacgtctcacagtgttgagggataaaggccactcccacctggtttctctgccttcgaattgtcctccaac

SEQ ID NO: 217575 - DNA, 404 bp, Homo sapiens
ccccacacctggcatcccttcaagggaactacagcttttgcagctgaggcctctgcaggcagcaagtttcagtggtcaccactgagatggtaaggtgaggacaggggaagctggcatttttggccttgataccggagaaagacaagggataccctgttttgaggtggggggtgggtacagagagagatgggcactgacctctgattcattagcctagaacccttagggaagttttcctaggtattcttgcagaaagcagaaatggagcaacgaatccttttgttccatactgaactggaggtggaactgggataaaaggtcaagacaatttgtggataatccagaggtttattctcagatcctcttctttcccatctccaaataaagacttaagctttgtcaca

SEQ ID NO: 217576 - DNA, 596 bp, Homo sapiens
agtggtggctcatgcctgtaatcccagcactttgagtaacttatcagatggttagaaaatacaacttttaaaggttttgaggctacagctaaaacaaagatacttaagacagaagacagaagaggatagttcttcagagcatgagaaaaaaggaaaatatgatctgactccatgaatctaggagagagaactcaggctggcaggatggacatacctgataatctggccagaagactggatgaatcctcaggttggctaaaaattgaatgcaactgtaggctgccaaatgagattaatgtttgaagcagtctctttgcaaatactattagaattttttggctaataatgactaagataactcttccttcataatcaaagttacttatttttgcctacagttccccaggtatcctttactgcaggtgattagctgggaacaaaatccagcttagtaatactagaactgtatcaacttttgactgtccatttcactagctaagctgcctccattgtacatgtgttcctgataatgaactattctcaaacatctctgcctgtcatgtatgtatcagggacagaaacactttcatagttta

SEQ ID NO: 217577 - DNA, 579 bp, Homo sapiens
tgtatttttagtagagatggggtttcaccatgttggccaagatgatctcgatctcttgacctcgtgatccaccctccccggcctcccaaagtgctgggattacaggtatgagccactgtgcctggccgaggttttattttcatatattgctgttgagagagccagtccataatggtgatttcttttttcccccaaaggttttaggtattaaaattcacagtgctgtgttgtggtatagcctttcttcacttattatgctgggtactttgtgtgggtctttttaacttggaaactcatgtccttttgttcaggaaagtatttttgtgttatatctaataatttcctcccctgttttctccttctggaacttctgtgaggaaatttggttagttgtgtaatcatgtttttctcacctatcctcctttctctttatttttttaatcttctgagagatattcttttctttaccttccaattctttggaacttcgaatatttgttaaaaattttaattctacattctagtttttttctaacatttatgatatttgtcatttcacgtaaaagaggcttatgaaat

SEQ ID NO: 217578 - DNA, 633 bp, Homo sapiens
ttttttttcctgcttctcataaactcactttggtagtgactagaatctactttcattaaacaaaagtgaaaaaagacacatgtatacaagtaatcccaatgagagttttgagatttttacaagactttttcatagaaaaatttttgacttatagtaagtatgcaataattgctactattttttttaatttgcagaagggaggtttttcaaatgcagttctttctttttcactctctagcagtttagagtggctggacaatatcacatcacttatatagtcaaggaaagaaacagggctctagatgggaggaggtggaatttgagaacatgattatagaattgtaggtacaaggccaggcgcggtggctcacgcctgtaatcccagcactttgggaggccgaggcgggcagatcacgaggtcaggagatcgagaccatcccggctataacggtgaaaccccgtctctactaaaaatacaaaaaattagccgggcgtagtggcgggcgcctgtagtcccagctacttgggaggctgaggcaggagaatggcgtgaacccgggaggcggagcttgcagtgagccgagatcccgccactgcactccagcctgggcgacagagcgagactccgtctca

SEQ ID NO: 217579 - DNA, 416 bp, Homo sapiens
cccattctttgcaaagtcatttctctgctgtggggataaatgcatatgtgattgattgcttcctttggaaagggaatcagaaactcaaaagaatgcaactgtttgtctcttatctacctatgacctggaagccccttccctccttcgagttgtccagccttttagacagaaccagtgtacatcttacatatatggattgatgtctcatgattccctaaaatgtataaaaccaagctgtgccccaagcaccttgggcacaggacttcctgaggctgtgttacaggcgtgtccttaaccttggcaaagtaaattttctaaattgactgagacctatctcagatattttgggttaacacatacttacatattttcaggatgtgatatagaaaaagaatataaaatatggaaaaagaata

SEQ ID NO: 217580 - DNA, 258 bp, Homo sapiens
gacaattttacatttagttttcttttattttctccttttttttcccactgacaggcaaccttgaggttatttatattctgctgaactcatgggaataatacctctattgattataaagcatttttaaaataattggctttaatgttgttgagacgttaaggaaaactaaggctccgataacaaaataccagccataatagttaagaagctggagtgagaatgcccatgagtaaactctgggcttgccactttttactt

SEQ ID NO: 217581 - DNA, 435 bp, Homo sapiens
ttatcattggtgttgagtaatttgatcaggatgtaccttgatgtggttttctttatgtcttttgtgccactgagattcattaagcatctttaatctgtgggatttttgttttcaagaaagttggacaagtttctgctattatttcttcacacatggttttctgttttttcttcattattctgtcttttgtggggagtccatgtactgtatattaggctgcttaaagttatctcacagctcactgaggctatgttcattttttaaagttctcttttctctgtttcactttggatagtttctattgctgtgtctttacacttagtttcttttaacttttttctttttaaattgaggtagagtctcacctcagtttatgaggtaagactgtgttgcccaggctagacttgaactcttgggctcaagctatccttccac

SEQ ID NO: 217582 - DNA, 430 bp, Homo sapiens
tcgggtgggactggtggtaaacagtccaggtgataattgaggtggcagcagagtgagcatgcactaacaagaagacgggccatcgcgagggctaaggatggggcgggccatcccgagcatgtgcctatgcggacctgtttaccacgttgtggcagccttcttgttcagctctagttgctgagcccatcagcgtagttctttccaaggtcaaaggtgttttaggaacagaggaaggaatctaagagtatcaggctatgtactgattgcgttattttattcaattacaagaacgtgaggaaggcatagttcttgttcccatttgacaaataaagataatgcaaagaagagattgaagagcaaagagctgtgcaccaaaagttggaagttagatttgtttgattccagaccccatattccttggagcttcccc

SEQ ID NO: 217583 - DNA, 431 bp, Homo sapiens
ggaataagaagggcataaaaatgattcttaaatactccatgtttcagtaacagctcctaacagcccataattcagtgcattaacaaataaatagaattcacactctcctctatcacaaaagtggtaacgactggcataaaagttttcagaaaagatgtgttcggagtgagatacattcaacaccagaatctgctggagacagagttctccaggctcttcccctaagtgacggaagcattcattgttagttgcactaaattgcttcatttaattcttgcaatggccttatgagatcagcgtcattaaacacattgtacagatatttttttaatgggccacaaacaaagtaactaaccaaaatcacagctggcaagtgatggattcaaacccaggtctctccaattccaaagtccctgctctaatcatagcct

SEQ ID NO: 217584 - DNA, 546 bp, Homo sapiens
agcctaggcgacagagcgagactgtctcaaaaaaagaagtaattgtgtgtgtcctacaaggctgcgctggtgtcttgatcctttggccttcaaatagcaaaggtttgccattccttaggagtcattaaactcccttcacccctcatctattcactaaaatataggagcactccacaaaatatgcaggtccaggagagaaaggggcaaatgatcaggctttttactaatttatccactgacatgtttggtcattttgtggctcattagtagaatccatatttagagccaaatgctagagctcattttcttttgtcttttcgacaccagttaatgaatatgaagcccaaaaagatgtgcagatgtggtcaagctccccaagcaagactagaacccaggccaaatagtactactcatatttagaggtaatatatgttttctagtggcacatttatgccagagcagttttttaatataatgcatttattagccaacccttacctagttatcatcaatacttcatcagtgtgttgatgatagcaaaaaaaa

SEQ ID NO: 217585 - DNA, 496 bp, Homo sapiens
cagggctccttctgaatctcagatccttggggatctgtgttggctgccccagggctgtggctggggccggctccccagggctcaccgagaatgaacaggaagaacagccagaccaagtgagagtgatcggcagcttgctaacccagcctgctggtgtccctctctgctgccccaggagagaccccgcatcttccccacacactgctgtgggactcaggacaccttgggttcagatccacatctgccctcggcagccctgaccctgggcctgtggctgaatatgtctgagtccctttgtcctaaaatgaggtcgagccaggtgttcctggggtctttcccagcccccaactgaaactgaatgccgcgaggcagccagccggccttgggaggcctccacacagcagcatactttgggaggctgaggcgggaggatcacttgaggccaggagttcgagaccagccaggacaacatagcgagaccctgtctttatataaa

SEQ ID NO: 217586 - DNA, 742 bp, Homo sapiens
cagggctccttctgaatctcagatccttggggatctgtgttggctgccccagggctgtggctggggccggctccccagggctcaccgagaatgaacaggaagaacagccagaccaagtgagagtgatcggcagcttgctaacccagcctgctggtgtccctctctgctgccccaggagagaccccgcatcttccccacacactgctgtgggactcaggacaccttgggttcagatccacatctgccctcggcagccctgaccctgggcctgtggctgaatatgtctgagtccctttgtcctaaaatgaggtcgagccaggtgttcctggggtctttcccagcccccaactgaaactgaatgccgcgaggcagccagccggccttgggaggcctccacacagcagcagtgccagaaatgacgacacaggcctcaagcccgctggacagatccccctggccctgtggttagccttggctttggcccttaacagggcagacgtggaggatctagttcaaagcagtagcttcggggctgggagcagcccctcccctggaaacctcttgggaagccttccttctgtgtgttctgaggtggtggtagctctgtaacagctctgggcacctcctgttctttctttcctttggctttctttactttgggaggctgaggcgggaggatcacttgaggccaggagttcgagaccagccaggacaacatagcgagaccctgtctttatataaa

SEQ ID NO: 217587 - DNA, 535 bp, Homo sapiens
ttcttttaacatcagtgggtaatcttacctcacaaagttagatgtaatatggaaaaacctctacaattttcaaacccataataatcaagttctataatcaccaaaaaagaaaagtacaaaagaaaaccaatggtgagaactcttataaagcaagtacaaagacaaaattggctatgcactatcattaacagaagctatcacggctcctttgtaatcttaagcagctattccatgatcttttctctcgcaatgatgaaccgaacttttgataaaatatttgatctccttttagccaaaactcttctttataagcccatttaatattccagaaggattttctttcgtttgaagaaatataagtttgacattctaaaggcatttgtattttaaagcctacaaaaagatttttggagagtacctggtgaagtaccgacttgcccctgtggctcaaaagttcaattattatagacatttcactcagaacagcatttctgtcttttaaccttcatctaaataaatgttcatttttataaaa

SEQ ID NO: 217588 - DNA, 540 bp, Homo sapiens
tcaagcctcgggagctcacccagcaatacatagctagggagaaggggtagggagaataaaaatcagcgaaagccaggatattaataaagagttttgatggttaaggacaagcaggcgaattaagactctggaaaccgagaaggtgtatagaaaagaaaaccagagagctggacgacaaggacacagtaacagcacaaggggattcatctaaagggcattccgatggagcaggcaggctgcgccccgaaaggtggggagaggttggaagcagatgggcaggcacaggcgagcgtgcactgcctgaaaaagttttcatgatggctccagcctaatttcccaacgctggtctcgggcgccacaaaacctgggcggcccgaccggagccaggtgccagcctcagggccgccgggcccggcgcagcgtccggaattcctgcgatgtctggggcgcggcggtggctcctccccgcccccaccacggcctccgccggcattttccggctaggaggcccgccagcccttcgaagaaccggctccacgc

SEQ ID NO: 217589 - DNA, 867 bp, Homo sapiens
ttttgccttgtgttcaagactaaaacttttttcttgcttcattttttccttctggtcattcttgtattcctgtaatacatgtggtaatccgttgctgtgtcctacagtttatgatgctctgtttaaaacaaaaaaaaaatcgattttctgtttgtcggatcggataatttttactgatctatgttcatgcctactaacttttccttctgtcatatccaatctgctatttagcccattcagtgatttttaaaaatatttcagatactatattttctacttctaaattttccattgctttaaaaaaataatttctatttctctggtgtgatttcctatctgtttaatcattgccagcattttttttcacaattaataagttttatttttgatatttatgttcatcgttttatcactttttatgaccgaggtttagtgaatagttttaagtttttgttaagtaaattagtaggccctcctgtactctggccctcctttctgtgttagtggtgttcacatcagttttttaaatgaatgatttggtgctcctggtttctccagtgtattttttgttacggcttctgcttttgtttgtttgttttcagacaaggtcttactctgtcacccaggctggagtgcagtggcatgatcacacatcctcgacctcctgggctcaggtgatcctcccacctcatcccctcgaatagctgagattacaggcgtgcaccaccacacgcggctaatttttgtatttttagtacagatggggtttcaccattgttgcccaggctggtcttgaactcctgagctcaattgatccacctgcctcggcctcccaaagtgttaggatcacagacgtgagccaccact

SEQ ID NO: 217590 - DNA, 258 bp, Homo sapiens
catttccaagtgaggtacctgattcatctcattgggactggttgggaagtgggtgcagcccatggagggcaagctgaagaagggtggggcatcacctcacccaggaagtgcaaggggtcaggggatttccctttcctagtcaagggaagatgtgagcaactgtacctagaggagtggtacactcctgtccaaatactgctcttttcccatggtctttgcaacaggcagaccaggagatttcctcctgtgcctggtttg

SEQ ID NO: 217591 - DNA, 776 bp, Homo sapiens
tgataaggagaaatgggatgtatggaaggagaaagtgggtggaggtcttacttgtatatgagggagtcaccaagatgtccttcagtaggtgaattaataaacaatctgtattgtatctagaaaatggaatattagtcagcattaaaaataaatgtgccatcaagccatgaaaagactcaagaggaaacttaactgcatattgctaaggaaaaaaagccaatctgaaaaggatacagacttcattcatctgactatatgacattgtgacagtaaaaagatcagtagtttccaggaattagagggagacaggggatgaataggcagaacacagaggatttttaggatgtgttctgagacccccagtggatacctgaaacctcaaatagtattcagccctatacgtactatgcttttttctatacatacatacctatgataaaagtttaatttataagttaggcaatttataaattatggtaaaagattagcaacaatacctaataataaaatagaacaatcataaaaatatgccagcatcgctactcttgagctttagggctttaagtaaaacaagggttacttgaacacaagcactgtgataccaacaacagttgctttgataatcaagattgctattaagtggctaaatgggcaggcagcttatgtggtgtggatatgctggacaagggaagattcatgtccagggcagaacagagtggggtggctacagatttcatcatgctactcagaatgggatacaatttaaaacttaggag

SEQ ID NO: 217592 - DNA, 502 bp, Homo sapiens
cttgggtccctgagttaccagtctctccttctctcatgatcatattatctgggcattgcccacatgcccgcttcctttttagccctgtagacacagtctatgtctatactttctccctttgtctgagaactgaccttcctgactgaagttcacaagagccaacagttggctcttatagttttcagagacaaatctccagggttcaggcagctcctaggccactcggaatgacatcgttgcttaaaagcatcactttactctaaatgagcctcagaacacctcggagcgcggtagtacctgttactatttcagagaaggattgctaagagtacttttattgtaagacttaaaggtttaaaacgtcttgtgagcttttgctgtataatttcaataaaactcataaaaaaagaggaataaaaaagaaagatagttttttgttttaatttatttacatattgagcattttttaaatgtcaaagcaagaagccctcctaagtaccaa

SEQ ID NO: 217593 - DNA, 370 bp, Homo sapiens
atttgccttccaaatcctgctgcctttgtgctgatttttgtgacaagttctaacagcttcctgccttttcaaactctctgtgtacttttacaacaggcacttacaaaaattaatctggatcagtgtgtgatgaagagtgcctttagtaaacaagtggtttaaccttgagtgttggccaaaactggagaagtgaagacaaccaagaaaagcttgttacagaggagggagggagaaagaaagcaaagatgtctactgctgttcatgtgtagtgcatcagcttagccagacttgtgaactaagggcactgctacttttgaaattttcctgagagttaaacaagaaaaatgaataaaagaatgaaagaaccatt

SEQ ID NO: 217594 - DNA, 486 bp, Homo sapiens
gctgacattgtagaatgaattcatgaattttacaagtataatcaaagacaaccaaaaatttttactttttccttcaaaagctaagtgtagtgtagctcccccatagtctaagttaaagaagaacactaactgcctgtttttccttctgtgctcagcaagccttatctgtacttgctagtttcacattccttgaggctcagcgagttcctgcttcaccaccctagcgcagctgcaaagttacaaggttgatgcagaaacatggtttcccagggatgtggaacatgtagtatagataaatgtaaaagactgaacaactgcctttgctctcgcttctgtaagtacgcttcctgcctcgcgtactcccggccaccgactgcttaaaaggtggctgctttctttatccagggctcagactttcctggacgctagtcctactgagccaggtgatcaccttttaataaagacctttcctgaactcaaaaaatt

SEQ ID NO: 217595 - DNA, 630 bp, Homo sapiens
cgtggtggtgtgtgcctctagtcccagctactcgggaggctgaggcaggagaaacacttgaacctgggaggcggaggttgtgggagccgagatagcgccgactgcactccagcctaggcaacagagtgagactcagtctcaaaaaatttggtagcaacttcagcacagactatggaaggaacaggtcaagatacccacctccctttctccacatgtcactggtttatccatatagggagatggtggcgttaaactattataacttgacagcgaataacgatcatctaaccaacttttcatgctctaattcatgctcaccaatcatccttccatggatttgctgacaggaagagtgtttttctgatttgcaagtgtgtgcccagtctgcctgtctctctaatttctggcttgctttcaaattggatgccgtgattctgcctcccggaatctggtatataatagaaaagttgaatttccaagtattttaggctaaggaacatagctagtctagggtactgttcttagaagatcagatgaacttccccagtgggcactcctctgttccatgtagaagcagcttttctcagaattgatggctcatactctttgacatttattttggtacagagg

SEQ ID NO: 217596 - DNA, 424 bp, Homo sapiens
gctgtgaatgccattatttcattcctttttatggctgagtagtattccatggtgcgtgtgcgtgtgtgtgtgtgtgtgtgtatcacattttacttatctacttgctgattgatggacatttaggctggttccatatttctgcaattgcaaattgtgctgctataaatgtgtgtgtgcaagtatctttttcatataatgacttctatgaaagctagtttaaagtaaggaggctggctaatacaaaacaaaatatcctctctgctcttttcatagactgggaaggactaggatttgcttcagaaaacctatgtttgatgtcttttactatcctttacgggtacatgggcctggcatgtgcaacttaaaacttcaaaactcagggtactactctaagtttgaaataagttaacatgtacaaaggcac

SEQ ID NO: 217597 - DNA, 464 bp, Homo sapiens
caagaacacaggcttcagagaaacatgcaattgattgacagcagggaagaaggcaggccacaggtgagatatgaagactaaaataagacagcaaccaggtgtgttttaatcaccaactcagcagagctcagaaggcctgagagcattgttgtatcacagaaatgtgtacgatgagttctgccaagtaaagattagtcattatgagaagctcaaattatgtcccatatccttttattaagaaatgtttaaaaattattttaggaaaaaaatttccaaaatcttagttactagtgtcctcagataagcaaaagaaaaccaaaagcataaaagcaacaaacaacaaaaaatctatctattcagtgcttctcattttcttaagatttcatcgtgaatatagctttataatgttgtaaaagtcaacaactttgaacaacatatattaacagtatacatttttattttaa

SEQ ID NO: 217598 - DNA, 324 bp, Homo sapiens
aaacaaacaaaaccaaaccccagggctgggtatggtggttcatgcctgccatcccagcactttgggaggtctaggtaggtggatcgcttgaggctagctagttcaaaaccagcctgagcagcacggtagtagtgaggccccatctctaccaaaaaataaaaataagtgagcggtggatggtggtaagtggctgtagttctagctacttgggaggttgagctgggaggattgcttgagcccaggagttccagattacagtgcagtaaactatggttgcgccactgcattccagcctgtgtgacagagaccctgtctctaaaaagg

SEQ ID NO: 217599 - DNA, 314 bp, Homo sapiens
tttgctaagcatttctgtttagggagcacatattcatgggacagttgtttttgaatgctttgcctgaaattgcttttatctccaggctccccatgtgtcagtttgaaagagaaagcgcttagcatgcagcctgggcatcacatgtgttctgagatgctggcacatggaaggcttaggaggttccaaatcattgcctattggccacccacaggctaatgaaggaaatgtcttttcattttctctgcttctctcggacttaggtgccttatcagcagccagggagagctgggaatacgactctggtgccagggacc

SEQ ID NO: 217600 - DNA, 153 bp, Homo sapiens
acaggcatacatgtgcaactgtacgtgcactctaggaatccctaatgatcatggccatcgggtggctcgcagtgcactgagcaccatgctctgtccctggtgtcttcatgcctcagtccacttgatcccctcagcatcctcctggggaaggtg

SEQ ID NO: 217601 - DNA, 213 bp, Homo sapiens
atgattttcttgtattttttgagttctctgtagaagtgtgacaattttaggctcctttggaagcctcagaaccaagaaattttgaaagcagctatttatataggaaaatgcctctctgacattacatttagtttattaatatttaaaaatattaattgaacctcattgtgtccctgtaatttttctaattgtataagtaaaatgatgagcata

SEQ ID NO: 217602 - DNA, 545 bp, Homo sapiens
cccaccctgcttaagacccagattgcgcgtcttacatctgagctatgtggactccagctccgattgttaatacttgcccaagaaagcttgagggtaatggaaggttatttttctgttctcattgaacttcccaatagacatttgcaggagctttaatcaattaggtgatggccactttggcaataccacgttggagttttgcttcagaaatgctttcctaatccccttaggcaccacaccttctaaccactaatattccctaatacctcgtggctcctgagaaactaggtctcatcaaacctgttaaggataagtataataaattaatagtagagcaaactacttagagttaactgcttcatactttttcaaaaaatcttttgaatccttttgctcataggaaaattgcatatgtactaaattctcaaattgtttactttgagtatctgttgactaaattgatgtttgaaaatggttatctcttcacctatataagtagcctttcagttgtgtaatttttaattattaaattttaaagcatcagt

SEQ ID NO: 217603 - DNA, 408 bp, Homo sapiens
gagacagagtcttgctctgtcgcccaggctggagtgcagtggcacgatctcagctcactgcaacctctgcctcccgagttcaagtgattctgcagcctcagcctcccgagtagctgggactgcaggcatgcgccaccacacccagctgatttttgtatttttagtagagacggggtttcaccatgttggccaggctggtcttgaactcttgaccttaggtgatccaccctcctcagcctcccgaagtgctgggattacaggcgtgagccaccacgcccagccttagatggcaccttttgatgcactgtctgcacctcgcctcctccagtccaaggcccagcgcagcctccctggacacacagccacccacccttctcctccttctcctctgggacacacatctgtcca

SEQ ID NO: 217604 - DNA, 361 bp, Homo sapiens
ccctggtggcagatgctatcagctgatagcctctctgaaaatcctgttggacatgaaagttcacagtgagagagggtaggcaacatcatcttagaagagaatggccaaattattctgtaggccatgtattttctccttttgctccattctacctttcagatggaactattttactctgtgtaacacttgagtgcttgtttccttccattccttgagaacactggccacttcttgtccttctctgtatcttgagcacctaacacagtgctaggaagtaggtgcttaataagtgcttgtggaatgctaaaagattatttaacctctttcctagaaacgaagacccagattcataggagcttaa

SEQ ID NO: 217605 - DNA, 425 bp, Homo sapiens
gaattatcgttgtgctaagtactaataataatggagctgaatttattgaactcctatgcacatttaagcttatactaacgctgaagggtagttattcatattcccattttgcagatgagaaaactgaactcagagaaattaaatagtatattaaagccatggagcttgtaaaggcatgactaaaattcgaatttagttttaattccaagcttaggatgcagacttcagttatttgggatgatgaaaaggcaagagggaaattcaaatcattttttatgccagttagacctaagtatatgaccagtggtttagtggtaggtccaggttttacggtgtctaaagtatataaaaatttaagaaatttaggggcttatgcaagtgaggggtccactgaccttcctgataaattcatcttggagttggtt

SEQ ID NO: 217606 - DNA, 494 bp, Homo sapiens
tggaagagagaccagagttctttatctccaccgtgtaaggccacagcaagaaggaggccgtctccaagccaggaagagagccctcccagggaactcactcagctggcaccttgatcctgcacttccccacctccagaactgtgagagataaatgtctgttgtttaagccacccagtccatggtgttttgttatagtagcccagcctaagacagcctcctaccctgtttctctgcctcctgcctcatccttcatgtggaatactagtttctttcacatcacttatcactgattgtagtaatacgtttgttgtgtttatttgcttggtgtttatcttcataatcagatgacaggctccatgaagccacacttgtttggttcaccactctgtacccagggctgcacaccatgtccaacacataacaagtgcttcgtaatgttttttgacaaaatgaaatgctgactacaataaaagtctccagccaggtcaaaaaaa

SEQ ID NO: 217607 - DNA, 373 bp, Homo sapiens
ttcactgctgtctccctagcacttagaacatagtacgtgctcaataaatgaatgagtgcctgactgaatgaatgaggatacatagatgagattcctccaatctcacagccggttcagagtaggcactcaatgagtgactgacaggatagttgctgttttgaaagcgcccaagtccagtaagccaattggaagctaagcgtggcgctggtatagtaggggcagggggcgtgcctgacccaaggttgggtcctggagcatgcgcagtcttcacagaaggtgacggggagaaaaatgcggaggcagcgattgcgtaggagcaggttctgattggctactgttcgcgcgcgaggggccgtgcctattcgtagccaag

SEQ ID NO: 217608 - DNA, 259 bp, Homo sapiens
ttaggtgatccgcccgccacagcctcccaaagtgctagtattacaggcatcagccaccgtgcccagcctaatcttacttttaaagtaatcatttattgcttttctttacagtttaccacttggatgtgcatccatatgtaccatatacaaccatagagtttagtgttgtgtgtctggaaactttacagaatgaggtcatactttatatattcttttgtcttgtttctttcacttgttatctatgatgttgaatgtagat

SEQ ID NO: 217609 - DNA, 523 bp, Homo sapiens
ttctcctttctttctcgttaaataaaccctctccttaaaggattctaatttatttctatgactttaaataccctctttgatgccaatatactaaaaaaaaaatcgtatctccagccttgattgctatactgagctcccgttcgtatgtccagccatctactggtttcatcctcacttggatatttgaaaagcatctcaaactcaacatagccagagcagaactcttgattcctcggctccctctgccaccttcctttttctgcttctgtttttcccacctcaataattacccccagtcaagtgctcagtacaaaaatctagtcattactcttaattttttttctgtcacttacccccatcaccactgaattcattagcaagtcctattaacattttctttaaaatatgtctaaagtctgtttcccctgctttctttgccaccagtatagtctaacgtaacatcatatcttgcctgagcaatcatagtagtctcccttctgtccttcctcctcctccttccttt

SEQ ID NO: 217610 - DNA, 398 bp, Homo sapiens
catcacagccactaacaacaccaccatggaccacttgggacccagaagttatttctaccattattactgccattgccttcacttgcctactgcccaggggcctgaaaacccaccaaactgcctggcccacggctgaactactgaaatctgagcgagccacctggaggcccaaaaatcagcctgcctgaattcactaataccagtgccaacatacgccaccctggggcctaaggagaagcagacttgtccccctgctgctacttctggagcccaaggacaggcccacctgtgtcccatctgcagcataacttcaccacaacctccactaacaaccacaccttaagccactgaggaagtcacagacaggactggtgcagataacaaccaaaggaatgata

SEQ ID NO: 217611 - DNA, 898 bp, Homo sapiens
gcactaaccaaaacccaaaggggcttgcaagcttggtctataccagtggtttttaaccagaggtgatttttgccactcaggggacatttggcaattactattgatattttgaggtctcacaattggtggtgtgctactggcacaagacagccccctccccaacatctagaaatcatttggctcaaagtgtcaataatgctgaggttgagaaaccctactctatagtaacagagtttgtggctacactcccacatcataacccttggttatggtattgataaggtatttattggattccagtgtcaccacttttatttaattctattcatccagatagggctcagatattttgatctaagggatctctagtaaatacaatgcccttccaggctgattttacaagtggctggaaagagtaaaataacacatttcagactcattgtcaacctcccttgaaataatctaaactcatgagggcactgatctgagatatttaactagaaatcactccattcattagacatgttttatagctacatgaattaattgacacttcattggaagagcagcaccaccaccttcagtgaccaggttggggtgtgggtatatgtgtgagaaaatgagatagatggacaaagcacaagccccagattggcatataggactttgacacctaaggaccaaatcaatatgccggggggtggggaggtaaggaaagatgtattgctaacataggatgagataagtgggttacaaagttctccaaagattgccatggcaaccaggtatagaacaaaacatttccatgaaaatccagcaaagcaaggacatgctaccccctaaaaggagaaaataaatgttgaggtaataaatacccattgacaaaggacaaaggaaa

SEQ ID NO: 217612 - DNA, 1045 bp, Homo sapiens
actcaggcactgactgtgacgacgcgggtggggagagactgtgcacctacacgtgtcacttcacaaaggcctccaggggcttatgatcaggcaaaggagacaccaggaaagaggagcagagtggctagggcagtgcactgcagatgcatggacgaaagctcgcagcgacacaggcatggggtgtctaatcagggatgagtgtgagcagcagaatgaggagcatgctttcccagaggaagagaggaagccactggagagatgaaggatgccatggacaggaggtggtgtctctggagccgccgagcagcagcctcattgctcagaagatgaagatgctgacgaagacccagacaggaaaaaaggaagaaaaagcatcctgattgttccattagcaaagccacagtcccggagagcaaggggaggggcacagcaggcagccgcacccatgggatgcatctgcagcttgtgagcaatgcatgaaagatgaatcacacagcagcatgcttcagcttccgtgtgctatggctcactcagcaccagctctgcaggctgcctaagccagaagtcagtctctgcctttagacttgctcacttcttttaggaacggagatatcctctgatcccttgtcctacaacctcgattaatatctttccaacagccatctgccaaactcaagaagaccctggaacaacctaattggaaaagtttccatcttatcccttggaaaactatagaaaagtagtgtcacacaaatgtttaatttctgatttctacaatttcagataccagagtttatctgttaccatgacaactaacagctttataaatgttttctagcctctgctattttctggaacttatctacatttcagtatttgcttaataattttgagctgacactagcaacataattgtgtctggattgtgtatgtgtatgtcttgtgtgtgttggcagggggtgggtataacctatgtcagtgtttttcaatgtgagcaaattttaataaacttttatatttaatgtgaacattaactgtcacattc

SEQ ID NO: 217613 - DNA, 822 bp, Homo sapiens
  misc_feature (42)..(42): n is a, c, g, or t
  misc_feature (65)..(65): n is a, c, g, or t
gtttattgtatggtgttcggtgctcctgttttcttaaaaaanaaaatacttttcaggagacgagnctctggcttcgccgagcagcagcctcattgctcagaagatgaagatgctgacgaagacccagacaggaaaaaaggaagaaaaagcatcctgattgttccattagcaaagccacagtcccggagagcaaggggaggggcacagcaggcagccgcacccatgggatgcatctgcagcttgtgagcaatgcatgaaagatgaatcacacagcagcatgcttcagcttccgtgtgctatggctcactcagcaccagctctgcaggctgcctaagccagaagtcagtctctgcctttagacttgctcacttcttttaggaacggagatatcctctgatcccttgtcctacaacctcgattaatatctttccaacagccatctgccaaactcaagaagaccctggaacaacctaattggaaaagtttccatcttatcccttggaaaactatagaaaagtagtgtcacacaaatgtttaatttctgatttctacaatttcagataccagagtttatctgttaccatgacaactaacagctttataaatgttttctagcctctgctattttctggaacttatctacatttcagtatttgcttaataattttgagctgacactagcaacataattgtgtctggattgtgtatgtgtatgtcttgtgtgtgttggcagggggtgggtataacctatgtcagtgtttttcaatgtgagcaaattttaataaacttttatatttaatgtgaacattaactgtcacattc

SEQ ID NO: 217614 - DNA, 1613 bp, Homo sapiens
actcaggcactgactgtgacgacgcgggtggggagagactgtgcacctacacgtgtcacttcacaaaggcctccagattccaacaagttgacaaacggtgcaaatgtcagagattaaaatatctccttcattgctgataaggctgagttggcgaattcttcttggatccaatacaaaaatgagattgtttccatttctcacctgaattaaacttacagggcagaggtgacctgcttagtgagcaggccacgttcagcaatagcagatcaaagacccgtatgtcttgtgatcttcatgaagtggctggcaaggccagagattctgatcccatcaccacgtgttaatctcctgtcaagagaaataaggagctactgagagaaaagcagatcctgactcccctctacttgtgagtgactacaaaatcctattttgtggcgtgaggcaggagcctagagagattggagaaaaaagctgctcctctagaatatgaaaataccgtttaaagggaaagagattaattagtgattgagcgcattcagtgctgtctctcctcctatttatctggctgcctgttgtctgcatggcctcctgctactcattgtgggtaacatcggagaccttcatctgcaggaagatagaaaaaggggcttatgatcaggcaaaggagacaccaggaaagaggagcagagtggctagggcagtgcactgcagatgcatggacgaaagctcgcagcgacacaggcatggggtgtctaatcagggatgagtgtgagcagcagaatgaggagcatgctttcccagaggaagagaggaagccactggagagatgaaggatgccatggacaggaggtggtgtctctggagccgccgagcagcagcctcattgctcagaagatgaagatgctgacgaagacccagacaggaaaaaaggaagaaaaagcatcctgattgttccattagcaaagccacagtcccggagagcaaggggaggggcacagcaggcagccgcacccatgggatgcatctgcagcttgtgagcaatgcatgaaagatgaatcacacagcagcatgcttcagcttccgtgtgctatggctcactcagcaccagctctgcaggctgcctaagccagaagtcagtctctgcctttagacttgctcacttcttttaggaacggagatatcctctgatcccttgtcctacaacctcgattaatatctttccaacagccatctgccaaactcaagaagaccctggaacaacctaattggaaaagtttccatcttatcccttggaaaactatagaaaagtagtgtcacacaaatgtttaatttctgatttctacaatttcagataccagagtttatctgttaccatgacaactaacagctttataaatgttttctagcctctgctattttctggaacttatctacatttcagtatttgcttaataattttgagctgacactagcaacataattgtgtctggattgtgtatgtgtatgtcttgtgtgtgttggcagggggtgggtataacctatgtcagtgtttttcaatgtgagcaaattttaataaacttttatatttaatgtgaacattaactgtcacattc

SEQ ID NO: 217615 - DNA, 528 bp, Homo sapiens
gaaacaccaaatggcaagtaaaaatcttgagatgaatgtttaaagtgtggggtgtgtatatgtttgtatttttattcaaggtgaaataattaacttttaaaatatttatggctttcttaaattacaggctagagccaacaaatagtttgcctgttccttacatgtccctgatatatctttacaagtaatcatagcactgcttctgacaaggtcagatgcataattcgaacctttcttactccattcccaagctatttaataagcccattttgccagtaaatataggagagaaaaaataatgggccaaaattttcctgttgtttaacctaaatgaatattttcattttcatcttcctttcagaattattttctaatactagtatgaaaacatacataaagttcctaaaattgaataacatattacttagtatttacatacattacacacagcttaaataagtttgtggaaatgattattttaaaaattttagtattttgaaaattcatgtcatctcaaaaatagctttt

SEQ ID NO: 217616 - DNA, 579 bp, Homo sapiens
caggggtcttttccctcaaatgaaccagtattttgtgccatgaatcgtgctgcagatacttgcatacatcatctcattcaatctttccaacaaccttctcaggtacaaatggtactagtcctgttttgcaaattggagtggcctctctgtaaaggctcagaactaggtactaggaataaaaagaaattaaagaccctcgaggggctcaaagcctggacagggatttgcactttatttcagagttgatggtgagtaattgaagcctgtcaagcaggagagtggtgtactccttcatgcttttaaaagtattcagtccatcacttgaacccaggagggggaggttgctgtgagccaagactgcgccactgcactccagcctgggcaacagagtgagactctgtttcaaaaaaaaaaaaaaaaaaagaaaagaaaagaaaaagtttttcagcccagttgaccacaggggctcatgtctgtaatcccagcattttgaaaacccaagagggtaggatcgtttgaccccaaagtgttgaaaacaccctggtcaacatggcaaacctccatctctttaaaaaatac

SEQ ID NO: 217617 - DNA, 840 bp, Homo sapiens
caggggtcttttccctcaaatgaaccagtattttgtgccatgaatcgtgctgcagatacttgcatacatcatctcattcaatctttccaacaaccttctcaggtacaaatggtactagtcctgttttgcaaattggagtggcctctctgtaaaggctcagaactaggtactaggaataaaaagaaattaaagaccctcgaggggctcaaagcctggacagggagataggctgttaagcccatttaaaacctgggtgtgttgagtgctaggctggagacatgcatacaagaaggctggtctgtgggggtagataatgcctctgttgactcttaggatgaattagaggcacaagggtgagagcctggtgtgttcggcaaacaataatcagtgaggggttgacagcgagggagtgattggtaagaggtgaatgtggagggtggaccagagtcagatgctaaaaggccttttccactgtgcccagggatttgcactttatttcagagttgatggtgagtaattgaagcctgtcaagcaggagagtggtgtactccttcatgcttttaaaagtattcagtccatcacttgaacccaggagggggaggttgctgtgagccaagactgcgccactgcactccagcctgggcaacagagtgagactctgtttcaaaaaaaaaaaaaaaaaaagaaaagaaaagaaaaagtttttcagcccagttgaccacaggggctcatgtctgtaatcccagcattttgaaaacccaagagggtaggatcgtttgaccccaaagtgttgaaaacaccctggtcaacatggcaaacctccatctctttaaaaaatac

SEQ ID NO: 217618 - DNA, 385 bp, Homo sapiens
gcagaggcaggtggatcacttgagcccaggagatcaagaccagcctgggcagcatggagactccttaatctaaaatggccatgtctgtcccaacttcctacaatttcagctccctttcattgttcacttcatcactctctaaaattactttcattcatttattctttgttgactgattgatgattggttgattttatgtctcccttactagaatgtaagtaccttggcagcaggtactttatttgtatcatttactgtggatcaccctcctacaacagtgagctaggctaagtaaatatttatcaaatgaaaaaaaaagattggcattgaaaagaaagaaaagtaaatccacgtatgaaaaggtgccgattttttttattcagta

SEQ ID NO: 217619 - DNA, 331 bp, Homo sapiens
tggccaggggggacagagtttcactctctcacacaggctggagtgcaatggcataatctcggtgtactgcaacctccacctccagggttcaaatgattctcatgcctctgcctcccaagtagctgggattacaggtgcacgccaccacacctggctaatttttgtatttttagtagagaaggggtttcaccatgttgcccaggctggttgtgggagtccaccctcctcagactcccaaagtgctgggatgacaggtgtgagccaccgcacctagcccctttaacatttttagagtgtcaccttaggttctgtgaaaaatccagcacaccac

SEQ ID NO: 217620 - DNA, 329 bp, Homo sapiens
cagggagagatgttggttgccattgtcccaaatgtgctacatgaatattagcactttctacatgtgccagggcttggaaaaggttggaaattaccccaggaacaggttataaagagtgaagaaggcactactcctatctactggaaaaaggatttttattatttggttagctttgtgttttaaaaaaatgatgagtatgatatcattcatctgttataaaattcaggtaacttttactggtgaacttgttagttctcactttagctttagcttagccatgcctttatgatacaattgaatttataaatagcattcttatgttaacataa

SEQ ID NO: 217621 - DNA, 437 bp, Homo sapiens
ctggtctcaaactactgacctcaggtgatccgcccacctcggcctcccaaagtgctgggattataggtgtgagccactgtgcccagccaagtgttcagttttgatagtggagctcagaagagagggttcaaaatgagatataaatttgggagtcatagtatacagatggcatctgaagttacatgaatggttgtgattaatcgaggagagaagacagagagtactcaggactgaaccctaggtaatgacatttagagataaggtagagaaggaacagctagagggatggggaaaaaagccaaaaacaaaaatgaatgttccaagaggagttgtgcttcaggaaagaggtctaagtcaacatgtgaaatgctgccaagaagccaagcaaaatgaggacagaaaaacaaacacagggtttggccccatggcctagctgt

SEQ ID NO: 217622 - DNA, 559 bp, Homo sapiens
aaatgaaactgatgcaggagcatttcgatttactctaattatactgtgaatgctgtgcctaatgcaacaatgcctttgcatttaaaaaattgtctttaaaggtctccctccaaattgtaataggcttatatttctcccattctagctgcctgtaatatacataaaaatgagaattacaaagaattctcaactcatggatattataaaatatagatgacagaaacttggccctgaatgctcccacaagaacagtttgcagcaatcacactacaaagagttgtaaggatagcactttgatcaatctgcttcattcatctctatgcgcttgaaagaaatgtcttggaaagggctaagagccagcgttcctgaacctccgaatacaggcttgttcttgcaccagatatcgtgcctaccgcagtgcagagctcgctaagccttcaggaagcttttgtttcagaccacagtggtgtgcactcctctaaagcatatgctgcagtacatgactgagccttctgtcagctgatgaactgcatctgactcctggtgtttaaagggtctg

SEQ ID NO: 217623 - DNA, 451 bp, Homo sapiens
gtaagggagagagggaaggaaatgagaaacatgatcatcagggaaaggaagacgtacgacaaatcctgcacagctagtgccaggatgctaaagtattgtgatgagggaaatggtgcagaccaggcttctaaagtgaagttgttaatgaaatgaaaggtagacaatacgcagaagcagcctgtcatatatgctaaactgtctgttttctggagaatccaaaagcattggaaactgttttctctgatatccctagttggtttactcaaggataaaatgcccagacttccttcctaacagcaggctaattgatttaaccaaagaatgtgcaaacaagatatactgttcctaaattatgcagtttttccttccttctctatacagtctatttttgcttttgttggacaacatcccactgatcgatcgatctctgaataaaaacactgaaatggac

SEQ ID NO: 217624 - DNA, 445 bp, Homo sapiens
ggcttccaatccaagctctgccaccgacctctttggcttcccatctcctgtcagtggctctactgaaggggccctgagcatgtttagtaggaataaggtaaccaggggctctagcagtgccctgaatgcttttgagagtcagccaacatgttcatttttaagaggtttctaaatatagactctcataagaagtaccttgtacactatttgtgtcctctccaggaatcacgggagtgaatcacattccagacacttgcttggacttcatcacatcctcagtgactgggctggaagaaatatcacagagctctctttttatgggtaaagagaggaaggtggctgggcacagtggctcacatctgcaatcccagcaccttgggaggatagcttgaggctaggagttcgagaccagcctgggcaacatagtgagaccccatctcttaaa

SEQ ID NO: 217625 - DNA, 377 bp, Homo sapiens
tgtctcacacagatggaaactggaggccctggaccccagcctcaccctccatacacacccatctctagtgtgagtaagcatgttatgttaatctgagctgtcttcactacctgtaactagtcatttgggagtgacatcatggtaactgagtaatccttttgaaacttacatagtagagccaagatattaaaatggtcctggggctacctagatgaaagtagatacaaagtgtgcataaaattgtctactaaaagtagagtcagtctctatcagtaggaacttggtttttgtgataatgtggtacattttgtaactagatagatctcaaaagttcatacattgtagttctggtactgtccttatttccaggcagatag

SEQ ID NO: 217626 - DNA, 424 bp, Homo sapiens
ccacttttgcacaaatattttatttctaaagtatgtctgggctctggactagggtgaatgaagttcagatcccagccctactatttcctggctgtagaatcttggtcacttactatttgttccaaacctttttgtcatcgtctgtaaaatgagaatggtaatattagcgtgcactgtttgtgggaggaggactggcaaaaatatgagagtaggagtttgggctcttgagcttgggcctggccttcaaatttccactctttcactcactagctaaggggccttgggcaagtaccttatcatgactgtgcctgtttcctcaaagagagtcatggtagtagtagtactcaaccgataggactgaagtgactattgcatgagtcagtattggcaaagaattcagaatagttcctggcatacagcactg

SEQ ID NO: 217627 - DNA, 175 bp, Homo sapiens
gagatggagccttgctctatcacccaggctggagttcaatggtgcaatttcggctcactgcaacctcctcctcctgggttcaagcagttctcctgcctcagcccaattagttttaaagacgctgcatatattggcagggaaaacctagaacacaaagtcaaacttccaattatct

SEQ ID NO: 217628 - DNA, 158 bp, Homo sapiens
gaattatctcattcactgaacaatggcaacgggctcctttgtgtgaattgaacacgctttgtttagcgggtccctggtcatttgggttgttttcttctttctagtgaggagattcctttcatgaaccttgtggtctggagtaaaagaagagacctaca

SEQ ID NO: 217629 - DNA, 125 bp, Homo sapiens
ggctgcctctgttaaaatgacatgatattcatcagagaagggtttagaaattaacagccacagttaattttcatcttttgggaggtttcaggcctataaatgagaatttgacctagagtctcttg

SEQ ID NO: 217630 - DNA, 469 bp, Homo sapiens
gatcatcttcgaggcctgctgtggtggtgagtgctgatgtccttgagaacaccagacattctaatgctgtcctcatctgtatggatccagggtttttcagtttatgtctgtttattaatgtcaaagaaaacgtagtgtcatcactcaacatgtggcttctgtgaattgtatgactggttggtagatatttgtttcattttcaatcctgagactttgatgtttggttgtttttaaaatttgtttgagtgttagaagaaataagaattgttgaaaagattgttacttgaatgaatgtgtgcatgtgtacgtgaattaatgatacagcaaatatattgataaatatgattgaacagaggctaagaggagaacgttgtcctctcagccactggtagtagtaacaaaccaaattttgtctttccagagaaccatggtgtggtgttggtaaaagattcattatgagtctctgaaa

SEQ ID NO: 217631 - DNA, 627 bp, Homo sapiens
ctttttggttagagcgtgctctgaatgcaggaccttggtctgtgttcacagtaatgaagcggatctcagagtggccaacagtggcccatgaggcagccgaacacctgcagatccaggctctctctaattcctaactatgaggactgtttctaatgtatttgtttcttcattttttccatcccccaaatagaaatatcttgtcaaaaatgatttttaaaacagtatatatgcaccctataaacaattagaataatgcaaaagtatgtgaactaaaaagactgtctgctcctgtctactctctgtttcagtattcttacataaaaatgatacatcctggctgggtgcagtggctcacgcctgtaatccgaaatttgggaggccgaggtgggcggatcacttgaggtcaggagttcaagaccagcccagccaacatggtgaaaccccgtctctactaaaaatgcaaaaattagccaggcgtgttggtgggtgcctataatcccagctactcaggaggatgaggcaggagaattacttaaacccggggcgtggaggttgcagtgagccgagatcgcgccactgcactccagcctgggcaacagagtgaaactctgtctaaaaaaaaaaaaa

SEQ ID NO: 217632 - DNA, 296 bp, Homo sapiens
ttgcttagaagttggtagctaccaccaggtagccatatagacctatatcctggaggaaaaggttagctttagtgccttaaagatcatttattttccccaaagactttaatgtacctccattatctgagagaaaaaaaagcaagttaaatcgtcaagcaacaggcttttggtctatggcgaggtttgagtttcctcaaatatagtattagcaattgcaattgaacttgaaggtcaatcattgcatacattacatacagttgattacattacatatagttaagttaaatcttccttat

SEQ ID NO: 217633 - DNA, 493 bp, Homo sapiens
cccataattcatgaaagtttgcaaaaccatcagtgttaagtctgcattagtgtatgagagggaagagctggctaggattgattggtagacacttccactaggggtctgagtaaagtggtttcatatccgtaatgggctgatgagcaatttattgcctgcaaaaaacggagaaaatgaaatttttggttacgtaaaaacatgctgattatttttcagttgtataaatttgtgattattgtattatattagaaaatataaatgagaaaataaatacctgtaatgctttctgttaagattttggtatatctctttacagatctttaaaaatattacatatacatgtttttagatgtatgtgtgtgtattatatgcatacgtaaacaaataatgtatatagaaatattcctacacatgtgtatgtatatgtatatttagatgtcctttttaaaaatttttttgtatttaaagagatagggttttcctctgtcactca

SEQ ID NO: 217634 - DNA, 460 bp, Homo sapiens
gtgttctttcctcctctatttctattacgtagaattggtgttaattcttctttagacatttggtagaattctctagtgaaactatctgggcctggagatttcctttcctagggagtgggagaagttttacattatgaatttaatttccttaatagttacagagctatttaaattatatattttatattgtgttcattgtggtatttgtgttttttgatttggtccattttgtctaagctgtcaatttacgtgtatagatccatggtattcccttatccttttgatgtttgtagtgatatgttgtttcattcctgatattggtaatttgtatctttttgtttttcatcagttttgctagtggcctgccaattttaataatttttttccaaagaaacagttacttgttttattgattttgttcattgatttttaaaaaataaatctcattgatttcctgttc

SEQ ID NO: 217635 - DNA, 350 bp, Homo sapiens
attttttttgaatagctactctgagtgacatattgtgctgggtgttgtggccacatggatgaatggagttggccttgttaactattaaacacaaaagcatgtgatagttacctgagagatccatgcaggggagagtccaggggaaggtgactgatcactgcttcccagggggaggcagaaaatgcttcctggaggagatgatgggtggattaaggaagatgagttgagcaggagttgtagctaccagccagggaggaagggtattcagagcagaggaagcaaggtgagcaaaggcaccaagatgtgacactactggactgccaagctattcagtgtggcagagtagggca

SEQ ID NO: 217636 - DNA, 190 bp, Homo sapiens
gtgaggaagaaagcaaggtcagcattagctttgcattttcttcccaggttgttgttccttgaatggagtcagagttgggtcagggtcaaaaatactgactactactgctactactacttcttcttctttagctaaaatattgtagtagaatctacatatttttgataaaaaccccttctgtcgtcttctc

SEQ ID NO: 217637 - DNA, 478 bp, Homo sapiens
acagcattaaaaaattggtttatcaaattacattttgactattagagaaactgaaattgtaaaaattaaagctgaaaagcaaaggaacaaaaaggtaaaatggcctacgagcgttgcactctactagattctcttacataagagagttgccagctttaatggaagccttagtcctctcctcacccacaccaccgacacccagtgtagagaaagtacgtcacccacacttatttaaaccatgcttcctgccttttgcttcaaaccatccattgtcagatctctctggtctgtctgctggcttcatccctgtagaatccctgtgagacgattcatttgccccaaatgaccctcttctgacttagcaacgcctaactgtctgcatggtgccacctatcactgcccctatggggagtgtggtggtctggtctcagacacagtccatgatgttgaatatcacacccaaatccagccttcagaa

SEQ ID NO: 217638 - DNA, 392 bp, Homo sapiens
ccacaggcagaaagattacaaactctgcaataaatataaaggtattggttttataaggtggcctgcaggctacggaccagcacagagctctggcaaatgtggaatgccaggagatgtacaaaaaaatcaaggtgacaaaagaagaaaagacactccaaactgccaagggtttataatcatgctgtggatatttctgatcatcagtgtgttaatggttttcactatagttaaaactataccatttttgaatgggtaataggtatgaatatttatgcttaattagtagtttataaaatttatactatttattttcataatgttgattttatgattttcaacgagtgccatttgtccttaagtcatgaagtggatgagcccccatcaagtgattt

SEQ ID NO: 217639 - DNA, 262 bp, Homo sapiens
aagtagtcttttacgttctgttctctcccagaagttgacagtgcccaagattcattttccttgatctcagtgtcacagattaataatgtctcccatgaatgctctctaattctattttccaagagacagttggagacagaacttcatgattttcattttattcctgacagaataataataaataccatattttaccttattagaattgaagaaatcatttattacatttgtgatttaatgtaaaatagcgagactgatttag

SEQ ID NO: 217640 - DNA, 204 bp, Homo sapiens
cttccctctcttccattcactcttccctgctgcctctggcagacccactctgtactcctcttgcttgtcactgccactaccacgaccaccagttgtctctctgtcagcagatgtgccgtgttgcctctctgcacagtaccatccctgcattccacagaagacttgggcaagggtgcctgagaggtacccagagacaaatcacgt

SEQ ID NO: 217641 - DNA, 1059 bp, Homo sapiens
gcccgcagcaaggctccgcggcgctaggcccgagaaaccgaaactcccctagtcgcccctgccccccagcactcgcgccattgcctccagccccgagccaccattgtttccagtgccaaatcgggcagccccgctagcctccgaggccgaaccgccaggggccccataagccccgaggaggctcgtcgggaaccgcttccttatcctctcggtatgcgcatcgccaccaccctcgctgcagaggccgccgccctcccagcgcgccatcaccgcctcctctgcctcttcccctccctcagccccggcccctgcattgacttggctcgggctgcgcctcactgcgcctgccaactgtcacacgctctgaggctttcaacagcggggcgccagggacaaacaagccgcggcaagcgcaaacagcctgctcaaacagggacggccagggtgttgtttgaccagcactggaattggaaactaggtttcgaagaagtcaaatcgaagtacaatattgtattttaaactgcctgttgttattacatccctcacaacgcacgctctacttgaaacttccagtggataccaactgcacttagaataaaaaatgaaactccttgcctaactctgggacctcatcagcacatactcaccatattttggtaacaaaggccttcatgctgttcccggaagtcgccaagttccatccatcattgttaataattccttttgctcgctcctcgcacaagaactgtttcttctgcttagtgctttgcctactgattccatcttgtcatttaagtctcggctcaaatgtcacctctgcaaagaacccttgtctgaccatacatctaaaatagccacaaacactctataaagacttggccttgctttatttccttctcagcactcatcactgtctgaaacaatgttttggatttgttgcttattatcagtctcccttctcaagaatgcaagctttgtgagggcagagtcgtaatcttttttaaggctgtatccccaatgcctgggtaagtatacaataaataatttttgcatgaaaaa

SEQ ID NO: 217642 - DNA, 501 bp, Homo sapiens
agcactttgggaggctaaggcaggtgaaactcttgagctcagcagtttgagaccagcctgggcaacatagtgagaccctgtctcaagacaaaaacaataacaacaataaaaaaacacacagtatcggtgaatcacagtaaaatgagatatgcctgtactttatatattcatttaattctcagattctcatgttttagttgagaaaaccaaaggatggagaggtttcagtaacttgggcaaattcatagctaatacatggaagagacgcttactcagtatgattctaatcaaaatatgggctgtttgtacataagcattcctgaagtagctaaagcaatctcttccccacccatcttttcctatagaaatctcacctgtttttcttttcttttttttaatttgatatggagtttcgctcttgttgcccaggctggagttgcagtgagctgaggtcatgccactgcactcctgcctggcgacagagcaagactctgtctcaaa

SEQ ID NO: 217643 - DNA, 1090 bp, Homo sapiens
gtactgacaaatcccagaatgttctttcagcactgaaagggttaaatataaaaccacaatggaagtgacagtgtgaggggctagcttggccaggacagcagaaagccaagaaagaagtcattgtagcagatgaaactcttcaggaaactgctggatagagagggtggccacaaaacctgttttacacctgttgcctacaattatcataagcatcattttttattctcagagtccattttgacagcaaattatatggtcacactgtggatagagaaacccaagactttagagcaggagtcatttaaaggagtaatggtagtgtgtgactgtgtacatagttcaaagtcattcttagtttgtataaaccagaaaatgaagctgagaccatattgctgggaagaacaaagctcactacattatcttgtgactaccaaagaaaaagagctaagattccattagcttgaatccacataaagcttaaagccaaattcgggctaattaaagtcaggctctgggaaaacaaaagcataaaagcagtaatcatgtctgagtaagatgaagtaacctgtgggtatgaagaaaacaaagaccaacaacagccagaaggaaggcagaaaaagcactttgggaggataggagtagatacaggcatcatatcaagttgcctggatgagtgttgtcatccagtttctccattttgaggtttgggtgtgtgggattgaagttggggccatcagctgttgtttgtctgaatttaaatgttctttggtcctggaaacgttcatgtggtctaactcttcttttcacgtcatcatttgagatgtgttctatttcattgattcatttatttagcaactttaattcaacattaactatgtgccaggctttgtgtctacgagaaggtgattcacaatgaaaagactgagctctttctctcaggaaatggctgtgtactggaatagatatacacagacaaaaaccaagactttaaaaataaagctgttggaggaaagctaccaatagcttccaagaggagatctcaggtcttcagaggacattccttcctcagagaagtctttagtcattcagt

SEQ ID NO: 217644 - DNA, 256 bp, Homo sapiens
gattgcatattatgtgtgataaaatgcaaaataacttgtcagatgaattaagatattcagaccagaaagtcataagaaagagaaaacgttgagtttcctttacttgtaccccttatgcttctgtcttcttccctcaacaatgaatgctttccttcaaaaatggattttcccattccactgtgtggtcacacatgcatgagcagtgtcaatattccagagcactagagtttgcaggcataaatgttgatgtttgcac

SEQ ID NO: 217645 - DNA, 213 bp, Homo sapiens
caggtgatggcttttctgctgcacccctttttgagttgctgaatggcctgggaccccccccccccccacaccatggtcttctgcccctctgtgctgccaggatctgctgggagacagggtcacagtcgagggggatatgcatttggtctgcacagtgccgtggcaggtgagacaagtcaggatgaagcctgggataaccccttctagctgctc

SEQ ID NO: 217646 - DNA, 708 bp, Homo sapiens
cgtggtggctcacgcctgtaatcccagcactttgggaggccgaggcaggtggataacaaggtcaggagatcgagaccatcatggctaacacggtgaaaccccgtctctactaaaaatacaaaaaataaacaaaaattagccaagcatggtggtgcacgcctgtaatcccagctactcgggaggctgaggcaggagaattgcttgaacccaggaggcagagtgaaccgagatggtgctactgcactccagtctgggtgacagagcaagggtccagctcaaaaaataactcagttcatagaaaaaagatttcgtgttatcaacttcgtgcatctgaacggtcaattttgattaaccacagtttgtaagttccttaattgttctttatacagcaagctttatttcagaaaggaacagcagactcccaggggagaaattctttggaggataatatattcataacaaaaataaagtttttagatcaaattaagctcaagaccatatctaatacttgatgaagaatttcttcctcctttccctagagtattgtcaattatttttaaatgatctcatttttataaagtctttgaattaaaatggaaaacataattaatgcttttggagagaggaatgagaagatggataccacagaatatgacaattccaaaaaaggtatgactctctggactggataacaaatctgggacaatg

SEQ ID NO: 217647 - DNA, 887 bp, Homo sapiens
cgtggtggctcacgcctgtaatcccagcactttgggaggccgaggcaggtggataacaaggtcaggagatcgagaccatcatggctaacacggtgaaaccccgtctctactaaaaatacaaaaaataagccgggcgtggtggcgggcgcctgtagtcccagctactcgggaggctgaggcaggagaatggcgtgaacccgggaggcagagcttgcagtgagccgagatcacaccactgcagtccagactgggcgacagagcgagactccgtctcaaaaaaataaaaacaaaacaaaacaaaaaaaacacaaaaattagccaagcatggtggtgcacgcctgtaatcccagctactcgggaggctgaggcaggagaattgcttgaacccaggaggcagagtgaaccgagatggtgctactgcactccagtctgggtgacagagcaagggtccagctcaaaaaataactcagttcatagaaaaaagatttcgtgttatcaacttcgtgcatctgaacggtcaattttgattaaccacagtttgtaagttccttaattgttctttatacagcaagctttatttcagaaaggaacagcagactcccaggggagaaattctttggaggataatatattcataacaaaaataaagtttttagatcaaattaagctcaagaccatatctaatacttgatgaagaatttcttcctcctttccctagagtattgtcaattatttttaaatgatctcatttttataaagtctttgaattaaaatggaaaacataattaatgcttttggagagaggaatgagaagatggataccacagaatatgacaattccaaaaaaggtatgactctctggactggataacaaatctgggacaatg

SEQ ID NO: 217648 - DNA, 419 bp, Homo sapiens
ctccctgcaacattaggaatgcagatttaagcccatgcagaaaggaagtaaaggtttatcctcagacatatgaactcctctgcacagactgccctctggggtggaagctgccatccaaagcctggcaaatctgaagtccaccacactgaacattccacagaggtgagttattattggaatgagaatatttatgctcactccctctatgatttgatctttgcattttaagacttaatattgcagtaaggtagcttttggcttttaattgccccgaaattttgttaacattaaatgaaaggacaaaatggaaaggaaaatagaaccatatctgtatcacttttgagttgcataatttacatttttgccacttcattagttttcagctattccagcctgtaaatgtctcccccaccaccact

SEQ ID NO: 217649 - DNA, 600 bp, Homo sapiens
aatggttgaaaaaagtaaataagaatcacattggccgggtgaggtggctcacgcctgtaatcccagcctggctgatagtagcagtttctgaatcttgtctggggcccaaatctggctgaagagagaccctctgatcctctcccccttcactcagtgaatgaggtcacaaagagccaccacctggaaggcagctgtgaggtcacccacacccagtttggcatctctgagctgtgtgctgttggtaaggtaacctagcctctcggagctctctgtaagaaggcattccaatatccactcaacatgcagaaaactcctggcatgactttgtattattattatttgagccaagattttaaatcaggagatttcatacaaacaactgaattctgcagcttctcaagaacaatctagaaatctgctggcatggagcctgcattcccacctggcaggattggctgaaactgaataattgccttttttttttttttttttaaaggaaaaagggggttcacccggttaaaggggcgggtctcgtaatcctgaactcaggtgatccacctgccttggcctcccaaggtgcgggattgccatttgtgcccc

SEQ ID NO: 217650 - DNA, 703 bp, Homo sapiens
tactgggggttaggacttcaacatatgaattcaacaggggagacacaattccacccacttaaaatgaaacaggcctacagaggttatgctaactttttgaagtggaatagctagggccctcaggttcacgtggtaaccaggtagttctgaggtgggaggtgagggaggtagtgcaggtccccaagagccacggggatgctgcagtgaactggactgtgtgcagtcactcccataagttgtccagacatgaggtaacagagtgagctctggaattagtcaaatctgccactcactagctgcctgatcttaggaatgtttttcaagccctcagagcccccattgcttcatctgtaaaatgggataatagcacccacctcatgaagttgtggagattaaaggacataggacagtagttgagaaatgtagtgattatcaaaatggacacccatcctcttatcccaaccacacaaaagagagctttagtccacatccaaatttcctacacctaggcccattttaattaatttaatttatgtaactaagtgcaacccttgtccagaaacatcattcaagtggggatcatggtagggggtggtaaaagggtcagaaaggggagatgcaaaggagagctagagaaaaggataactccagttctctgcctgtcagtgtgtctcaaggtgggcattattggtatttggagctg

SEQ ID NO: 217651 - DNA, 230 bp, Homo sapiens
ggtactcatgtaaaacttgaggtagttggattagttgatgtctcatattcttttagcactagttgcccctgtttccaagctgtatattaaatggtcctcatatgcatgataggtatatatatgcttaatatatattaaaaagacaacacatgtttgatgaatgaatgaatgcatgattgaataaatgaaagtgatactgttccatatgtctgtaattcctttaccttact

SEQ ID NO: 217652 - DNA, 337 bp, Homo sapiens
gaagggaacagggcagattcagagactgcagcaccagtgtctgagtgtaagttacactgtatgttattatctcacctaaaacagctcctacaaatctcatagaaacctgtggctcaccaccctatgggctggaagtagagcttccaatattccggaaatgaggtttatcctcctcccgcgttcatgctgacaatccttttttctcttttgggaaaaaagtgggttcgctgggcgcggtggctcacgcctgtaatcccagcactttgggaggccgaggtgggtggatcacctgaggtcgggagttcgagaccagcctgatgaaaccccatgtctacta

SEQ ID NO: 217653 - DNA, 500 bp, Homo sapiens
aaataaaaggtaaggattaaaaaattggtatggagtggaaatggaaagccttgctttttgaaacatttggactcaagatccatcttccagccttccaaaatgttaagggctcctgtttgcaccttctcagaatgatgtgcttgctttcttcagaaagacaagtgttatttactactgtttacagcttttgtgatactgaatcccaggactcccacggacgtgtgctctgacttcttacgcagtgttctttcttaagccacagcaaaggaaataatggacattgagaggtcaagtgtgtgcctttcaccctgtgccctttaaatatcaataattattgtttttcttcctgaagaagcagcatctggttgtatggaatttggcagaagtgggcatcctgtgctagttcttttgatatttaaatatgagcaagataggtaaatggcaactaaatctgagccatctgaggaggaatgagagtaataaaaacaacgaaactgaaa

SEQ ID NO: 217654 - DNA, 581 bp, Homo sapiens
aggaaatctacttaaattgtctgtggttgggaaaagaaactagtggaaggaatatgttacaaaagcatctttcttaaaatgtattcaacatatttttctctacaatttaagagcattagcaaatacaacctaggatgaaactttaacagcctttgagagggacaagaaatgaaattaagggtgatatatgatgccagtatcatcggtgtattgggtctcataatacatacaatacatggtagttagtcatagggagaaaacaaacctggtggctgctttctaagaacaaatcagatttcttgtgtagctatgtggtttaactgttcttgcccttcttttacaaaactaaacaggtttagtatcataagtgctacagaaatagtcaagattgcaataattaggaatctagctcaaactaccttaagtcaaaaaagccaaaaatttattggcccacgtagccaatgagagaaagttgatgtttaaactcagggaaacgggaagaactgcaggaatcagaactcctgtcacttgactagtccctagattaaaacagaaaaacaaataaacaaatgtcacccatc

SEQ ID NO: 217655 - DNA, 576 bp, Homo sapiens
tgatgcaattgggttgtcccagttttcatggtgctgagagggagcagtgggttcaggtggtgtcaacacgatcccttccttataaacttctcccccaaactttcccttaatggttttgtccattgattaggatcatctaaatcacttatttaattccggctagtaagatggtgatttttctaattctatcatttcttccacatttagtggctaaaatttcctgtaaagaactttcctctaccaactaggcttttgtttaccttatccttcatgtctttcctcaagagttaccttggctaggaacagtggctcaggctgaggtgggaggatggcttgaggctggagtttgagactagcctgagcaacatagtgagacccaatctctacaaaaaatttaaaaattacccgggtacagtggcatgtgcctatagttccagctactctagaggctgatgttggaggatcgcttgggtccagcagtttgagcctgcagtgagctgtgattgcactactgcactctagcctggatgacagagtgaggccctgtcttaaaaaaaaaaaaaaaagaattaccaa

SEQ ID NO: 217656 - DNA, 466 bp, Homo sapiens
aaaaattaacacaatgtgtggaaaatataaaattagttagaagatatgtcttagaaattaaacttttagaagagttaatggtaagtggagaatgttaaatttaattttttattacatacttacagctcaacttaagtttttattcagaatcttttattttggtgtgaatgttaaatattcaaaaataatagaatgacacctgtggatttcacatgtgaaataaactttttcatattaatgttaaaatcttgaggaatttctcacacttgtataatgtacttttttattgggtgcagtttacaatttagaggttcagtctttagaggtttcactggtcaactccttggtcattttatctggaaaagttttaaagatcatggcatcttttgagttaaaaaatgtcttcagtgatctgggatgcaaactaatttactctcttcagagtggtttaatcatgtgaaacaca

SEQ ID NO: 217657 - DNA, 908 bp, Homo sapiens
tgcccttaatcctaaccctggttattccggttcattggtcccaaggctgctgaggtgtgcgcagggctggagcacatctgcccgcctgtctgtctctggaggcaggcagagaagggctttgtctgaggacgctgttgttccagcttggagatgtcaccggcctggaggtggggtgtggccaggccgtgccttcgcaagcctatgggggtcactctgagagccgtccttagggatggggccagctctgtgggcaccaccacatggggcatggggtgggcgctgcccatggttacatgggggttggtggcagcatagacgcatggcagcagcggccaccacatgcagaaccccccacggtgtccagggccttcctgagctgcttagtgaatcctgtaccagcctgagaggagcacagtgccctgtcatttgcagaggtgggaatgggcttggtgcaaccaacttgcttgacatccgactcagtctgaccccacagtatgcacctgctctctgcccccattcacttcttgatcccagggccctgtggccacagtctgaggcccagcggctatgggtgcacgggggctgggcggaggaagcagggtcatgtgcctgaccagcgccccctccctctgttgcagcttcacgtggtcggccgcgcggacggaccggaatgtgatctctgtgctgtctggccaggtggtggagatgtttgaccggcagttccaggagctgtacctcacgcgtagctcgtacctcacccgtagctgtactctcacccgtagctgtacactcacaccgatagctgtacctcaacacgtatgctgtacctcaccgagtaagctgtacctcagccgtagctgtgcatcacccgtacctgtcctcgcggggatacctctggagtcgactat

SEQ ID NO: 217658 - DNA, 542 bp, Homo sapiens
tctgttgcccatactggagtacagtggcataatcatagcttactgcagcctcaagctcatggacttaagcaatccttctaccttggcctcccaaattgctagtattataggtgtaagccaccacacccaggctgattttaaaaaatttacattgagttaaaaacactttttttttttgactcatgaaaatgatctctattctaaaatgactcttaacactgtgctatatataattcattgtgcagccgacacaggggaaatagaaatttgagttacagttagagaatttgagctcaagtcttgagtctataaccttaggtgtgtaatcttgcttctatagcctaatccatttgggttcagtttcttcttgtgtgtaacaggaattgctaatcctactcatatgatttctgcgagaattaaataagaaaatacaagtagaagagtcttgtaaaaagcaagggactctaggaaggtaatgttttacaaagttctctaattaatggactcactgagataattgaaggcatttctaatattgtaga

SEQ ID NO: 217659 - DNA, 472 bp, Homo sapiens
gagaaaagagaatacaataaatctatctctaagtataatcttagttttcttccttccttatatagttgaaatactcagatttacctcaaatatgtgtttttgtttttaaaagaaacttgataacaaaagtaggaataaatccagtagttggctaacttactgtgaaaccatcattgttgggaataggaaaagaagagagagatttgcaatcctggcttggttatctttcttgtcattttaatcacagaggcttcctatgaacattcaaaaatttttttcagtttttcttggtatttccagtagctaaaaggagataggtccagaaagtacagagaattagcaaacaaataactggagaatggaagattaccatgctaataaaataatatcttattttaaaatattattattttaaaaaattatttaaatttaaataaaattatttaaaaaataataatattaaaatgatttt

SEQ ID NO: 217660 - DNA, 312 bp, Homo sapiens
gcgtttgaccagctttatttatcaaaaatggtacatatataaatattcttagacatttttgcattttacaaggctgaggattctcgttgtggggttttttgggggccatgggtcctttttgttctcttgggaggaggagggtctcacccccagtcctgtggttgctgcctgggtccgaattcatacagcactttcgtttactcttaaaaaaaataataaaagaaagaaaacaaaagaaaagaagggaaagcagtgtttctagagccgatcacctgattcgttgcgtgagtcggagcctgagcgagcggccgc

SEQ ID NO: 217661 - DNA, 528 bp, Homo sapiens
tgtgtccctcagacacattcctttgatgctaactgggaggcagttaaagtgagtgaaaaaagcttggagttatgcagacctcagttagaattcctgtttccatccctgaatagctctgtgatctacagtaagttaatttccctgagccctgtgttctcacctgaaaagtggagaatcaaatcatatcttaccttgcaagtctgttgtataatatatggacatgtatatagtgtgtagaaaccctttaggacattcttggcagataatagatatccagtacacattggcttatattgctaacttttgacatgctggaactgtgagcagaagcgaacttaggagagaggaatcaggaagccaagatggagaacaaaggtaacattggggacagacgttgaggccatgtatgaagcactcttaagaggagcagtgagagactgtacaagcagctagtgaccagaggtcaaagtacagatgtggccactgactcacagtgctggaatcaaggaaaatatgcaccaggttttc

SEQ ID NO: 217662 - DNA, 475 bp, Homo sapiens
taggtcatgtggattcgctatatggaatatgattgaaggatgattataattacagaaattataggtactaactttccatatttttgggctttatacaaatttctgcaaagttccagagaattgcctttaccaatgaatgtttcctaaaatgtgttgtctattcattatctcttcctttcttctctacatctactattagtaagagttctaatataagagtgctgcaatgatgatatataaatgacaactcaattgaacaaaactattcaataaaatgaatttgcatttaaatatcatattttaagagataaaaaagtttatgataataaaatgggaatgcagtctactacagggaaaataactaggacttagaatctgtaacaaccagagactgaatcctgccaattactttatcagaggctttgggctaattacctcaactttctttcctgaacctcaggttagtcatctgtaa

SEQ ID NO: 217663 - DNA, 448 bp, Homo sapiens
cgtggtggctcacccctataatcacagcactttgggaggccgaggcgggcggatcacgaggtcgggagatcgagaccatcctggctaatacagtgaaaccctgtctctactaaaagtacaaaaaattagccggccatggtgacaggcgcctgtagtcccagcgactcgggaggctgaggcaggagaatggcatgaacctgggaggcggagcttgcagtgagccgagatcgcgccactgcactccagcctgggcgacagagcaagactccgtctctattattcgtttggtaaaatttcagtagtcacaggggctggggactgcgatatgagacagcagcctccaagggctcgagagccgcgtttttgggagatgctggtgcgctgcaacagccctgccgcgtggagcaggtcctcgggccagaggaggggagcggcgcagttcacatac

SEQ ID NO: 217664 - DNA, 443 bp, Homo sapiens
tttgttacaaaataagaggagtttcttaaagtatcctctgctatctactgtctagggttgggctgaggcaactgcattttaacaagatacaccctaaatgatttgtgtgtataattgaggtttattcatgattggatttagagtaaatagttattgcaatatgccctgcagacatagtatatgttttggggaacaagaaaatggggcatgaaactatgataggaagggggaggggaatagtaaaatataaacgtggtgtatgctgacctacaatataaaaagcaattgaaatgtaattttgggccatttgttaaataccactatgaatgtcacaccacatatcttccttttaatttacatcctaaagaaacacaaggctcttgggttctgtaggacccgttagtgatgctttggattgaagaaaagggaaaatttctcgtttg

SEQ ID NO: 217665 - DNA, 660 bp, Homo sapiens
acatggtgaaaccccatctctacaaacaatacaaaaattagctgggtgtggtggtgcatgcctgtagtcccagctcctcaggaggctgaggtggaaggaggcttgagcccgggaggtcaaggctgcagtgagctgtgatcttgccactgcactccagcctgggtaacagagtgagaccccatctcaaataataaataaataaatacaaagcaaatactctgcatgatactacaatgataaatacacaccattatacattttcccaaacccacagaatgtacaacagcaaaagtgaactcgaatataatctttggagtttgggtgataatgatgtgtcaaggtaggttcatcaattgtgacaaatgtatcactccggtagggatgttgataatggtggaggctatgacatgtgcaggcaaggggcatatgggatagctctgcaccttcctttcaattttgctgtgaaccaaaaactgctcaaaaaatattgtctttaatttttttaagtgtaccagtcaggtaggataggttatgctgctgtaacaaacaacccctcaatctccatgtttaaaataacaaatttatttcttgcttatgctgtatgtccaccgtgggtcaccagggggcctctgcttaccactggaggtggtgaccagactg

SEQ ID NO: 217666 - DNA, 1276 bp, Homo sapiens
gcctactactactaaattcgcggcctcgtcgaccacagagatgaggccagagagacagccacagaccagggaacaggacagagcccaccagacaggtgagactgtgactggatctggaactcagacccaggcaggtgccacccagactgtggagcaggacagcagccaccagacaggaagaaccagcaagcagacacaggaggccaccaatgaccagaacagagggactgagacccacggtcaaggcaggagccagaccagccaggctgtgacaggaggacatgctcagatacaggcagggacacacacccagacacccacccagaccgtggagcaggacagcagccaccagacaggaagcaccagcacccagacacaggagtccaccaatggccagaacagagggactgagatccacggtcaaggcaggagccagaccagccaggctgtgacaggaggacacactcagatacaggcagggtcacacaccgagactgtggagcaggacagaagccaaactgtaagccacggaggggctagagaacagggacagacccagacgcagccaggcagtggtcaaagatggatgcaagtgagcaaccctgaggcaggagagacagtaccgggaggacaggcccagactggggcaagcactgagtcaggaaggcaggagtggagcagcactcacccaaggcgctgtgtgacagaagggcagggagacagacagcccacagtggttggtgaggaatgggttgatgaccactcaagggagacagtgatcctcaggctggaccagggcaacttgcataccagtgtttcctcagcacagggccaggatgcagcccagtcagaagagaagcgaggcatcacagctagagagctgtattcctacttgagaagcaccaagccatgacttccccgactccaatgtccagtactggaagaagacagctggagagagtttggcttgtcctgcatggccaatccagtgggtgcatccctggacatcagctcttcattatgcagcttcccttttaggtctttctcaatgagataatttctgcaaggagctttctatcctgaactcttctttcttacctgctttgcggtgcagaccctctcaggagcaggaagactcagagcaagtcacccctttgtactgaattgtcctcatcttgtggggggtttcaggactatttttatctctgacatctctctattgccccatctaccctaatgcatcaataaaaccttaagccactggcctctgtgtctc

SEQ ID NO: 217667 - DNA, 1379 bp, Homo sapiens
gtactcctcacaccacttaacagccacttgtttcatcccacctgggcattaggttgacttcaaagatgcctcagttactgcaaaacattaatgggatcatcgaggccttcaggcgctatgcaaggacggagggcaactgcacagcgctcacccgaggggagctgaaaagactcttggagcaagagtttgccgatgtgattgtgaaaccccacgatccagcaactgtggatgaggtcctgcgtctgctggatgaagaccacacagggactgtggaattcaaggaattcctggtcttagtgtttaaagttgcccaggcctgtttcaagacactgagcgagagtgctgagggagcctgcggctctcaagagtctggaagcctccactctggggcctcgcaggagctgggcgaaggacagagaagtggcactgaagtgggaagggcggggaaagggcagcattatgaggggagcagccacagacagagccagcagggttccagagggcagaacaggcctggggttcagacccagggtcaggccactggctctgcgtgggtcagcagctatgacaggcaagctgagtcccagagccaggaaagaataagcccgcagatacaactctctgggcagacagagcagacccagaaagctggagaaggcaagaggaatcagacaacagagatgaggccagagagacagccacagaccagggaacaggacagagcccaccagacaggtgagactgtgactggatctggaactcagacccaggcaggtgccacccagactgtggagcaggacagcagccaccagacaggaagaaccagcaagcagacacaggaggccaccaatgaccagaacagagggactgagacccacggtcaaggcaggagccagaccagccaggctgtgacaggaggacatgctcagatacaggcagggacacacacccagacacccacccagaccgtggagcaggacagcagccaccagacaggaagcaccagcacccagacacaggagtccaccaatggccagaacagagggactgagatccacggtcaaggcaggagccagaccagccaggctgtgacaggaggacacactcagatacaggcagggtcacacaccgagactgtggagcaggacagaagccaaactgtaagccacggaggggctagagaacagggacagacccagacgcagccaggcagtggtcaaagatggatgcaagtgagcaaccctgaggcaggagagacagtaccgggaggacaggcccagactggggcaagcactgagtcaggaaggcaggagccagaccagccaggctgtgacaggaggacatgctcagatacaggcagggacacacaccacagccat

SEQ ID NO: 217668 - DNA, 1916 bp, Homo sapiens
gtactcctcacaccacttaacagccacttgtttcatcccacctgggcattaggttgacttcaaagatgcctcagttactgcaaaacattaatgggatcatcgaggccttcaggcgctatgcaaggacggagggcaactgcacagcgctcacccgaggggagctgaaaagactcttggagcaagagtttgccgatgtgattgtgaaaccccacgatccagcaactgtggatgaggtcctgcgtctgctggatgaagaccacacagggactgtggaattcaaggaattcctggtcttagtgtttaaagttgcccaggcctgtttcaagacactgagcgagagtgctgagggagcctgcggctctcaagagtctggaagcctccactctggggcctcgcaggagctgggcgaaggacagagaagtggcactgaagtgggaagggcggggaaagggcagcattatgaggggagcagccacagacagagccagcagggttccagagggcagaacaggcctggggttcagacccagggtcaggccactggctctgcgtgggtcagcagctatgacaggcaagctgagtcccagagccaggaaagaataagcccgcagatacaactctctgggcagacagagcagacccagaaagctggagaaggcaagaggaatcagacaacagagatgaggccagagagacagccacagaccagggaacaggacagagcccaccagacaggtgagactgtgactggatctggaactcagacccaggcaggtgccacccagactgtggagcaggacagcagccaccagacaggaagaaccagcaagcagacacaggaggccaccaatgaccagaacagagggactgagacccacggtcaaggcaggagccagaccagccaggctgtgacaggaggacatgctcagatacaggcagggacacacacccagacacccacccagaccgtggagcaggacagcagccaccagacaggaagcaccagcacccagacacaggagtccaccaatggccagaacagagggactgagatccacggtcaaggcaggagccagaccagccaggctgtgacaggaggacacactcagatacaggcagggtcacacaccgagactgtggagcaggacagaagccaaactgtaagccacggaggggctagagaacagggacagacccagacgcagccaggcagtggtcaaagatggatgcaagtgagcaaccctgaggcaggagagacagtaccgggaggacaggcccagactggggcaagcactgagtcaggaaggcaggagtggagcagcactcacccaaggcgctgtgtgacagaagggcagggagacagacagcccacagtggttggtgaggaatgggttgatgaccactcaagggagacagtgatcctcaggctggaccagggcaacttgcataccagtgtttcctcagcacagggccaggatgcagcccagtcagaagagaagcgaggcatcacagctagagagctgtattcctacttgagaagcaccaagccatgacttccccgactccaatgtccagtactggaagaagacagctggagagagtttggcttgtcctgcatggccaatccagtgggtgcatccctggacatcagctcttcattatgcagcttcccttttaggtctttctcaatgagataatttctgcaaggagctttctatcctgaactcttctttcttacctgctttgcggtgcagaccctctcaggagcaggaagactcagagcaagtcacccctttgtactgaattgtcctcatcttgtggggggtttcaggactatttttatctctgacatctctctattgccccatctaccctaatgcatcaataaaaccttaagccactggcctctgtgtctc

SEQ ID NO: 217669 - DNA, 1263 bp, Homo sapiens
tcgctacctcttatggcacgcacagagatgaggccagagagacagccacagaccagggaacaggacagagcccaccagacaggtgagactgtgactggatctggaactcagacccaggcaggtgccacccagactgtggagcaggacagcagccaccagacaggaagaaccagcaagcagacacaggaggccaccaatgaccagaacagagggactgagacccacggtcaaggcaggagccagaccagccaggctgtgacaggaggacatgctcagatacaggcagggacacacacccagacacccacccagaccgtggagcaggacagcagccaccagacaggaagcaccagcacccagacacaggagtccaccaatggccagaacagagggactgagatccacggtcaaggcaggagccagaccagccaggctgtgacaggaggacacactcagatacaggcagggtcacacaccgagactgtggagcaggacagaagccaaactgtaagccacggaggggctagagaacagggacagacccagacgcagccaggcagtggtcaaagatggatgcaagtgagcaaccctgaggcaggagagacagtaccgggaggacaggcccagactggggcaagcactgagtcaggaaggcaggagtggagcagcactcacccaaggcgctgtgtgacagaagggcagggagacagacagcccacagtggttggtgaggaatgggttgatgaccactcaagggagacagtgatcctcaggctggaccagggcaacttgcataccagtgtttcctcagcacagggccaggatgcagcccagtcagaagagaagcgaggcatcacagctagagagctgtattcctacttgagaagcaccaagccatgacttccccgactccaatgtccagtactggaagaagacagctggagagagtttggcttgtcctgcatggccaatccagtgggtgcatccctggacatcagctcttcattatgcagcttcccttttaggtctttctcaatgagataatttctgcaaggagctttctatcctgaactcttctttcttacctgctttgcggtgcagaccctctcaggagcaggaagactcagagcaagtcacccctttgtactgaattgtcctcatcttgtggggggtttcaggactatttttatctctgacatctctctattgccccatctaccctaatgcatcaataaaaccttaagccactggcctctgtgtctc

SEQ ID NO: 217670 - DNA, 606 bp, Homo sapiens
atagaattgtgtagttaagtggacagtacacggggtctcaattaatcaaatgcatttcttagccaggtgttaatttgaaagttgctaggtggcagttttagcacttgctggatgtcttcacgtggttcactgaatccagaaggtcttaattttccatcgagggcacaatgtgtttgttttaacttccctgaatgaagcccttacccctgactctgaggcaaggcttagaatgcacatcatttatgtgagaggtgattcttcccaaggagaacttggagagatgacacagggaagggagaaaagcctgtaaatcagtaaatggtatgttcaaaagcgggcacccttgcagaggacaagggtccagtgtcccaagagactggaacatgcctcaaagttgaccaagctgagggactacggagctgggatatgttatgccaactccagcagtcactggttgaggttcactggcaaactcactgcctggtgttgccaatctgtgcctcctggagtcagaaaatgcccacaaggagaagtgtctgttcatgtccttcgcccactttttgatggggttgtttgtttttttcttgtaaatttgtttgagttcat

SEQ ID NO: 217671 - DNA, 373 bp, Homo sapiens
cacacagtttcaattccattttaatgaaatgtccagaaaaggcaaatctgtgtagatagaaagcccagccctcccttccgcatggtggcggctgtggccctccagggaccggggctgcagctgttgggtttgggctacgtcccttcattcatgctgggagccactgcctgttagcctgggaacacccgggaccaggcctgtctcttccaactgcttctgtgtcctgcgtcaaggggccgggccctgaatagcgtacggcgatgtttagctgttgagagtgttttgggagtggggatcctgagaggcacgtggcattgtagttgagagctgagttcaaagcccggctcgcatatataccaggtgtgtgatcttg

SEQ ID NO: 217672 - DNA, 378 bp, Homo sapiens
tggaatacagcatggtgactatacttagtaatactatattgtacacttgaagcttactgaaagagtaaatctcaagtgttctcaccacacaaacccaaaggtaactatgttctcaccacacaaacccaaagggaactatgtattaattagcttgattgtggtaaccatttcacaatgtatacatttgccaaaacattatgttgtatacctggaatatataattttatttatcaattatacctcaataaagctgaaagaggggattactaattcccacaaaatacagatttaacaaaaacttttattcaacaaacagtgctatgaagttgtaaattggaaacaaaagaaataaaatttcatccacagtcttctcatcaa

SEQ ID NO: 217673 - DNA, 364 bp, Homo sapiens
tagagcaatgtggttttcattttaattaggaaagaccacagggatgagagagatgagaggatcagcttgtgaggtaattcactaaccaaataagttcaggagccaaagaggtctttctgaaatcgacaaattaaagctacagtgttgtctgacattataacaagaggtttttactgttattattattaattttatctgattcagttaccttgttagttctgacagacttggattgctagcttgattagttccctcttatttgtccagaaacaccaaaacaccaaaattataccattttatcaatgtatgcctttatatatggctatggtttaggcaaagtgaagagaaaaatgtctagactaaa

SEQ ID NO: 217674 - DNA, 413 bp, Homo sapiens
gtcaggtaatgaatgttcctgattagctttagcactggtgtatttcaaccaaatcaatttttaaacaaaagacaaaggccagtaacattaaaagagaagttgaacagaactttaactgggaacactaaaaacttaaatgtatgtatttagtaggtacatattaaatgtcattatggtaatattcagatctggtgttttctcagttactgcattaaaaaacttaagtgctcatttgtaaatggtgttctattgacaatactgcttactactggtaggcctagcagtaaagctgctctccatactttcaataaatcctcaatctccttttcctatttctcctggtacccacagaccttgtattagtccattttcatgctgctgataaagacatacccaagaccgagcaatttaca

SEQ ID NO: 217675 - DNA, 455 bp, Homo sapiens
cagctctaacctgggtactgcacatatgtgttgtgggtagaaaggtcagggaatgtttttgctcacaaattcacgtggttatgtgtatgtgcgtgcaatgagagggtgtatgaaagagtgtgagtacattgtccttccaaacctgattcatcccaaactctgtgaggtttttctccagtgccataattgcatttcatttactactgaattttattgctaagtaaatttgtacttgtttgaagagctctgcttgctcaacacttgctttatgtcatatagctctttttcatttcatatggattaattcattgtattgaaatattttatggttaccaattattattggttatcagtcttcacacttattaaccatcagcgtggaaacacatcttcacatttcccttatttaggatactaatgctgtcacaaataaaatcattaaatgcaatcagtca

SEQ ID NO: 217676 - DNA, 431 bp, Homo sapiens
tctctagttcttgcttcttctgtaacatcatggcccctgcctctttggatactctaagatgtcaaatcgactgaggatgactcctgaggaccctttgagatgattaccatcgttgtaggtggaaccagaaaagagaaaatttctgttcttctgatcatttgtcaaattcagctcgaaacaggatcttgagtacagaacatttttcctggttgctgcatagctcagttaatctgtatatcatgggagtgtgttattgagagcatttgcagaagggtggaaccaggagctcatggctcaagcaggaaaatgtttcattatttgcagagcaagagaatgaaactcctgagacctgaatttcagggctccttgaaatgatggatgcattcttttaacttggtggagaaaaagaacataataaattcgagaaaata

SEQ ID NO: 217677 - DNA, 318 bp, Homo sapiens
acaatgttgccataatgtgaatatttttcttttgaatatttcttttagtaatgctatggtattaacagtttttaaaataaatccttttcttttacagcccattccatttgacttgagatattaaaatcttatgacaatctataagccagaccagtagaaatgtgacaacctctttatagtctttaactctgcaacagctttacaattatagagattagagaaccattagaattgtgatacaagtaatataagtataggttttaacactgtcatctgtcactgccatgttcctaacatatatagataaagtatagtttt

SEQ ID NO: 217678 - DNA, 541 bp, Homo sapiens
tttagctcagttgttcttgaccaattttctgtcctagcaaatctgaggggacaaacgtatttctttctacctatattaatggctcactaatgaaaagaaacggtatgagagacatatataagtttgaaaaaactgcagggcagcttctggtacaaggagggcttcctctgatggaaaattgccactttatttaatttatttatttttattgagatgcagtctcactctggggcccagcctggaatatagtggagcgttctcggcccactgcaacctctgccttctgggctcaagcgattttcataccttagcctcccgagtagctaggactacaggtgcccactactacgcctggctaatttttgcatttttagtagagacagggtttcgccattttggccagtctggtctcgaactcctgacctcaagtgatctacctgccttggcctcccaaagtgctgggattacaggcatgcaccaccacacccagctaattttgtatttttagtagagacggggtttctctgtattggtcaggctg

SEQ ID NO: 217679 - DNA, 267 bp, Homo sapiens
agtaatctggaaatgtcctggttgcagtccagtcagtgtggactgttgctaggcatataggaagtaggtcttctctctccagctagcacaaaagcttccaaggaagccactgggtcttcttgtcccattgtctcctctctcaggcccacagggtacaggaggtactgagttgagtctcacagaaaccttcttactcttatagtcaaaactgcatttatttaaagacctgtccatttacatatatcatttttcctgttgactctcata

SEQ ID NO: 217680 - DNA, 170 bp, Homo sapiens
atagctgaagagaccacaacacacaaactcgtttttcagccagcctgtaatgttcctcctatacacactctggaaatcctcagctcccttcaactccggagcaagagccaccaatattccaggtcagccacctatataatatgctcaccacgagagaagactcaaggtaa

SEQ ID NO: 217681 - DNA, 971 bp, Homo sapiens
aattggttttaatttttggtacagtatccaatcaatgttcgtaaactgaatttggctaattcctttattttcttttaaatttaaaataatttttcattattttgaattttgggaatgtctagtctaaccattttattgaatattctagcatggtttaatttcttctaaagtaatttgggttaaacatttttggcacaaatactgtgtacataattgtttttttattaattagttaattgacacattaattagttaattgacagttttttgatgaggaatggaacttgttaatcctcctcacacagaacttcattttacagacaaatgctaattgctatatagtgagtctaacttttggctgtgtaactgtgtctgcattcgcttcctgacagtgactggcagagaaagctgaggccagtcacttcttcttggacttgttacaatggcccatgacctgcaagactgatgtgataaaatgatcaccatcatttgtatcatcatgagtgggactgacacatctttagatgacatcagtttctgtagatctggcaatagtctggagagctttttattttaacctaaaacatgcattcatttatttagtcactccacaaacatttttgagtccttataatttgtgaggtagcaccaaccttgacttcaaatggctttttataattcaataaaatatatgtattctaatacaatttttaagttgatggtagcaaggataacttaaaatagtttattaaacatcactataagtggtatatttgcctacaagtggtatatttacctacaagtggtatctttgccagaggggcacagactggagatctaatcagcctggagttgtcagagggaaaaatcatgcagagatgatattttatctcagtgagaaagttcacgtctgcagcctttaataaagttgcccttacatttctatgcactttcacaacatcattgggaag

SEQ ID NO: 217682 - DNA, 297 bp, Homo sapiens
acaattccaattattgtttccatattcttactgttttggaacccagcacaaataaattgtgatgacatgaggtgacactcatgctgcctgtggcagggcgcatatttaaactttaccacaatttttgagtcattatttcagtggaccaatttcagaatggtctactgataggcattatggtaccacaacctttagtcactcatgtgtgtcctgaattatgatgaagtgcacataatgctttctgggttcagcatttggtgtgattgtctgatttgcttgtttgtttattaaatcata

SEQ ID NO: 217683 - DNA, 481 bp, Homo sapiens
gtagatttgaaatttaaacccagttctttctgactctaatttacctatatgttcatcctccagtatcatgctacctgtatgcctggaaataaaccattttacatagtttctaatgggattacatttttaaaggaaattcatggtagtaaagatctcgttaacactcccttgatgtatggtatttgagtttaagtgtgaaaagaagacactagcaatggacttgtactgagattcaggaaccctggcttctgcttccagttctctcactgtctgatggtgtgatttgagggccttagtcttatcaaatataatcattggttggtctggttgatatctcagttaatttgggaaactaaaatagcatgacattttcaaagaatttttaaaaagattactgtggcagaagcaagttctgggggtggaggtgcatgaggagggcttgggatagtgggaggtggctggagtaggggctgggttatta

SEQ ID NO: 217684 - DNA, 342 bp, Homo sapiens
gggagagagtctttttctcattccagttgatattcatctgtctgcctaaaattattttttttcttcttttttcctttttcttctttgtcatttaccaccattttggctggtgggtgtagggtatgttttttttttttttttttttttttaacctctaagcacattgaacgtctttagcttgtacattagacaggagactgataggataatgatgatggaatgttaaatgctatctatgtaaatcagctccttcaatgggtacaagattcagctactttaggtctttttttatttgacatacattttcattttttttaaggagaataatcttggattgttatt

SEQ ID NO: 217685 - DNA, 279 bp, Homo sapiens
ttttaaaatgcctgggcccagccaggcgcagtggcttacgcctgtagtcccagcacttttggaggccaaggcaggaggatcacttgagctcaggattcaagaccagcctgggcaatatagtgagaccccatcttgattggatgggtggtggatggatggatggatggatggatggatggatggatggatagatagatagatagatagatagatggaaagaaagaaagaatagataaatgataggataggagaaagaaagggaaagaaagaaaagagaag

SEQ ID NO: 217686 - DNA, 1956 bp, Homo sapiens
gggattgcaggcgcccgccaacacacctggctaatttttgtattgttagtagagacagggtttcaccatgttggccaggctagtcttgaactcctgacctcaggtgatctacctgcctcagcttcccaaagtgctgggattacaggcatgagccactgcgccaggcctactgatgctttttgggaagtgttcccaacttggagtcctggtccctgtgtctgatctgcagatgtcttctaccccggcactgggggaacatcttatttttcctgggttaaacattgggatctttataaacctgattatgtcctttccctctaagtctcggttgctttcaggctggcagggttactctgttgggtattccaggaaatgcctgagctccttcaggctcccctagcgttctgttcttattaaacttttcttccccgtctggccggtccttggggaacccactcactattttattttattgaccgggttatccagggatgaagtatgaaactcaaaagatagagtaggttggccaggcatagtgattcatgcttgtagtcccagctgtttgggaggctgagacaggaggatcgcttgagccccagagttcgatgcttcctgagctgtgattgaatcactttactccagcctgggtgacagagtgagaccctgtctccagaatagacaaaagatgcagtggaatccacgtccagaaactgtatgctcactctgggctccagcacccacttcccctccctggaggcagcctgagttttctgtcccctggtatgctgcagatactctccacagaaacaagcagatgcacatgtcaacagttttgcaagtgttgctcttttcccccaccttcttttgacatagctggggcagtttccatctctggtataaggtgccatcttattccatctctggtgtaagagtgtgttgctggatttgagtagttctaagcagcactgcaggagtccccctgttctgctgcatcattttgcacacatatgtgtctgtggaagacatggcccggtggggccccaccttgctgggggagagggatgtgtgtgtgatggtggtgcatgcttcccccttgctactccaggtgtctgccccatcccttcaccctggaggttccagacagcccctcttcaccagcgattccccaactcatctccagctcagatcccacccctgatctccagactcatggccccagctgcctcctgggctccttccccaggatgtgcctcaggggccactaaaggagccagtgcctcccacctgcccggatcgggtgctcctccagggatctttgttccagtgagtggtgccatcacctgcccaacctcatggaccagagcactgccctgtcccaatcacgttctcctatgcaccaccatacctacccctaaagttcttcctggcctcatcccgtcacctctgtctccatggccttggtcccagctcaagcctcgtcctctgccacctggaccatcggcccagcctcctctttggcctcccagcccccaacatccccccctcagtccatccccctaatggagagcttcctgacactagagctgacctcactactcccctgctcacagccctccgcgtggcctctcacctcccccaggatagagtcccaacccatccttctgtgtctcctcctctctgtgtccactgtcctgaccctaactcaatcctcattctctgcctcctggaccctcatcctagcctcgtgacttctggtctaagatgtgagagcacctggcaaggtaaatgctccaggaggggttgctccctcccatttcctgccaccagaaaatgttatcggctgcgtggcattgcgaaagccttcctcttcccagcctagggtttcatgtgggcatttaggtgctcccagtacatagttgcatggcaaacaatcctaaaatatacaagactacattt

SEQ ID NO: 217687 - DNA, 1330 bp, Homo sapiens
gggattgcaggcgcccgccaacacacctggctaatttttgtattgttagtagagacagggtttcaccatgttggccaggctagtcttgaactcctgacctcaggtgatctacctgcctcagcttcccaaagtgctgggattacaggcatgagccactgcgccaggcctactgatgctttttgggaagtgttcccaacttggagtcctggtccctgtgtctgatctgcagatgtcttctaccccggcactgggggaacatcttatttttcctgggttaaacattgggatctttataaacctgattatgtcctttccctctaagtctcggttgctttcaggctggcagggttactctgttgggtattccaggaaatgcctgagctccttcaggctcccctagcgttctgttcttattaaacttttcttccccgtctggccggtccttggggaacccactcactattttattttattgaccgggttatccagggatgaagtatgaaactcaaaagatagagtaggttggccaggcatagtgattcatgcttgtagtcccagctgtttgggaggctgagacaggaggatcgcttgagccccagagttcgatgcttcctgagctgtgattgaatcactttactccagcctgggtgacagagtgagaccctgtctccagaatagacaaaagatgcagtggaatccacgtccagaaactgtatgctcactctgggctccagcacccacttcccctccctggaggcagcctgagttttctgtcccctggtatgctgcagatactctccacagaaacaagcagatgcacatgtcaacagttttgcaagtgttgctcttttcccccaccttcttttgacatagctggggcagtttccatctctggtataaggtgccatcttattccatctctggtgtaagagtgtgttgctggatttgagtagttctaagcagcactgcaggagtccccctgttctgctgcatcattttgcacacatatgtgtctgtggaagacatggcccggtggggccccaccttgctgggggagagggatgtgtgtgtgatggtggtgcatgcttcccccttgctactccaggtgtctgccccatcccttcaccctggaggttccagacagcccctcttcaccagcgattccccaactcatctccagctcagatcccacccctgatctccagactgggaattgcaatttgacatgagatttggttggggatacagagctgaaccatatcaagggtagttcaccactgagattgattgattgactgagatggctcgggatcctcgggaacagcacaca

SEQ ID NO: 217688 - DNA, 490 bp, Homo sapiens
acactaaggacaaacaaagtcacaggacttgacactatgcaacttactgtaaagctataataatcaaaacagtacagtgctggcaaagaacagataaacaggttaacagaacagaataaagagcccaggaataaaaccacaaaatacagtcaactgatctctgacaaaggtgcaaaggcaatttaatggagagaggacagtctcttcaactggacatccagatgtgaaacaatgaatcctggtacacaccttacccctttcagaaaaattaactccaaatggatcatagatctaaatgtaaatgcaaaactgaaaaaaaaaacttttaacataggagaaaatctaggtgatattgggtttggtgacaagtttttaaatacaataccaaaaacacaatctattaatgtaaaacttggtaagttggacctcattaaaattaaaaatttttagtctcaaaaaatgacgttgagagtaaaaaaaaaacaaaaaa

SEQ ID NO: 217689 - DNA, 665 bp, Homo sapiens
tgacccgattttccaggtgccgtctgtcacagctttgcttggctaggaaagggaattccctgaccccttgcacttcccgggtgaggtgatgccttgccctgcttcggctcatacttggtgcgctgcacctactgtcctacacccactgtccaacaagccccagttagatgaacccaatacctcggttgggaatgcagaaatcacctgtcttctgagtcactgatgctgggagatgtagactggagttgttactatttggccatcttggaaccgcccaatgcagtttcttcatggtgtctttggtgtttatattttggtttgtttttgcagtggctggtaccagtttttcctttccataagccagcctggtggtaacaatatccctcagcatttgcctgtctggaatggattttatttctcttttgcttatgaagcttaatttggctggatatgaaattctgggttgaaaattttcttctttaagaatgtttaatattggccccacactctcttctagcttgtagggtttctgcagaatgattcactgttagtctgatgggcttccatttgtaggtaacctgacctttctttccagctgcccttaacatttttgccttcatttcaaccttggagaatctgacaattatgtgtcttggggttggtct

SEQ ID NO: 217690 - DNA, 365 bp, Homo sapiens
ggcaccagggaacaagcatttctaacaactagcaaaattaggacatatctaattgaaggataatgaacatattaccaagcggactggtgagacacagttaaactggtacttaaaggtaaatttatagcattaaatacaagagaaacaaaaaagtttacaagcaaacgaggtaggcatttttctccaaaagttgtaatgagaagtaacagaacaagcctatgaagtcacgaaggaagaaaataacagaatggaagaaatagataaaatagataagaaaataacattatagattaattaaaccaaaagcgatttacccgccccccaaaaagattgctaaaatagacttttggcagaattggtcaatt

SEQ ID NO: 217691 - DNA, 607 bp, Homo sapiens
gtgcagtgactcacacttgtaatcccagaactttgggaggccgaagtagggggatcgcctgaggtcaggagttcaagaccagcctggccaatgtggtgaaaccctgtctctactaaaaatacaaaaacattagctgagcgtggtggtgtgtgcctgtaatcccagctactcaggaggctgaggcaggagaatctcttgaacccagtaggcggaagttgcagtgagctaagattgtgcctgggcaacaagagcgaaaactccatcttcaaaaaaaaaaaaaaaaagaaaaaagaaagaaaatgtggaattacaaataatcattcaataatcatggaaacacaaaaaagtatatagacatattatcaggaagcaactagtggatcatgttagaagatacaaaacagtttaaatagacatggattatacttttaagaaactgccaacataaaatgagagagaggaaaggtgtgaatcttgactctgccagttactggttctgtgaccccagacaagtcacttaaccctccctgaacctcagcttggtcatctggaataaggatataattaataacaactttacctagctatgtatgaaaataaaagagta

SEQ ID NO: 217692 - DNA, 682 bp, Homo sapiens
cccaggaggcggagcttgcagtgagctgagatcacaccactgcactccaccctgggtgatagagcgagacgccatctcaaaaaacacaaccaaaaaaacaactaaccctgggaaataaaacaagctcatggaacaagcagaaggctttaaatgaactgtagtaacttcagagggcaaggagaatattgctgctatgaaataataacagactatttttaaaataattggatgttaagaaaatatgaaattttcccaaaattaaaacctcagtagataggctgaatagcagaacaaacacagctgaaatacaaaataagtttgaagacaaggccaaggaattctccaaagaaagttgaacaaagaacaaatatatatattttaaaattctttaaagaaacatggagaacacaggagtttcacaatgctgatactgcatctaacaggaatcccaggaggagaagacacaggggatctttgtgatggaatgtctgtctcttgactgtatcaatgtcactgtatcctggttgtgattatcctagagtattgtaagatgttattattggagaaaaatgggtaaagattctctgtgatgtagttcttaatgatggcatgcaaatttacagtgatatcagatacaaaagtttaattaaaaaatgagttgtctgctccctaaaaaaaaaaa

SEQ ID NO: 217693 - DNA, 207 bp, Homo sapiens
gggagggaaaagattgacctgacctgatgttcctgttaactcagcagctcccttttgagacctttgcagttgtgattccatagatttcccccaggcagccttttgatctttactcagtttcaaggcctgcctcaaatgtcacatggtttgtgatacttcctgatatcctcctgaaggagatttatcttccctcaacatcctgcctct

SEQ ID NO: 217694 - DNA, 619 bp, Homo sapiens
gcacatgctcgtgagtatagcaattcagagcatggactttggagccaaactcaacggagttcaaatctggaccttgctacttactagctgggtgcaactcagaggaagttactccacttccctgatcctccattttctcttctgtaaaatgggaataatagtagtgtctatgttgtaacattaaagaagacctaggatatgcttttagcacctatcatacattagctattaactcagtattatatttgctgtatcattgtgggaaaatcacggaatctctccgagccccagtttcctcatctgtaaaatgggggtaatgctgcatcctcgagagtgttgggaacattctgtgagccaatgtatacaaattgcttagcccaaaatatggcaactagtgagagctcaattcatgaaggtgattattactttcctgccttttcctttccacagcttctctcctaattcaggcctactttccttttgtctggccaccaaaatagcttatctggccaccctgagtctctctccctctttctgctgtagctcatcctgcatacagtcgccagaacaattttacatcaacacggcttttatcacttcccacacctgctgaggagcc

SEQ ID NO: 217695 - DNA, 423 bp, Homo sapiens
ctgataggctccttccagctttctactctgctgtctctagggtatgggatcttgaactaatcatggtccaggatggcaactagaagtccagccatcatgtccacattccaggctggcagcaggaagaaaggcagaaagaaggacatttgctcttgccttttaaggagtctttttagaaatcttatgtagccgtccagatgtaaggccacacctagctgcaaaggaggcagagaattgcagtcttttacctgggtggcaatgtgccctgctaaaatttgaggttcttttcctgagggagaaggggagaatggatattggggtaggccacctgtagattctgcctatcaattcattcatctattgtatcctgtctctctctttctgtctccttctccctctctccctccctcccttctgttttcc

SEQ ID NO: 217696 - DNA, 252 bp, Homo sapiens
ccctgctactgctgatcagcattttgggggtatgtttcaaagaggaactgccttgagaagcatttctgttgtgatggttattgctatagctcaaatatgtttgctttttggatgtgaccatagaaatctgcaggtgttatcagtgaccttggctcaaaatgtagcattgtttatttgtcatgaacagctagtaataaacatagccagaagaatgagcagtcatctatctgtcttctggtaataacaggagtt

SEQ ID NO: 217697 - DNA, 450 bp, Homo sapiens
ataactgaagccacagaaaatgaactcttggataagggagagctactgtatttctttttttttttttgagatggagtcttgctctgctgcccaggctggagtgtagtggtgccatcgtggctcactgcaacctccacctccctccctcaggctcaagcgattgttctgtctcaccctcaccctcccgagtagctgggattacaggtgcacgccaccatgcccgtccaattttttgtattttagtagagatggggtttcactgtgttgcccaggctggtcttgaactcctgagctcaggtaatccacctgcctcagcctcccaaagtgctgggattacagatgtgagccaccgtgcctggcaggaattactgtagttaccttttgtgtagttgctgaaatttattatggaacccaaacaaaaataatcatgagattaaatttttatgttag

SEQ ID NO: 217698 - DNA, 594 bp, Homo sapiens
tgttattttagtatcctcatgatttcagacttatttctagttgtcagcacttggttgccaaaaataagttactgtcctaaaaatacagtatatttgcaaattaatgctataattttgtcttcttaaaatctgatataaataaaaactgtacagatagatactatagattttgttcttattattgagagtcatgaaattttaaattgatatctcaatataagtaaataaatagtgattagcaaatttagcaaccaccacataggcctgagatgtaacgtctgcaccacatcagaagccaagtgctcactgagttatacgagaatccaaatgctaagcagactgatctacagttgtatatttaaggagatatgtttaaataatgcaaatttcctaggcaagatacaggaaagaacagaaatgagagtagttactttagcatttcaataagaaatatgcaataagaggtttgaaacatgaaaaacagccaagagccagtggtacaaatgaaactacatggaataaagtcttgatgaatctgcagccgactctgcagaaatttttagctaattgtatctctgctaagctttcagaagg

SEQ ID NO: 217699 - DNA, 453 bp, Homo sapiens
cagtgggacatgtgatgaaactgcaaaaatgtaggatctatttatgtttactaagatggaacgtggggaattgagagacatgggctatagaaaaaaagagtattccaaatttattcttaccagatagcattatgctcttttgtgttttgaaataaaaattttgaaagcaaagataatgtttttaaagtattggctaaattctactccagtgctaaaaagaaaaaaaaaattcatttatcagcatatgcatgaatgtgtctgtataaacatgtttgtgtatagttctgttagtcccgttacttaaagacacttttcctccttgtttggaaagtgttacagctctattacctgttgtatattcagctgctttttttttttttctcagaaaacaagtttttaaaaaattctaaaaataaatctggcagaagacaaatctgtgtcctgtcaaaactt

SEQ ID NO: 217700 - DNA, 361 bp, Homo sapiens
gcaaatgtctggctgcccttcccccacatttagcctgctgctctaaaagtcacccagctgcccgcttctctctggggtctctgaactcagatgtccttgctatttaaatcacctgtattctgcattatcttttcatttatttgtcagatatgtcttagcgcttaaccagggccacacgactcccaggaagctgtccaccctgaatcccatggcacagcctccctggagcacctctctacttcgttccctcctactgccactgccctggttcaggccaccttcgcctcttccttgacatcttcatgtctaccagctagtctcctgctttctttcttgccaacctctgatccattctccacat

SEQ ID NO: 217701 - DNA, 709 bp, Homo sapiens
gtgtcgattctagagtatcccaatctacctctatccgaagcatggtcctttagattgagaacaaaatcgtggaacagcgcttcatttttcccgtctcaagaagtcacaaggcccagaatgcaagaaaatcatggcttttcgatgaccaggccttgttggaatggctgagaagctcctcagccccgaccaggtgcagtgactgcattcggctctcacggagcaggtctgagtggagccaggatttgctctgttcaaagataaaaaccactggagagggaagcagcagatcacagggagcgatctcaatcctataggggcctgctccggggtgttttgcacgaggctccatgttaaataagcctccattcgagcgcagcctcaggacggccatccttcattcctctcagtcacacaccttccacttcaggatggccatccttcattcctcccagtcatgcaccttccactgcctggttctctgagcgcttccgtctagcgggagagacgccttcgaccaataattgcacataggtctggatgatgcccagccacagtcactcctctaaaagcaaggaacttgcttctgcagagtcaaacggagctcacgtgaggttcctggaggcactgaggtttctttctagtctcctgttttgcacagacctttttcttactgagcaattcactatctgctggcttcggaagaggtgga

SEQ ID NO: 217702 - DNA, 866 bp, Homo sapiens
atccctcctcccttcccagcactttcgccctccattgaatccctcaagcctcattctggccccactcctcccctcaccctctatccctgccctcctcagatctgccaaacacctcaggcctggctgcctctgtcctgttcctaccaaccttctgaccatgcctctgtgctccttgggacctgggctcacattttcaatctcttctctcctattagtacagctctgtctagagccatggttcttctctacctttcacagctgtcttctttcccacttatatgagtttctttaagtgtgaaaattaaaaagtgccacttaaatacaatgattaagtcataataaacagtacaagttgtacttatgtgagacataccacccatacacgtttgatcttcgagaaccacatctcaatctgcccatggcccattgcctgacactaaaagatgctcacaagaagttgactataaactaacttcttggtctaagatcctaaactcttgagagggaaggtttcaatacatatgaaaccttcttggcagtgcagggatgaggagagtaaaactgaaatgaaagtcagcaaatagtgaaggtgtgaaataggcagtgactctcacactgagacctccaggggatgttaaattttcatttcgaagctgatagtcttatctgggaagcctagagagtaacaaaagttgtaggcatatacttatattagagtggtgcaaaagtaattgctgtttttgccatttaaaaaaaaaatgcaaaaaccacaattacttttgcaccaacctaatagcaagcaaggggaggaatatggagagaaaatcaatttctaaaatgaaaaataaaaaattttttgcaagtag

SEQ ID NO: 217703 - DNA, 431 bp, Homo sapiens
atatgtttgcctttccatctgctgaatttgtattgctttttgtatccactgatgtgttccatcttacccctaattggaacttggagtaactgccaattctaaatcaacttatttgctgcctaactatgctgagctgagtgagcttttgtctctggaccctttagtccatctctctggcaccatgctgggcatggggcttcttgccataatttactgctctctgggaaaagaaaccctgcaggcgcacgccaccatgcccagctaatttttgtgtttttaatagagacagggtttcaccatgttggccaggatggtcttgatctcttgatctcatgatccgcctacctcagcctccgaaagtgttgggattacaggcgtgagccactgcgcctggcctgcaatgttcttaatgccatatgtgaagtagtgaa

SEQ ID NO: 217704 - DNA, 882 bp, Homo sapiens
agtaataagtttgtgtatttgcagctgtgtatgtgtgtttgtgtataaagttttaatgatttctggagaccagtcagcaaatattatatgagaggatagagccagagattctttgaatagaaagtaaaactattaaacttacacagtagctttttaaaaatgtaaatgccagttttatgaaataaataaataaatggttgtcaggatttaaacaatctttatttggagggccctaattcactaacttctcatgtttactctgcgttctttcagagatgtctaaaataggaagatcgttagaaacagtggaagggtgccatgataacagcataagcagggcctataaaatcacagaaatggggcaaccaaccatggaggtatcagtctagagagacataaagcaatgtcatatattccatcattattcagtaaaaaaagttattttttaataaaattcttagaccgggtaacaaattttcagtttcacagttttttcaggcaaaataaccttcgttatcattgcctgttctataaaacagagattttcttctatttatcaccttatgcccttgagatgattttggaaatagatctagtggccaggtaactctgcctaatatttccctcctcagtgtagcattgggccattcaaccaattgctttattcctgcagctgtttctagttagaagggaggtagtcaagaatctgcatgcaggccgggcgtggtggctcacgcctgtaatctcagcattttaagaggccaaagtgctttaagcacctgtagtcccagctacttggggggctgaggtggtggaggttgcagtgagctgtgatcatgccactgtacttcagcctgggtgacagagccagaccctgtctcc

SEQ ID NO: 217705 - DNA, 568 bp, Homo sapiens
agtgtgggggttataggtgtgagccaccacgcctggcctactatgagaaatctgtatggtcagcacattcttgccccatgggcaagcctataatgggaaccaaatcatttgcttagtgagcatgcatttgatgaatcagttgtttaattgcagtaggccaagagaatgtggcatatccctcccccagtagggatggccttgcaggtgacctcacaggggaaatagaaggcatacgatgacaactccttcaacttcctgatgccacacttccaacatctgtccccttccatgattacttccttccttctggttaaaaagattatctgttcctcctggccaaggacagtccttctacctatgctttagatcccaacccctcctccttttccccaaattgctgggattacaggtgtgagccaccgtgcctggccatccaccacttcttatcttacattttagtatcacctttattttagtatgccttcaactatcagttactgttttatgtagttaacaatagttactatccatttctttactattccttcttctgcctcactctttctcc

SEQ ID NO: 217706 - DNA, 439 bp, Homo sapiens
agtgtgggggttataggtgtgagccaccacgcctggcctactatgagaaatctgtatggtcagcacattcttgccccatgggcaagcctataatgggaaccaaatcatttgcttagtgagcatgcatttgatgaatcagttgtttaattgcagtaggccaagagaatgtggcatatccctcccccagtagggatggccttgcaggtgacctcacaggggaaatagaaggcatacgatgacaactccttcaacttcctgatgccacacttccaacatctgtccccttccatgattacttccttccttctggttaaaaagattatctgttcctcctggccaaggacagtccttctacctatgctttagatcccaacccctcctccttttccccaaatcttatactatccaatggcaccaaggatagggcagtgagagcagt

SEQ ID NO: 217707 - DNA, 1761 bp, Homo sapiens
gacttttcgcctctcgctggcctctaccgagcgcgtctatgagcgcagcgttcccgccgtcgctgatgatgatgcagcgcccgctggggagtagcaccgccttcagcatagactcgctgatcggcagcccgccgcagcccagccccggccatttcgtctacaccggctaccccatgttcatgccctaccggccggtagtgctgccgccgccgccgccgccgccgcccgcgctgccccaggccgcgctgcagccagcctgccgcccgcacaccctcaccaccagatccccagcctgcccacaggcttctgctccagcctggcgcagggcatggcgctcacctctacgctcatggccacgctccccggcggcttctccgcgtcgccccagcaccaggaggcggcagcggcccgcaagttcgcgccgcagccgctgcccggcggcggtaacttcgacaaggcggaggcgctgcaggctgacgcggaggacggcaaaggcttcctggccaaagagggctcgctgctcgccttctccgcggccgagacggtgcaggcttcgctcgtcggggctgtccgagggcaagggaaagacgagtcaaaggtggaagacgacccgaagggcaaggaggagagcttctcgctggagagcgatgtggactacagctcggatgacaatctgactggccaggcagctcacaaggaggaagacccgggccacgcgctggaggagaccccgccgagcagcggcgccgcgggcagcaccacgtctacgggcaagaaccggcggcggcggactgccttcaccagcgagcagctgctggagctagagaaggagttccactgcaaaaagtacctctccttgaccgagcgctcgcagatcgcccacgccctcaaactcagcgaggtgcaggtgaaaatctggttccagaaccgacgggccaagtggaaacgggtgaaggcaggcaatgccaattccaagacaggggagccctcccggaaccctaagatcgtcgtccccatccctgtccacgtcagcaggttcgctatcagaagtcagcatcagcagctagaacaggcccggccctgagggtccagaagggccagggcctggcacccacctggagaagcccccgcacccgagggaacccatggtggactccactgtgtttgaagcaacaaagtcacagcccagctgtggccatcccaagcaaattgagaatatattcactaaatgggcttaaaagactgcttttgaaggggcttacagccacaccagaagacacgctaaatatttattatactatcctactttgtacataaatatctctatagactggatctcagctgcagtattttgaaagttataggacttaattacccagtaatttctccactcattccagaagaaaacaaaacctctgctgtaatctgcgcggttagcagccacctttccatacttttccaaaggtaaacgtgaaacccaagaacaagcactggggtttaaactgattttggtttgcgttctggctttttgagttgactgaaaagcagacattgttaggcagcctggaaattcgctttgctttgctttgcttttgcctggctttggtttcccctggggttgcctatcctatctgagccatgtgaagcacgtctccgttgtgttaatttatttcaatgtagcttattttcttataagttatgacatttaaacaatttcagtcttgtgaataataaaaaggagagagggggggaaaaagacca

SEQ ID NO: 217708 - DNA, 1389 bp, Homo sapiens
gtggaggatgaggcccggctgtgccgctgggcctccgggggacattcagagccacccaacaagcggggtctcgtggagggggggcgtttagcgcccggcgaccagctgctgccctgggccacatatctatctgacgatgcgtttggccgaggccgcctctgccgctccgcggtgacctggggttccggtcggggctgtccgagggcaagggaaagacgagtcaaaggtggaagacgacccgaagggcaaggaggagagcttctcgctggagagcgatgtggactacagctcggatgacaatctgactggccaggcagctcacaaggaggaagacccgggccacgcgctggaggagaccccgccgagcagcggcgccgcgggcagcaccacgtctacgggcaagaaccggcggcggcggactgccttcaccagcgagcagctgctggagctagagaaggagttccactgcaaaaagtacctctccttgaccgagcgctcgcagatcgcccacgccctcaaactcagcgaggtgcaggtgaaaatctggttccagaaccgacgggccaagtggaaacgggtgaaggcaggcaatgccaattccaagacaggggagccctcccggaaccctaagatcgtcgtccccatccctgtccacgtcagcaggttcgctatcagaagtcagcatcagcagctagaacaggcccggccctgagggtccagaagggccagggcctggcacccacctggagaagcccccgcacccgagggaacccatggtggactccactgtgtttgaagcaacaaagtcacagcccagctgtggccatcccaagcaaattgagaatatattcactaaatgggcttaaaagactgcttttgaaggggcttacagccacaccagaagacacgctaaatatttattatactatcctactttgtacataaatatctctatagactggatctcagctgcagtattttgaaagttataggacttaattacccagtaatttctccactcattccagaagaaaacaaaacctctgctgtaatctgcgcggttagcagccacctttccatacttttccaaaggtaaacgtgaaacccaagaacaagcactggggtttaaactgattttggtttgcgttctggctttttgagttgactgaaaagcagacattgttaggcagcctggaaattcgctttgctttgctttgcttttgcctggctttggtttcccctggggttgcctatcctatctgagccatgtgaagcacgtctccgttgtgttaatttatttcaatgtagcttattttcttataagttatgacatttaaacaatttcagtcttgtgaataataaaaaggagagagggggggaaaaagacca

SEQ ID NO: 217709 - DNA, 385 bp, Homo sapiens
gatacttcctactccttgctggctttatatgaaggatctcatagttcccctcttctcctctctcctttcggaggtacctcgtgttaataaatgctaagtaaaagagatttaaaatgtacagtacctcatgtaatatctatcctatctcaaatagaaatgtttcagaaggtgcaacatgctttctctggaccgacttttcctattaccagcgaatgtggaagcttaaaaagtaacgtatacttgtgtgtcatttggactttggtattaccataagggaatatatacttatgataacatgaaactccaaatggtacagaagtataaaggaaaagcagaagttttctcttgccctactgcgcccctcactcctccagcttctgaccac

SEQ ID NO: 217710 - DNA, 357 bp, Homo sapiens
agttggttcattgaaagagtaaaccaaattgacagctagattaaccaataatgagtaaataaatcaaattggtaataaaacatcttccaaaacaacaaaaagcccaggatcagatggattcacagcgaaattctaccagacatacaaagagctagtatcaatcttattgaaactattccaaaaaaactgaagaggaaggatgcctcccaaactcattctataaatacagtgtcaccctgataccaacaatcagtgaaggatacaagaaaaaaagagaactgcaggccagtcttcctgatgaacatagatgtgaaaatcctcagcaaaatactagcaaaccaaatccaacagcacatc

SEQ ID NO: 217711 - DNA, 324 bp, Homo sapiens
taccaaaaaaacagcatagtcttggagctaacatttttacactgtatcatagttatttgtgtcttaggtgaagggactgtgtcttccttgtttttttagcctcagactcccaaagaaagcccaacacacagacacagaaatgagtacgtgcataactcttgaccttacagtgcagtccaataggcaagaggaatacatatgaaaagcaattacttcgctttaacagtaatactagtggtagaaagccatttacccaatctcttgcccccaactccaaccatcagaagagtgcaagtgtctatttcacacattacatgaagaaca

SEQ ID NO: 217712 - DNA, 265 bp, Homo sapiens
agggtcatggaagccaggggagaagaagtttccaggaggaagagtgatgagtcagtgccccgcagaggttattaagacacaatagaagtgtccattagacttggaaattcagcagtaaccagtgtgataagagctggttaatggacatgtggtgggtcccaacaccagcctacaggaggttagtaagtaggacagtgaaagtacttttagaaaatttggcaaagaggggcagaagttagagggaatgccaaagctgcgtcgacgc

SEQ ID NO: 217713 - DNA, 705 bp, Homo sapiens
taagaaaggttttaattacttaatgttgcagggataggtcaaacagctgacttcaaattactcattcaaaccaggaatagctatgttggatatttgcagtggtttggtgtgcaattgagtttagttcaataaacactgaatataaatgcactacggctaggtgttatgagactctgaagaccgttaaggcatagtcctttactaagaattcaaaatctttcctatagtataattattttatggttgttttattaatagtgtgatttatatctatcatttattgagcacctactcatgccagcactgtattagtacatttgcataaagctattttatttaattctcacaaaaaccttagggggcaggtattttccatattttacagggtaggaatcttacagaagttaagtaatttgcccaagatctttcagctgtaaatagctgggatatgaatcctgggctgtctgaggtatttcttccctacttaacaagaagtgcagaaatacctacagtattatttatgctctttacatcactgctaattattgttcttggcattaccaaacaagtttgtgtaccaggatgattttaatttaatctggtgttttcagtactgttatatttggagaaaaccattaatttcttttttaagtttcttctggtttattccccatccccagaagttctgatattaaaatttttaaa

SEQ ID NO: 217714 - DNA, 864 bp, Homo sapiens
ggccggagatggattcactgccctccctgcagacacgcaggctcacacacggagcactgggaagtacacatttactgtactgcatgccgactgccttgaagaaactgtagctaaccaccttattagtattcttgcctccaccgtgtctcacttgcagcatcagagggctgagcaaatgcagtagaacagggacagacacagctctggcaatcatctcaatgcaggctgccgaatgttgggggtgggggatgcagcacttcgagattaataaccttgccataatccggggcaccctgcaagcagacacctctgctgattgacctgctactggcttgatgcatctgcctgggggagagggatccggaatctacctagtcctggggcccccctgattttggatgttcatttgatccttcacagatctgggaaggtaacagcgagccgtaccatctgcagcacacagcagctcttggaggttactactgacagttttcattacactggtttgtgtgagtgcgtgtgtttgtgtgtgtttgtgagtgtgggtgcctgctttgcatgaaagagaatgtgtgagtgtccgtgtgtgtgtatgtgttagtgtgacaaccaaagcaggtatttcgtacagtaggagatttcaacaacgtgacaatattctctaggcacttgggctcactgtctgtagcccccaccccccgcctttcgccacctccttgcttccctactcccccttctgcttttgcctttgatgagtttttggcttactttttggcggagtctcttggacacgtttttgctggtgctggaagatcagatacatggaacctttgaaaactgattatttttctccgatatgactta

SEQ ID NO: 217715 - DNA, 555 bp, Homo sapiens
ggacagaactagcctgaaattgccatgtgggatgttctgttctcaccgttcatgtcgtgtgttgtgctgctgtgtgaccgtcatcatttgcatggctccaccacgtcctcctgaacacctccaagacgtaactgccaatttttcacaccactcatcacatgaccattttgtatatgaatatatggttatatgtggatattttcatacctagagttttgccatctaatctgagctcagcataaatttaattggagtttttcaagggctggtatcttttctatggaaatgttccaaagtactttttaaggaagtttcaaaactataaataaccttagatttgactgggagtttggtatcaacccaaagccatcagttgcaagcataccatgaatatttttcttatagacagagctataaaaaaagatacagtagaccaaaatagaaagcaaataaaccatataaagagttctatagtatatgccacttatacacatgtatatgcatttatgcagagacacatatttatatataaaataaatggacataaagagcttt

SEQ ID NO: 217716 - DNA, 433 bp, Homo sapiens
agttgtgttagctctaagcccagttgatggttttggttatgcaattacttgagccctggtttcttcatcaatcaagcaagcctcaaatttcctcctctttctcagttttgtgatttttgacattagcagaatttaaaatacaggatggttgctaagcagtttcataaatggaaaccacatttgtcaaatgagctccacaccaggaaattcagcgagaggattcctgggtatcctcagtcctagcctgcctagcatctcacgtgaattggagtctgtaatgtcctcccagagggaactggatctagccagtaggcacaaacattcttttggtctttccaaaaattttctgcagaaaatgcctatgggacaactcactgtgaagttgaaattatatgcaagtgtgtatacaattaaatttcaaaataaatgcctt

SEQ ID NO: 217717 - DNA, 1567 bp, Homo sapiens
ataattttaatacaattttttttttttgagacggagtctcactctgtctcccaggctggagtgcagtggcaccatcttggctcactgcaagctccacctcccaggttcacgccattctcctgcctcagccttccaagtacctgggactacaggcgcccgccatcacgccaggctaattttttttttttgtatttttagtaggaatggggtttcaccatgttagccaggatggtctcgatcttctgacctcatgatccacccacctcggcctcccaaagtgctaggattacaggcgtggaccaccgcacctggccaaaacaaagtttttaaaagattcctttaataaacatttacaataacatcaagaaatataaacgacatagcaaatatgtgaaagccagccagactctcaatggcatccagaaacataaactacatagaaaagacatgaaagccagccaggcttggcttcgaatcccagcactttggaaggctgtggcaggagggttgcttgatctcagaagcttgaaactagcctaggcaacatagtgagccctcatctctactgaaaatcagaaaaattatccgggtttggtggtgtgagcctgtagtcccaggaatcagtggatgaggccctaggatgtcataggcctgagaattccatgctgcagtgagctgtgattgtgccactgtactccagcctgggtgaaagagtgagatcctgtgcagaaacaaaagaagaaaaaaagagatatgaaagcctatatattgaagactaccaagtactgcttagagcagttaaagacctttggaatagaaaatgtttcttcttgcatttcaagattgcttttgttttggggggacacactattttttaggaatatgaagttcttcttaggcattcctgtaaaaaaggccacttcttgataggattgtattgaatctgtgggttgctttgagttgtatttttatcttaaccatgttacaacttccaacccatggacacaagatgtctgtccattgatttaggtcttcctgaatctcctcgagcaatgttctgtagttgtctgtgtacaagtacggcaccttcttgaacaaatttattctcaggcatattattcttacaagtgctattataaatgaaatcattgtgtcaattttcttctcagattgttcattgctaacacaactgattgtttgctgaaagtttgctgaattcacttattaactctagtagtgtgtgtatgtgagtgtgtgtgtgtgtgtgtgtgtgtgtgtgtctggcctctgtatgcatgtatgtgtgtttgcatctgtaggtattatttgggattttctatgtataggatcacaacatctgcaaattgagatcattttgttttctgttcaaaaatactttttctcatgtttatttttaaaagataatttggccaggtgtagaattgtaggtgacagtttttctttttttaagttctttattgcaaacttcttgtttgtatgagaaatcttatgccatccttatatttagtgctctgtatgtaacatgttctttccctttttattcctt

SEQ ID NO: 217718 - DNA, 375 bp, Homo sapiens
gaatgactcagccttgggggtggctcaggacaccccccctgagcagggggcaggtggtcagctaggacgcagccctgggctcatttgttctctgccctcctccccacctcccccagcttggattggaagcttgtccccaaataggctctgctttgcacgctctaagaaaagggaggcagatctggccaccagccaaggtgaggcagcatccctgggggtgagaagatggggggactgacagttgctgggctaggattcacttcaaggtctcagcctgtcagggaggggcgtaagtcccagggggccagaaagtggccataaagaggacaatctaggtctctggagaaactacctgtacccagcttccctgtgtta

SEQ ID NO: 217719 - DNA, 429 bp, Homo sapiens
aggaaagcactgggagatgcacataaatacattcatcaaataccatcatctaggttatttttgcattcaaatgaatatacttcccaggcaagtaattaaaataaaatctgtcagagaatgtaaaactctaaatcataaaatgttcgttaaaaaaaaagaagcaatggagaaagactaagatctatagtaatgtactttgctgtaaaatattttagcattgatttccatttttatgaaattcatagttgatttgaatacaaacagtaagtctcatcacaggtgaaacctatctttttcttgtttgctttccgaggaattgttgaggaaataattaggtgtttctttatctataggagggatccaaatattccttaaggtctttacagctctactaatttaagatatctgtatttgacaatttttgccttg

SEQ ID NO: 217720 - DNA, 136 bp, Homo sapiens
gagagggggcggagcgtggaggcggcagctggaaccgcgcagcgcacgggaacgcgtcccgctgcttgggtcaggttcgccggtcgcgggagccccgccgtgcagtcggaggaacacgtggccatcagtaatcatg

SEQ ID NO: 217721 - DNA, 522 bp, Homo sapiens
actttctgacatcgaggcaggtggatcacctgaggtcaggagtgccagaccagcctggccaacataatgaaaccctgtctgtactagaaatacaaaaattagccaggcatggtgatgcacgccggtaatactagctactcctaggctgaggcaggagaatcacttgagcccgggaggcagaggtttcagtgagccaagatcatgccgttgcactccagcctgggagacaagagcgaaactctgtctcaaaaaaagaaagagaaaagaaagaaagaaagaaagagagaaagagagaaagagagaaggagagacagagagagagagagagagagagaaagaaaggaaagaaagaaagaaagaaagaaagaaagaaagaaagaaagaaagaaagaaagaaagaaagagaaagaaagaaagacgactatttttatttattcaataaatatttgttgagacatgagacactactttatgccaggctcatgagtaacactgagaggagccctaccttatttcaggtac

SEQ ID NO: 217722 - DNA, 431 bp, Homo sapiens
tgagacgcagcccttggccccagcttcccatgggcagggagccagccgagcccctcagaggcgttccccaaggctctgcagatgcggcccaggaagatgcaggaaaagaaggacagcccagtgtctggggcccctcccagggcgaagaaccggcattcctaccgcagcccagcagggctggtcactcgtcttagtgcccaaggctccaggttaagaggagccacgtgagccacgatggtcatcaccagatgctgggtgccgtgctcgaagccaggaccggctgaggctttcgggggttgcatgttttgcatgcatcagtgaaggagacatttgtgacccactactggggcaggtggtttcactttcccaccattatgtccagaattggtaggttcttggtctcactaacctcaagaatgaagccgtggaaa

SEQ ID NO: 217723 - DNA, 331 bp, Homo sapiens
atgagacgagatcacgccactgcactccagcctgggccacagagagaggctccatctcaaaaaaaaaagaaagagagagagaaagaaagaaagaaaaagaaagaaagaaagagaaagaaaaagaaagaaagagagaaagagaaaggaagaaagaaagaaagagagaaagaagaaagaagagagagaaagaaagaaagaaagaaagaaagaaagaaagaaagaaagaaagaaagggaaaaaagaagaaataaaggaaaagaaagaaaagaaaatctaatgccccgctccatggtccatggaaaaattgtcttccattaaaccggtctctggt

SEQ ID NO: 217724 - DNA, 859 bp, Homo sapiens
agcggggctcgagcattcttgtagcacaactggatgagaggacattctcagtggtgcaacacgtcaataccacgtaccctaaatccaaggctggcaacgccttcattgcccgaggaatcctctatgtcacagacaccaaagatatgagggtcacatttgcctttgatttgttaggagggaaacagatcaatgcaaactttgatttaagaacttcccagtctgttcttgccatgttagcatacaacatgagagatcagcatttatattcatgggaagatggccatttaatgctttatcctgtgcagtttttgtcaactaccttaaatcagtgatgtgctgcattcggctcccttcagcaaatttcaggggttttctgggaccagttctcccccaacaggaaacttgtttttttaacgtcagccagatatttagaaaataacctcaaaagtgtttatatggtcagtgagccccgcttagtgaaatagcaacagattggaagttgaaatggctgagattttctgtacctgtaggtaatttggtgattcttggtggctgctcttctcacaacttttatgtatctgcttctgtcgtttagcttttttagccacatgctgaccaaatttacctttgagttgataagtccagtggcttgagtagtgaatccctcagtgctgacttatatcttgttctttgaaaaaatgcattgactctttaagacatctaaagtatcacattatccataatttattgcttttctttgcatctgcacctgccaccacagaataaccattaccctcagctgctgattgggcagctctgagattagcaaaagccagggacagctacatgttcaggtttt

SEQ ID NO: 217725 - DNA, 959 bp, Homo sapiens
agcggggctcgagcattcttgtagcacaactggatgagaggacattctcagtggtgcaacacgtcaataccacgtaccctaaatccaaggctggcaacgccttcattgcccgaggaatcctctatgtcacagacaccaaagatatgagggtcacatttgcctttgatttgttaggagggaaacagatcaatgcaaactttgatttaagaacttcccagtctgttcttgccatgttagcatacaacatgagagatcagcatttatattcatgggaagatggccatttaatgctttatcctgtgcagtttttgtcaactaccttaaatcagtgatgtgctgcattcggctcccttcagcaaatttcaggggttttctgggaccagttctcccccaacaggaaacttgtttttttaacgtcagccagatatttagaaaataacctcaaaagtgtttatatggtcagtgagccccgcttagtgaaatagcaacagattggaagttgaaatggctgagatttggtgatctccccacagctggctctgcaagttacctctttctccttgggccttagtttccccattggtaatctgaattggctaagatgattggggagattttctgtacctgtaggtaatttggtgattcttggtggctgctcttctcacaacttttatgtatctgcttctgtcgtttagcttttttagccacatgctgaccaaatttacctttgagttgataagtccagtggcttgagtagtgaatccctcagtgctgacttatatcttgttctttgaaaaaatgcattgactctttaagacatctaaagtatcacattatccataatttattgcttttctttgcatctgcacctgccaccacagaataaccattaccctcagctgctgattgggcagctctgagattagcaaaagccagggacagctacatgttcaggtttt

SEQ ID NO: 217726 - DNA, 685 bp, Homo sapiens
atcgttaacctggaggaaggaggagactgttatcgttgcctgagcactcctctgctggaaaaagcaatgagcctgaatatggttctactaattgttacggtcagaaacctaaagaaacaagaggtggaaactaaaagaggaaaaagccagtggaaattaacgtttgctctgattttaatagcgcccgtgaggcaagcatgctacgtcagtgggaagtggtgacaatccacctgagctgtgtgctataactcaataacatttgtaactaatttaacctcacatatatttagtgtttatgtataaccatggttgtgctgcttggtaatgaggcattaaaaatgagccagtccaagaattgagtttaaatagtactccttctctcagccaaatcaagcatttcttgctgaggggctgaagggctgggtggagagaagggaattgggtagagttagtgagcagctctgcatcgtctctgaaaacccctcatttcctctcaccctttcctaaggcgaggaggaggactttctctcaaactgtaaaatccaggctgtgctaaccacactcagtttaaaggaagggattataaaagtgcttgaggtggagactaatcccatgaaaccctctcccacctgaggaatgggaaagatgctctgaagcctctggattcccacaccttactgttgtt

SEQ ID NO: 217727 - DNA, 588 bp, Homo sapiens
tgcttcttacatcctgttggtccctcctcattaggtggccacatctggctgcaaatgaggctgggaaatgttatctctagatgggcacctttgcacctagctaaactgggtggtgatggtggcaggtgtatgttactaaataatgattttgggggcacacttagtagttatcatagaaatggaagactattttgattaaaaagtcaacttgggaggaaatgagtgattaaaaaacatctgggcctaccctataagcttcagtacttgccatatgtaagtaacaggactcaatacttctttcttttttccttctagaaaagtatgccatgcagagttaagagtatgtaaatttaaaagacagtttgtagctcttactctcaaccagtgcatttgtggtgaaaatgggtggcataggatacatgtgcatattacaaacaaatgcttgcaacatggaattctctctacacttttttgtctcattacttatattttcagattcagtacaacttgtggtatcagtttatcaccatcttcgaaatattttctgaaagatgatatattttctaagtggaagaattattcctttcc

SEQ ID NO: 217728 - DNA, 307 bp, Homo sapiens
tgcctcccgccgcccgccgcggaccaggcgctccctcccggcggctggcgagccagctccggacatccgtccccacctttccgctaagcgcggcgcccgcggggcctgcctcggcggtcaggtcagcggcctccagcctcactctccggccccagcccgcagccgccgccgagcggagcgcacctgacccaggcgggcggggcggggcggcgggcggggcgcggggctgacgtggcccgcggcatggagcgggcgtgattcatcagcatccgcgccggggcggcatgggggcgcgcgcggcggccgc

SEQ ID NO: 217729 - DNA, 376 bp, Homo sapiens
ccgagatggcgccactgcactccagcctgggtgacagagcaagactctgtctcaaaaaaaaaaaaaattcagggaagaggctgggcatggtgagaactctgagtaattcagaatgctcagggttaaaaggatgaggagaaggaagcccaccaagaggccattagaactccactttggggcaaggaggcaaaggaggtgaaatgcaaacccaccctgctcaggctgtcccccaacaacaaaaaaaaatcacaaccacaatgagtccctgtttccaaggaggtggttgctagggtaggaaatggactgaagaagctctttgtcatggagagaatggcaggcgcagtcacagaaggcacggctacgggataatgccata

SEQ ID NO: 217730 - DNA, 343 bp, Homo sapiens
acgccattctcctgcctcagcctcccaagacgctgggactacaggcgcctgccaccacgcccagctaattttttgtatttttagtagagacggggtttcaccgtgttagccaggatggtctcgatctcctgacatcgtgatccgcctgcctccgcctcccaaagtgctgggattacaggcgtgagccaccgtgcccgggccagatcaactgatgttttgagttcagatacagagtaaatgtagcttgtaaagtactggtcattagaaccagagaatgaactctgtccctcttttaaatctggttggtttagtctttttagacacataccgttcggggacaaag

SEQ ID NO: 217731 - DNA, 320 bp, Homo sapiens
ttctccaagacagaccatatgataggccacaaaacaagtttcagtacatttaaggaaaatgaaattatatcaagtactctttcagaccacagtggaataaaattgaaaatcaattccaaaaggaaccctcaataccatgcaaatacatggaaattaaataacctacccttgaatgatccttgggtcaacaataaaatcaagatggaaatttaaaaaactatttgaactgaattataatagtgacacaacctatcaaaacctcttggatacagcaaaaggtggtgctaacaggaaagttcatagcattaaatgcctacatc

SEQ ID NO: 217732 - DNA, 467 bp, Homo sapiens
tttggttgaatattttatgaacacttgtgataataaatttgtgccagtgagtactatattctttaaaaaatatttctgaaagtttggtgaagatgtgagagagactaaaaataatttttctattgagcctagattttcatgctttatgtctgaacaccaaaatttttttaacttttaaattcaggggtacaactgcaggtttgttaaataggtaaacttgtagcatgggaatttgttgtatggattattttatcacccaggtattaagtcttgtacccactagttatttttcctgatcctctccctctaccttctgaaaggccctagtgtgtgttgttcccttgtatgtgtccatgtgttctcatcatttagctcccacttataagtgagaacatgtagtattcggttttttgttcctgtgttagttttctaaggataatggcctccagctccatccatgttgctgc

SEQ ID NO: 217733 - DNA, 814 bp, Homo sapiens
caagcatcagaaccagactcagatttgacacaaatttggaaattatcagatagagaatttaaaataactgttttagattttaaagactctaatggaggaaacagtcaacatgcaaaaatagatgtgtaatgtaagaagagtgatggaaactctaggaaacaatcaaaaggaaatgctagaaataataaaaatcactgacataaataaagaatgtcttcaataggttcatcaacagaacaagtttgaggaaagaatgagtaagcttgaagataagtcaacagaaataatttcgaaagtataatatacatctatttggaataccagaaggagaagaacaagaacaagaaactaaagaaatatttgaagtaacactgtcagaggattttcccaaattaaccacagcaaatcacaagtcaagaagtagagaacagtaaacaggagaaataccaaaacaattatacacaaacttcagaaaaccaaagacaaaaagaaaatcttcaaaggagtcagagaaaaagtaacctgacttacagcaaaacaggacaagaattaaattagacttcccatcagaaacacagaagcaagaagactggagtgaagtatttaaatgctaaaataaagaaaaaaaatacaaacttgagaaataaagacttcctcagacaaatgctgagggaaataatcaccatcagaccttccctgtaagaaaatattaaaagaagttcctcacggaaaaggaaggtgataaagttcagaaactcaaatctgcgtaacaaaggaagagtgccaaagaaggaataaataaaggtaaaagaaa

SEQ ID NO: 217734 - DNA, 425 bp, Homo sapiens
caggcccatggtggaaagcagcagctctccatagacccaacagtccgtcttgttctagagagaggccacagtctgcgcccagtcagtgaagaggttctctgcctaacatctaaccagatgacacccaagcacctgaccaaaacgcttgaaccttggaccctctctgcatcaaccatccatcctccatttgcctagtgggacaacaaggtgggggctgcagcctccaggctggaaaaagacttagaaaccagcatatcattaatgcaatggaaaataggtaccccctccattccataaccatctattgttgttataggccctttgaactgatgaatgttaccatatatgagagtgtattccactctagtatccactagggcaagcacagcctattcttatttgtccaatatatagttagttctaca

SEQ ID NO: 217735 - DNA, 249 bp, Homo sapiens
gtcttcaagctctgaaattctctcttctccttgttctagtctattgttgaaaccttctactgcattttctatttctctaagtgtgtctttcatttccagaagttgtgattgttttttctttacgatatttatttctctggataattttttaaatccatatcctatattgttttttaaaatttgtttaggctggtcttgaactctggccctcaactgatctgcccgcctcagcctcccaactgctgggat

SEQ ID NO: 217736 - DNA, 300 bp, Homo sapiens
taccaagcaagcagtcttcagcgtagcttaaactacaggagcacgcccgtgcttggtgaattttttattttatttttatttatttattttttgagacgcagtctctgtcacccaggctagagtacagtggtgagatatcggctcactgcagcctccgcttcttgggttcttaaaagtttttcgttttaaaaccaaaaggaaaagaaagtgtattagcacagttgtcatgagctttgatgcctacaagatctagtgaaaaatgtgtttttgtatgttgaaatccctgtaaaagtattttgt

SEQ ID NO: 217737 - DNA, 624 bp, Homo sapiens
aaagacaacaattcctgttctcacagagcttatattctatattccatattttagttaatatttatagttatttttacatattccttaagggaaactgttttttcttatataatcaccacatatcctaataatgtacaatacatataataatggttcaataaataagcataaatatccctgtttaatgtcttcttgtgcaggagcctatgctctataattacgtacaaagaacactcatacattatttaagttagccatagtttaaatgtaaaacctgtcccctgtttgatgtctatgaaggcaggttttgagctcttcaggaaatcttaaatattggccaggggcggtggcttacgcctgtaatcccagcactttgggaggccgaagcaggcagatcacctgaggccaggagttcaagaccagcctggccaacatggcaaaaccccgtctctactaaaaaatacaaaaattagccagacgtggtggtgggcacctgttatcccagctacttgggaggctgaggcagggataattgcttaaacccgggaggcggaggttgcagtgagctgagatcatgtcactgcactccagcctgggcgacacagcgagactctgtcttgggga

SEQ ID NO: 217738 - DNA, 609 bp, Homo sapiens
tcggctgcagcagcagctggtgtatctgtagcctttggagcacctataggtggagtattattcagccttgaagaggtaacaacttttcattgtacagcatgtgcatgcttttgtgtcaggaattttgtacattgcagcgcaataattttgtacataatgtacaatatctgtgtatatcccagtccctgagtgctctccccaacttggtgctttaccatgtgactagaaatccagtcggcagttttcatccattagttgactctcatgcctgcagcacaacatttcacctgaaatagtttctgcgtattgactgagtttgctttctcaccttctttcttctaggtcagctactattttcccctcaaaacattgtggcgttcattctttgctgccttggtggcagcattcactctacgctccatcaatccatttgggaacagccgcctggtactattttatgtggagtttcacaccccatggcatctctttgagctcgtgccattcattctgctgggcatatttggtggtctgtggggagcactgtttatccgcacaaacattgcctggtgtcggaagcgaaagaccacccagttgggcaagtatcctgtt

SEQ ID NO: 217739 - DNA, 207 bp, Homo sapiens
ccagctactcagaagactgaggtggaagaatgacttgaacctgggaggtggaggttgcagtgagctaagatcacaccactgtactccagtctgggcaacagagcgagactccatctctaaaaaagaatggctctggaggcagacagacagacctggtttgagtccttttattgctaccacctagctatgtgaccttgggcaaattat

SEQ ID NO: 217740 - DNA, 439 bp, Homo sapiens
tagatagacagatgagatccaagaaaggacaaagacctggagatggactggagatgagactgagaggtgagactgcagtgagagagatgagaaagagaggatcagagagagagagagaggcagcacagagaggttaagtaacttgccctaggtcacacagctgggaagtggtggagctgagatttgaacccagaccacctggttcctgagcccatgctctgaacccccaaggggcagttccgagagagtccaggagggtgtgtggggtatggtggtgtggtgacctgcctgcctgctctggccccgaacttggttgggtactagagggaggagacacttccagccagatgctggtgcctgggaagctgcgggcagccctcgggacccaagccctgctcataggtgaggagaggtgggctgcccagcagtgccttgccca

SEQ ID NO: 217741 - DNA, 363 bp, Homo sapiens
ttatgatacattatcagataaggaaagggaggaccaggggctctgcacttgcctcagggtttgtggctggtgaaggctggaaccaaggctgtgagctctgcctgttgactgcagagaagctaccgacctactcaggcctggggaaggaggagggagggatggtgggagaggaatatttgaaagcaagatgggggccaggcatgatggctcattcctataatcccagcactaagggaggctgagacaggaggattgcctgaggccaggagttcaagaccagcctgcccaacataggagaccccgtctctaccagaaaaaaaaaaaaaagagggtgggaggattacttgagcctaggagtttgag

SEQ ID NO: 217742 - DNA, 234 bp, Homo sapiens
tctgtcttacttggttttgtctccacaggcctgggctatggtagatgcttagccaataacattgttggacagttctcattattagaaatttctctatactgattcaaaacctgcctgttataacctttgcttattggtcataatcatgagggcatgattatggtagagggagacaaaatgattttattgccatatcagccctatcatgtaccccaataaatttttctttatccc

SEQ ID NO: 217743 - DNA, 264 bp, Homo sapiens
agatgatgatggcacatagcccatgtcctgctgtgggattaaaggacagcattaccatacttcaaaaccaaaataccaaattataaagatgcatccaaaagggatatctatcagacattctacctggcgtctgctgctccatcatcactgcatccatcatcaccagaggagtctcctctccttctgtggtctcatgaccagaaaatggaagaagttaaaagcttattggattgacaaaaaaaaaaataaataataataataaca

SEQ ID NO: 217744 - DNA, 521 bp, Homo sapiens
gctcacaggaagaagggcccagatgagactttgggcttggacttttgagttaatgctggaatgaggggcttccccctttgctgggcactcattcttctccttcctgctgccatgtgaagaaggatgtgtttgcttctccctctgccatgattgtgctgctgctgagccaggagaatagaagcgtccaagtcagtgccttcagagatccagctgacttcaagagggctgaggtccacccagggccaccagcatcaggaaggagacagctttgcagtgactccacccgctatgtgctgggaggcattggctgactccaaagcacacagcaatttcggcttggcccacggcagcaaacagctgtgccaatgcccatcctaacgagaataaggcaaggcttagcctgtaatccacccctctgcagaaaccaatcattcctcctcattaccgagtgaagaaatgcctctcaaggctccttttcctccttacaaacaaaataaaacaaatccttcctatggatttca

SEQ ID NO: 217745 - DNA, 506 bp, Homo sapiens
gctcccagctagtctttgtattttcagtgcagacagggtttcaagaccagcctgaccaacatggtgaaaccccatctccactaaaaatacaaaagtagctgggcatggcggcgcacgcctatagtactagctacttgggaggcagaggcaggagaatcgcttgaacccgggaggcagaggttgcaatgagcctgagatcgcgccactgcactccagcctggcaacaagagcgaaactccatctcaaaaaagaaaaaagaaaagttctgtggggacacgggagaagggattatcatttctaaagtctttgcttattgggggacacctgagccttgttggctttgaaagaataaaccttgacagacccacgtctggggacttgtggaaggaaagaacccggaagggatgttgcctgcagcaggaagtgaatcctgagacaacttgttcatagaggatcttgattgtcatcctcaaagagttggaatttttttcatggggcggtggaat

SEQ ID NO: 217746 - DNA, 520 bp, Homo sapiens
ccaacttcatgttcattaaattagtggactcagaaaggccagtttctgtgaaagtatagctgtgaaaatgcaggtaacacaaaatcttgtctagacccctgtgccctaccccctctttatcaagcctgtttataaaaacccaaaaggggttggtattcagttgttttctaaatactctgtgtattttaaaattgtttgcattgaatagttagctaatacaaaataatatataggggggcgcgatggctcacacctgcaatcccagcactttgagagaccaaggcgggtggattgcttgagcccaggagttcaagaacagcctgggcaacacagcgaaaccccatctctacaaaaaataaaaataaaaataaattagctgggcatggtggtgcgtgtctgcaatcccagctattcaggaagctgaggtgggtgaatcactggagcccaggaggtggaggctgcagtgagccgtgatcatgctactgcactccagcctgggcaacagagtgagaccctgtca

SEQ ID NO: 217747 - DNA, 483 bp, Homo sapiens
gtatctatcatgtgtggttgagcactctttagccatatctgttacatagctaaaatgaagcagcctccgtcagttttctgttctacaatttgataaatggattatactcacacgtaggataaggaattggttgtaaatcagataaggggccaaatctcccacttttctgacttcagtatcataatctccaaatatggacttcagccttcaactttgagtcctgcaaaggtatattacctatgcaaaatagattaaatatcagtttttcagaatgcacacatttttttctgctttcttctctcaccctcagaaattcatgccaagatctgccgtctatggttgtgatctgttcctaaaatggccagcgtcatttttcttcacacttctcattctgctgatagacaatttgaggttaaaaatacatagtcattgtgttttcacatttcttaacttctttgtgttacaggaaaggggttctgatcc

SEQ ID NO: 217748 - DNA, 561 bp, Homo sapiens
cctttttctgtttcatgctccctttctccctcaagccagctctgaatgtgtgagcctttgtgccatttctgaatttacaaatccccccagaaggcactcatcatggactctctttctagatctttgttgccagttatggagaaaagaatggacttaactttccctagggctattataaaacaatgatcatctgtcccaggtggttaagcttctataaattctcacaagtagcagaagccaggttctcacccaccagggaaagctgagcattggccttaccactgccaagtgtatttggagccgttgtttttctcttgtgctaactattccttccagccaaaacttaagttgagagaaggggaacaattatcctcattctttgagaattacaaattgtattttaaactggcatattttcaccagttttacacacttttttctctttttcttttttttcagtttggataatagttcttggaattaaaccttggccttggggatatccgagctggggggttaattgttgaattgtcctgagctaacaaaattgttaccaaaaaa

SEQ ID NO: 217749 - DNA, 438 bp, Homo sapiens
cttagtggtcaggatcaattatcccagccagcttagcaattcctttctttgcctgttgattcaaaggaatgaggagcccaaagtggctgcacggcagtcacttccaattcaatggaataactgttgtgtctcctggtagagcacaatgtttggaaacccggtacttatttaaataaggtggtcagagaaggcttttctgaaagaatgacatttgagaaaagatgactacagattcttacaagctaaagagtttggattttgcagtaagtttaatgagatgccaaagggtgttctcagtaggggagtgacatgaacaatttacatttttgaaaaaaacattctggcctctgtgtggagaatgaataaacataaatgtgtttctcagggttccccagagaaacagaaccaaaaaattttaagttacaggatatcaaaaag

SEQ ID NO: 217750 - DNA, 426 bp, Homo sapiens
ctaaaggaagacatttagaaaatttagaatataaatttctgttagtagaaactaatttctcttgctgttctctaaagtatacttgatttgaaatatgtgccctgaagttttgctatgttgaaaaaaatgatgagccgggcgcagtggctcacgcctgtaatcccagcactttggaaggccaaggcgggtggatcacctgaggtcaggagtttgagaccagcctgaccaacatgttgaaaccgtttctctactgaaaatacaaaaattagccaggaatggtggtacacagctgtagtcccagctacttgggaggctgaggcaggagaatcgcttgaacccgggaagtggaggttgcagtgagccgagatcttgccattgttctccagcctgggcgacaagagtgaaactccatctcaaaaaaaaaaa

SEQ ID NO: 217751 - DNA, 585 bp, Homo sapiens
aggtctgcattcctctaggtctctctaacgcatatgcacacacacgtgcacacacacatgcctgcacagacacacgtgcacacacttgcacacacttttcataagggacgcattcatcccttcatcttgcccgcccgctgaggcctgggctgtagctctggctgtgggtggctggcacaggagttttctgggctgggcacttctgctgcagtttgtgcatctcagacctgacttcagagttgcatgtgggcgccgtgctgctggccccttcgctttgtcatagctgcgcccccttgatgtgcctcacgcatcagtgcttggtgtcatttcttgttgaattaatgcatgaaatttgcgtgtgtgtatgtgcatgcttgcacactgctgctactagggaatacagtgtgttaaaagcatattaatacagttatttctattatgagttttctccccttcgctctataaggttattcttagaaaagccatactatttcttttatttctgtttttttgactaggctacatggcagaaatgaagtccttactctgtcgcccaggctggagtgcagtggtgtgatctcagct

SEQ ID NO: 217752 - DNA, 363 bp, Homo sapiens
catggacagctcctccagtggggtctcagactggagagacgccagcgggcgggggtcgttccctggagctcccgcatttgttatggtcgatgccccactacgttgtcaccttctccggaggacctcctgctctgtccttgacagatgggccccagtgggcccacccaggctggagatgaatctcaaagggactccatgcctgggagacctcagccaagcagggcagagaaataatcagacaacagtcagcgcatggcgcctgcagagttttgcacagggtccttcagaaggagggttagggaagacttcttgggggttagggcagttaagcaagatggataaagaaagcaaccacttatgtct

SEQ ID NO: 217753 - DNA, 266 bp, Homo sapiens
aaactttagcttgaaaagtgattattatttgacttaaagatgctttctggagcattcacaagcagaaaaacagcctgtgaccagccgtcaacacagctcttcaccacagcatttcttttcccaaagagagtgaaaatcattagcccatcactgaatgtcagatcatcaaggaacctaacaactttgtttatctctgaggcggcattcaggaatgagttttcaacacttgttgtctgtgggttggaagctttacaaattcacatccc

SEQ ID NO: 217754 - DNA, 297 bp, Homo sapiens
tctgaagtccagacagtttgcctcttggatgaggttattccagccctacctactgctccattgtgccttggcatctttggggattgtccatttggaggggccagattagaaaaggaagagcatgattacagcaatgttttaccagcaaactaggatcatcttgtcctgtatttttgccttgccagaattacctgttttgtctgagaagcaacattaagcacaggagtttggataccgtggaatccagagggcaaatgacccgggtcgtggtgtgtctggctcaagaaataacatttt

SEQ ID NO: 217755 - DNA, 539 bp, Homo sapiens
aaaggtggaaaaaaaaaaaagcaaatggtgaccttgatttgaattacttcataataaactttatacagcataattttaccatccagtatgtctgatgacaggcagccaggactatcaaagctgcaaataatgagtgctttataatacttgaattaattgttaggcactaaacagagaagcctcaaactttgtatttgtcacctaatgcagtggaagcatggataagtctgtgtgtgtgtgtgtgtgtgtgtgtgtgtgtgtgtgtgtgtgtgtgtaagacagagagagagataggggagggagagagagagagagatacagagagacagagtgagagagagagaactctatatctaagagtgatgtattggaaaagaaaggatcttgtgctacatagcgtgggtacataacgcacttgtacagagtgggtacacagacgctcagtgctaagtgtgcaattctaagctattccctgttgtatccctataaaaatgtttgagaggccgggtgtggtagttcatgcctgtaatcccagcact

SEQ ID NO: 217756 - DNA, 242 bp, Homo sapiens
tctatattgacaaaaattaaatcaatttctttgggtatgggagggtcaactaagggagggtctgtggtgaagagtgagaaagggattatgaaaaggcatgaggaaattttgggcagtgagcatatgtttactattttcattataatttcatgggtgtatacatatgtcaaaatgtatcaaactacatttaaatatatgcagttaattttatatcaaacatagctcaataaaacattatttta

SEQ ID NO: 217757 - DNA, 309 bp, Homo sapiens
caaatgggcaaggcaggagctgtttattcaaggacagcttttatggaaaattctttagaactacagcctgaaggaaggtcagtaagatgatttcctgcaagactgtcctctttctgagacgagacagaattaaaaccctgtgcccgtgtctcggcctccatagtctttttcatttaggactgaagtaggttaagggacccatgagcaaccaaattttgatttgggtttttgaaagctagagaaaatattcagtgattaatgttgcacagcagcaaaaatgtgttagaaatagagacaacggcaggaagg

SEQ ID NO: 217758 - DNA, 201 bp, Homo sapiens
gcctactcaatctttggaattacttgaagttttctgaatgttttgtgctctttcataactctaagatcctgcaagctctattagctttcctggtaaatacaatttcccagttcttcaacaattcaggccctgccataagcatttgctgagcatcttcctatgtgccaaagactgcgttcatttcttttttttttttttttt

SEQ ID NO: 217759 - DNA, 407 bp, Homo sapiens
gtgatctgcccgcctcagccttccaaagtgctgggattacaggtgtgagccacaagtactggttttaaataattcctttatctttttatatgactgaaaaattctattgaatatcataggaaaaaaatcacaacaacataggatttaatgtgactctctgatgactatcttgaaaagctaatctaatatcatatcactcatagagatggtttttttgttcctccaactcctttaacatacataatctatctagtagttttcaaccatttgcagcttccatctcaacaagtatactattaaagaatctaggtgccatgcagaataaaatgatttttaaaaccctagtatctttctccagaaaatacatttatatatatttcacacataaaattttaggagattcgttt

SEQ ID NO: 217760 - DNA, 698 bp, Homo sapiens
atcgggaggtggtgggggggaccggagtgtcgctcatcacccaggctggagtgcagtggtgtgatctcagctcattgcaacatccgcctcccaggttcaagcgattctcctggctcagcctgagtagctgggattacaggcgcccgctaccatgcctggctaattttttttttgtaattttggtagagacggggatttcaccatgttggccaggctggtctagaactcctgacctcaggtgatccacctgcctcagactcccaaggtgctagtattacaggcgtgagccaccactcccgtaccagggcgtctccctttgtctcccaggctggagtgcagtggtgcgatctcagctcactgtaacctctgcttcccaggttcaggttcaggagattctcctgcctcagcttcccaagtagctgggactacaggcgcccaccactatgcccggctaatttttggtatttttattagaaacggggtttcaccgtgttagccaggatggtctccatctcctgacttcatgatctgccagccttggcttcccaaagtgctgggattacaggtgtgagccaccgcacctggcctgtgtactttttatcctatccgtttcctccccaacaagaagattgttcttgcaatcacactcctttttctttttctttttttttttttttttttttttttgttatgagaca

SEQ ID NO: 217761 - DNA, 1138 bp, Homo sapiens
tcttgaattagatagtattcattggatgcacaactctgtgagtactactaaatagcactgaattgtgtacttctacaatatggtatataaatttatgatatcaaacattttttaacttttaggttcaggggtacatgtgaaggtttgttacataggtaaacacatgtcatggggctttgttgttcagattatttcatcacctaggtattaagctcagtacccaatagttatcccttctctctccaccctccagataatttttaaggttgagtctaagtaaggctgcttgggaaatggtcagctaagtaaatcacctttcatttcacataaggcccttaatatagataagtaaatttggcctttggtgtctcgtgactctcagaggcgtaggtagaggagcaaattaatatttgcagcatgggaattccttatcagaattttgaggggaataaatcctcatcagagacaaaaggacttaatcatctggccacctatcacttcagttctctgtataaatgaaatttaattctaacaaccttataaaaagaaggtccagacagcagaggaaacatcctgtccaattctaggttttcctcccttggcctcctttccccagcattgtctaccctggcccacttcctgcattctccccatgccctgctatttctgattctttgcttctcctagcgagatactttccttatatgatagctgctgagaagtttcccagaactgctagaggaaaagaagtggggaatttaggaaatatccctcactgacctaactccattatcttcactctttccttcttcctgccacctcatgcccattctctttactgtctagcatgctgaaagaaggaagtgatctaaatgccagcgtgttcagtggtaaatattagttggtgcaaaagaaaaaccatgattacttttgcactaacctaatagctttgcaaattttaagaacttgctttatgaagatattcggatatggattctccccaccccacatacttagacattgttcaaatatactacttttaaaaaaacaccttttcaaacagaattagcgttttgccaagtctggtattaatggaattgtacaggagctttgaaagttttcaaactttattaaacta

SEQ ID NO: 217762 - DNA, 738 bp, Homo sapiens
gtgtatggaggttattatttgaagggtacaatcactacaacatgctctgccacccactccttttccagtgacactacttgagccacacactttcctttacaggccagcctctggcgcttgctgcacctcattgccaccttcctgtctctctgtgctaaacattcaggacagtgttccacaggcagatctggcctatttcattagtcaccatggcttggctgtgaagtacgttgaaggtggatcttgtcacatgccccttcagtgttcacctggccctctggtttaagttctgtctgccttacgtgactgagtttgactgtccaggttgctttgctcggtgaagagaggagggtaaatcggattctcgtttagcactgggttatacagatctggcaccctaacctaaaccaaggcatcttcactccaagagcagttggagagtctgggttagccttacgtggacctcgccgctcgctggcggtcacgattgtgagccctccagataatttttaaggttgagtctaagtaaggctgcttgggaaatggtcagctaagtaaatcacctttcatttcacataaggcccttaatatagataagtaaatttggcctttggtgtctcgtgactctcagaggcgtaggtagaggagcaaattaatatttgcagcatgggaattccttatcagaattttgaggggaataaatcctcatcagagacaaaaggacttaatcatctggcc

SEQ ID NO: 217763 - DNA, 661 bp, Homo sapiens
ggctggaggtggtaaatccatgtctaagcagaacagctgtgtacgaggaggtccctccttaagcacagtttgcctaaacagctctgaaccgggatggtgccctaaaagggcgtttccggagtttagggtgagaacttaccactgtgcctgctagtgggggccttgagcctgttacatgaagaggagaatcatttgggagcctgcagcagtgattctgttctttcagagcgtctgtggattccctctgcttttctgcctgccttgccattgtcaacaaatggacctgattacacttgtacggttcaactctagttgaaaagaaaataagcctctgaacaaataagcatttgttcctccaggtagcctgtgatgccactgcagtggtggatgttccctgaacacgctgtgcattttctcacctcagggtcttcagtcaagctgctgcatctatgtggaattccctgtctgtctccaccaactgccaaatgcttgctgatctttcaagatggaagtgaaaggacactacctctcctaagctttccctagtgccttcatgtaccaccaacccccaagtcaaaatttacctccaccacctcagcactttcataacctctgcctgacctctactttaggacgaaataaaacttatcttgttctatta

SEQ ID NO: 217764 - DNA, 419 bp, Homo sapiens
atactctcccacccaactccaggccacatcaggaacacctgctaacatttcctgaacactctttttgagccaggccctgtgtattttagatgcggtttcatttgatcttcacaggagccctatgaggtaggcatccccaaccccactttatagatgcaaacaactaaggcacagagaagttatttgttcaaggtcacatggctactaagcaacaaaactaggatgcaaaagcagatttgttcgaccccacatgctgtgtgctttgctacaatccacactgtctcccaggccccacagagccccaaatgcatgtgtctcaccagtttcacctgtggccactgtgctcagctatcctcatcctaagacaattgtagttatggttaaggaaagccttttattaaattgccaaacaccaggga

SEQ ID NO: 217765 - DNA, 145 bp, Homo sapiens
acagctaactggagacaggactcatgcaggaagcaacgacacatttgacaaacagtaatcatcattgcatttacagagttctgtatgcaccttttaaactttgtcatctttgaaagaagcagtatggcctttattagtgggtagc

SEQ ID NO: 217766 - DNA, 421 bp, Homo sapiens
tgtatttaggggaagctggccacattgtaagaagtcggactatgctgagactgtcatgatgacagaaaacccaagctagccaggtggagagatcacacagaaagagatgcctggccagctgttacctgatatgccatcatgcaagaagataaaggaaggacagaggttaaactaagagatgcagaaattatagtatatcagccaggtgtggtggctcatgcctgtaaacccagccctttgggaagccgatgcgggcggatcacgagatattaatccaaggaacaatactgacgaatttcacggacaaaatactaagaaggaaatcaagtgaatcaagcggagaagaaagacagtggaaaaagaaaactgaaaataaaaatattttctagaccccttgaaataaagtttgaaaaaccacagt

SEQ ID NO: 217767 - DNA, 529 bp, Homo sapiens
cagcaggatttcaagtctacgaatatttaaaaatcaaacctccagtgcaggagttttgcaatttaaatgggtgttattattgagcgtattttcacagttacaaatcctaagagatgtataaaaatgctggcctcattaaaagaaaaagtacagtttagaaaatgtttgtgaaaactctgaggatggtggctctgcattctgccccataaagcactcagtgcgtgtggattgggtagtgccttggactgattagaaggggtcattttcccctgatggcaattgttgcctatgaccaattggattcccactttgcaaaggataaggccacccaaacagctcctttgactctggtgggctcatgggaacgaggcttttccccctggagatctgtttcctttgcagggtagcttagcagaaagagctccaaatttgggcgtgattccttgcttcagcgcattctagctatggcccttgggctagctgctacactactttctgagtcccagcttgcttcacttcctcggttgta

SEQ ID NO: 217768 - DNA, 772 bp, Homo sapiens
cacgtaacaacaacacccacatagttaagaaaaaaaaatgttaatgtatgaatatcttaattttccccgctaccgaggttttggcaaacgtctaatgacacagagccaccattgccaatttcaccactgtctttcaccaagttgattcattttgaactggctccagcaatctactcagagttgacctcagagcaaaaaattgaacaacagctccatatgttgatgtgaactgtgactccaggagaacggtggaaaagtgtcttgatccaggaaggaaggggtatagagaaaatatgagtctcaccacactagaagcaacatatgcaaaatccatcaaacacaccataaaatcaatgtgggagtaacaacaccttggcctactgctccctgaaaagtttttctctcgtcaagtgatgacaggcgtacatttgtaaataaattaccaagttgcttttgatttgatggagaaggaagaaaaggattgtctcctggaagtatttttattgtcttaataggtaggataatatctctgttcagcaaactgagatcttttgagaatcttaacaaatgtatacccctccctctcaccttttcctctctggtgtatttcataggcagctttgctaactgactgcactactacaaatagattctgtcactttagaaataggatttttccttttataggcagattgatggactaagtgtcaaggttttagaacagtagcatgactggggcagacactataaaccataaatccagtattgacaa

SEQ ID NO: 217769 - DNA, 636 bp, Homo sapiens
  misc_feature (28)..(28): n is a, c, g, or t
cctagttgtaacaggctggaagtcctgnatcaggtgctatcagggttggtttcggctgtggcctctcttcccggcttgtagacagctatcttctcgcagtgtcctcacgtggcctctttgtgtgaagttaaaaatgaacagatcaaccttttactcttctctggaaaatatagtgaaattaataatcaagagcgattttctgaaatgaaaacatccgaacagcatactgcaaagacattcaggggaaaataaaataggttttggcaaacgtctaatgacacagagccaccattgccaatttcaccactgtctttcaccaagttgattcattttgaactggctccagcaatctactcagagttgacctcagagcaaaaaattgaagaagctgctaaagaatgtgcttgactaaaacaaggcaataagcaaaaggaagtcatagcatccagaaaatgggatccatcatgcgcacaaagaaaaggtgaagaaaatttccaggatgttcagaacccaccaaaaacgaaagattctggtccagatcagaagagagggaaacactctgaaaaagtccctcaaatacaaaattaaacagagtttaaatgatgtgcttgaccacaataaaaggcttcttgctct

SEQ ID NO: 217770 - DNA, 506 bp, Homo sapiens
  misc_feature (28)..(28): n is a, c, g, or t
cctagttgtaacaggctggaagtcctgnatcaggtgctatcagggttggtttcggctgtggcctctcttcccggcttgtagacagctatcttctcgcagtgtcctcacgtggcctctttgtgtgaaggttttggcaaacgtctaatgacacagagccaccattgccaatttcaccactgtctttcaccaagttgattcattttgaactggctccagcaatctactcagagttgacctcagagcaaaaaattgaagaagctgctaaagaatgtgcttgactaaaacaaggcaataagcaaaaggaagtcatagcatccagaaaatgggatccatcatgcgcacaaagaaaaggtgaagaaaatttccaggatgttcagaacccaccaaaaacgaaagattctggtccagatcagaagagagggaaacactctgaaaaagtccctcaaatacaaaattaaacagagtttaaatgatgtgcttgaccacaataaaaggcttcttgctct

SEQ ID NO: 217771 - DNA, 430 bp, Homo sapiens
cgagatcacaccactgcattccagcctggatgaaagagtgagactctgtctcaaataaaaaagtaaaaataaaatatacccacaaagcttcacaatgaagtcctaaattggctatcataaaatgatgaaaagtgtgatgctgtgggctgtcagggaaggggagccagaggtcattattgatcagagcgaacagggaaggtttaatggaagacaccctgaatgatctatcaggttggaattgctgaaatggagtgccaggcttcaggttgcaatacttcttgactgttaccaaagaataatgagttgggtatcttattggcatggtgtatattgcctcttaatttgataaagttttgtttatgttgtattgtgtcctagtctttgatttaataatccagattgagttcaataaagtatccaagttctacca

SEQ ID NO: 217772 - DNA, 429 bp, Homo sapiens
ttatattttctctttgtgaagttaactgggccataagaagatcaattccatgcatgaccttggcctcattgccactacactacaattaactgagccaattaggcagaagagttctcattatattttcttataagttattcctagtaatttgatatcattatttatatttttaaaactaggaccagtaatttctttgccagttccaccagcttagctatatctcatactttactttctccctccttacagtagaagcctcctcctgcatctgtattagacaaacattgcagccctgaattgcatggcctctggccccttcgaaggcttacctgtggtattacccttcatctcctgtatcatcagtgttgtcttctccacttgatcattgtcattaagtcacttgtcttaatgtctgtcacctacttttaa

SEQ ID NO: 217773 - DNA, 442 bp, Homo sapiens
tgcagtggcgcaatcttggctcactgcaagctccacctcctgagttcacaccattctcctgcctcagcctcccaagtagctgggactacaggcacccaccaccatgcctggctaatttttcgatattttttagtggagatggggtttcaccatgttttgccaggatgatctcgatctcctgacctcgtgatccacccacctcggcctcccaaagtgctgggattacaggcatgagccactgcgcccggccaacttaaaacttataatcagaggttcaactcctcttcttaacagtatgcctataattaaccttctcctactcatcattcctactctaatcactatagcattccttacactcactgaacggaaaatcttaggctatatacaactacgcaaaggacctgacattgtaggtccctatggactgcttcaaccattc

SEQ ID NO: 217774 - DNA, 376 bp, Homo sapiens
aggactgtagggacagagaaggtggggtgcctttcctccccatcataaggatcacagctgacatgcctgtagaaaaaggttagcaagagaaaagcataacgatttatttaattaaagttttctgtgacatgagagtcttcagaaatgaagacccaaagactcaaggaaaactctatttttaggcttagattctatgaagaccatggaaatgcgcagaaatgtgagtggggaaaaagggaatggtctaatagtaataaactgagtgggaaacccagcaaggcttgtctgttcgtattcttcttggcctatctgtggccaaaccacctggcttagaagcagaaaataaatttgctccctgtgtagtctttaacatgtt

SEQ ID NO: 217775 - DNA, 799 bp, Homo sapiens
taggacaaattaagcacatgaaattagaggctttatgttttgagggaaacttaccaatttttacaattgatagaatatctttttatagtacttcagtggctagcgaatgttgaaaaataaggaacaaccttgttctaggtttttcttaatactattgacaatttttatgttttaaaaaccagggcaacaaaaacaaaaccagagcaacactgcaaaagacaagtattacaggattgattctaagtgggtagggcaggcatgtccacctcaggaagtatgttaatctcctaagttttcttgtttttatgcctttaacacaggtcttccctcacctatacttactccccccaaaagactaagatctaacaaggctataattgggtcaactgccttcttagttctgaagaaatgagcaaattgcctttctttaaagcggcttcttacgcctgcagacattcccgcctttctttaaagctgctgcttacgcctgcaaacattccctgagtagcagttttgtgtcctgtcatggtgctaggtcctggggactacaaaagtaaacatgactcatttatctccagaagttcacaggccagagtagcatttctaacctcatcttccttagctatttgctatctcaagaaatgttaatacattttcgtgataaaaggggttacatgttttcttgactctagtaacactgaatgctttatctccgtctcgttgactgcaccaagaagtctttcaataaagaatgcagcctaactttttttaatccaataattccctagcttatttgaga

SEQ ID NO: 217776 - DNA, 623 bp, Homo sapiens
atcctcaatgagattatcagcagacttcacatcagacactctggaggtcatatggcagtgggtggaaatactcactgctaaaataagacgaaaaaaacccaaacctgtcaactaagaatcctatatccagcaagacagtccctcaaaattaagggggaaattaagatgttctctgatgaacaaaagctgagggagtttgttatcactagaactgccctgaaagatgtgctaaaggtagcagttcaggttgaaatgaaagaaaactagacagcaactcaaagtcatatgaagaaataaagatctcagtaaaggtaaatacataggtaataataaacactagttagtaatattgtaacaatggttatgtaaatctgcttttggttttccacatgattgaagagaccattacattttcaaatttaaaaaaaaaaaaaacttagcctagccaggcatggtggctcacacctgtaatcccagcacttcaggtggccgaggcaggcagagatggcttgagcccaggagttcaagaccagcctgtggaacatggtgaaaccccatctctacaaacaaaacaaaacagcaacaacaacaaaaattaaccaggtgtggtaggcacatgcctg

SEQ ID NO: 217777 - DNA, 335 bp, Homo sapiens
accagcagcatcaaaatcatctccgatgttagatgttacaaatacagtcttcaccccagactctgaatcaaaaactgtggatagagtcaggcacagaaagacaaacttcacatgttctcacatatttgtgggagctaaaaatcaaaacagttgaattcctggaaatagtaaaaggatggttatgagaggctgggaaggggtagtaagggggtgaggggtaggtagggatggttaatgggtccaaaaaagaataaaatatagtatgtgatagcacacagggtgactatagtctgtaatttaattgtacattttaaaataaagactatataactgga

SEQ ID NO: 217778 - DNA, 279 bp, Homo sapiens
tgcccttaatcctaaccctggttattccggttcattggtcccaaggctgctgaggtgtgcgcagggctggagcacatctgcccgcctgtctgtctctggaggcaggcagagaagggctttgtctgaggacgctgttgttccagcttggagatgtcaccggcctggaggtggggtgtggccaggccgtgccttcgcaagcctatgggggtcactctgagagccgtccttagggatggggccagctctgtgggcaccaccacatggggcatggggtgggcg

SEQ ID NO: 217779 - DNA, 486 bp, Homo sapiens
catccttgaaaacccttctgactccagcctgtcaattaccattgttccattttacctcgtgatttcctaattatttattgagtctgtctcttttactctttctggtactattgccacccctcttccagtcttggatcccctaaatccattgtacttatttactatttgcagggtgaagtttcctactttattcttctgcgtaaagccttctgatatctacattccctatacaaagccaggcattaacaaagcctgtaagatccttctaaactggcccctgcctacttcccctctctcttcttcactggctggttcttaccctctaaattctagcaacttcaaatggcttttcattctctgattccacaacactgcctcccacctcttaggagaaccccttttttccttttttctctttgactaatttctgctcatctgtcattcagctcaggcatcactccctttaggaagctgtggatttgaatg

SEQ ID NO: 217780 - DNA, 620 bp, Homo sapiens
tttaaaaatgtgagccagttccataaataaatccaaacccctcatcatgggttacaccttcaatgcttactccatgccagactttgtctagctacagggagcttgcaaaaaataaaaaaaaaaaaacataaaattcaaaagaaagaaaatgaaaatagagcactccaggcaagggaacagcaagtgcaggaggaaggtctttaagtaaaaacaatgaatccccagcagtctgcaccaggatgcaatccatgcactggttccagagagacttacaaaaacaattagtaatttaaggtgtctgaaaattttggtgcaaatatatgttatcttcatcaaaactacgtacagtacacttaggaaaaaagtttagtggcaagcaacttcacattcaaaaatttgtacatgtatgaatacaaaacatgtcccaattcacgggggttgcacttctggtctgactccttccagcctccgaggaagcttggaggacatgatgcaattatgttttcattccttggccactgctctggtccagaagtcgtcttctggaaacaagtgttcttggttccaatttacccatatcttccttcctaaagtaaatccctacaacaacccatgctgat

SEQ ID NO: 217781 - DNA, 347 bp, Homo sapiens
tgtaatcaaagagcaatgccacatagctttgtagggaagggattgacatctcctgaaaaatgcagacagtcccggctgggcactcgtggctcacgcctgtaatcccagcattttaggaggccgaggtgagtggatcacctgaggtcaggagtttgagaccagcctggccaacatggtgaaaccccgtctctaccgaaaatacaaaattatccgggcgtggtggtgcatgcctgtaatcccagctactctgaaggctgatgcaggagaatcatttagaacccgggaagcggaggttacagttagccgagattgcatcactgtactccagcctgggcaacacggcagca

SEQ ID NO: 217782 - DNA, 486 bp, Homo sapiens
caaactcctggcctcaagcgatcctcctgccttggcctcccaaagtgctgagattacaggcatgaaccaccatacttggccccagattctttttcttttggtgaagaaactgaggctcaaggaagttaattaacatacacaagattaccttgagtaaataaatcgttatgtcaagatttccgagtagcacggtgctttggggatgaaaattttaaatttgagtttcctattttacaacttgtttagaacccagcgtctttagtctcgaggccctgcggacacagattacttttcttggctgggtggtacgggctagctcattgtcttcatccatacctatcataggtggagctcttcagcctgggtggttttatttggaatccacccacttgctctggggcaggagtgaaggaggcagtattgtactgaatgtgacgttagttatccacactgtgaaactacctccttttaaagccctgggagagg

SEQ ID NO: 217783 - DNA, 470 bp, Homo sapiens
ataaaataaaataaaaagaaaaagtcaatcttcctcagtggtgtgctggtaaattggcactgtaagaaaaaaaagtcttgattggtagagttggccagtttcatattgtaaatacattgcccctggccaatttcaggcacccatataaggtcactgaaggaggagttggaaagagatgtgcatcgtcagcatggagtcctgataagtaagcaacaatgaggaagggaccttaggtaggggagaaccccaggtggggaagaacaatgaacagttgttctgagagatggctaatcacaaataacctgtgggcacaatgacttgtcctgtccgcaagtggccccaagagcagaaccttataaaacttccctccagcccctgcctcattgtagacagcccatttcctgctgtgctgcctgttgcaactttgcaacatatttttatactttctgtaataaatctgtctttcttta

SEQ ID NO: 217784 - DNA, 651 bp, Homo sapiens
tgtggaaatagatatcatttagccatagtctgtttcccttagatattttatctaacattgcctgtttctccaagactattacttcaggaggggaggagggagccaaattatttcttttttgatatattattgaccattggtctctgagaatatccgagattgttaacatctaatagtgccttggcaataattagaggaagttcgacggttgtgttttgtatttttctctgaaggagtgtgcaagagtatgatgttgatgtaaacattgtgatgagcaggttaggagtatgtcaggaacatggaatgcaatcctatgtctgtattgcttgcagccttgaacaaaatcttcaacatcttgatgcttccaaaatcgcatttaaaaaatgaagcctcccggccgggtgtggtggcttacgcctgtaatcccagcactttgggaggcccaggcgggtggatcacaaggtcaggagatcgagaccatcctggctaacacggtgaaatcctgtctctactaaaaatacaaaaaattagctgggcgtggtggtgggcgcctgtagtcccaactactcaggaagctgaggcaggagaatggcgtgaaccctgggaggtggagcttgcagtgagccgagatcgtgccactgcactccagac

SEQ ID NO: 217785 - DNA, 434 bp, Homo sapiens
gtggaggctgcagtgcatagtgctatcccagagatctttttattcttattttttattttcggagacagggtcttgctctgtcacccaggctagagtgcagtggagtgatcatagcttgctgcaaccttgaactcctgggctcaagagatcctcctgccttagcctccccagtggctgcgactataggcgcattgcaccgcacctggctcagagatctttctgaagctcactctacttttcctgtggttctagccctttccttcctgtttgaggctcccttagggtataaaagtcactctgcagcgtctcctctagagtaaataaacaattctcttgaggtccttttctgccccaaccatttcaccttctctgtgtctttatgagcttgacttaacaggaagttcaccttctggcttctgttaaatagtattgtc

SEQ ID NO: 217786 - DNA, 628 bp, Homo sapiens
ataataattaccacattatgaaaggttgaatagcttttatcatcttttctgatggagatagcttcttagtagatgttccatgtagctataagcctgcgtataaatgagttcatctcaggttgtgaaaaacagtttactaaaatcagaatctaatcaaaacagatgtaagcttttagggtcattaatttccattaaatttccatggagacctatgtaaaagctaaaaataccatcagtgaattacatgaaatgccttcttcagtgatgtgcaatgtggtaagagaaaactatgaagctaaatacttatccctaatctgcaagcttgtctaaatgaaaaagtggataatctcattagttggaattgttaacaaaggcataggtggttttctcccatccaagtactaagcaggcctgaccctgcttagcttccaagatcagaggagatctggtgcattcagggtggtgtgaccgcagacagcataggtagttttatatacacttcctgtagaaccaaccagagccgtgattaaatagcaaccgttagatgtactttgaaaaataattgaatactgtaggaggcttaccttgatactggtttttgagcatgaatgaaaaaggtaaattaggg

SEQ ID NO: 217787 - DNA, 595 bp, Homo sapiens
ccagcccttggctttctccttgggtgcccagacaactggtggagaccacgccagatgctgatctttgctttctcactacacacactgtcaggaggaccagttgtgagacttccgcaagtggcatcaggtaggagatggaggaggagaggcagaactggcaggtactatgctgtgaccacatacaacagctcccacctaacttgaggatgccaagaaatatggggctctgcgagagactggttccctgctgggtcaggtgggcagcagcatgatgtactcacctaatggcttcttcctgcccactacacaaaatcaattcactgagaccatggtgttgcaatagagaaggagtttaaatgacctgaggccagcccacacaggacaactagagttatcactcaaatcagttctctcatttactactcttaaaggttacattaggtatgttttattattcttcccattttgaagcttcggatttaacatcctgcatgtgattacacagctcataaacagtaaagcaaagtttcaaacacaggtcatcctaagtaaaatattaaaatacttaattgatcaataaaaattgtatatatcc

SEQ ID NO: 217788 - DNA, 421 bp, Homo sapiens
agttattgtttgagcatgtctattctttagcaaagttcaagcctctaccataattctaatcttgtcttatgaatgtagcttcaatctccatacaaggagttggggtggggggtcacttttccttgcctcaaagtttaactataaaccaaattcctggcatagttattttagcctccacactagaataagcaaaaaacaaactaacaataaaacgacaacaacaaaaaactagtttagcctgtgaggttttgagcaaaatggagtcagtcatgttagatttctctcattagttataattctgcaaaggtagtttaagtgcccctagatggagtttcaccacttgtggtttggtgctgcccaattcatgaatcactgtctgctcaactgaactgtttaatactttaatgtgtgttgtctttta

SEQ ID NO: 217789 - DNA, 528 bp, Homo sapiens
aaaatgtcaccaggatcttgaatctgaaaatttgggcattacacgaaaatcttcattttacattagctttaaagttaaggaaatgctactaggtttttagtctcagctggttcacacaacacaattcagaataatgtaaagagaatcagtcactgaaactgagtatctactttcactgagtaaaaaatccaatacaaccacagacagcatccctaataatatttctgaacagttttgttgagatataattcatctaccacagaatttgtccatctaaaacacataattcgatggtttttagtatactcagagttgtgcaaccagcaccacaatccattttagaacactttcgtcaccccaaatagaaacccatactcattagcagtcactccccatcttcctgccttgctctcagcctcaggaaaccatgaatctattttctgaatctatagatttgcctattctggacatttcatacaaatggaattaaatagtaggcggtcttttgtaactggtctcttccactca

SEQ ID NO: 217790 - DNA, 422 bp, Homo sapiens
agttggtattttatggggtctgattcagcaaggaaagtttgctgcaacaaagaatgacctccaaggccacttcaacttctagaatactggcttctcaacaagagtggcctggaaaagctaaagggggagtctttatcatcaaggaactaaagggggtatggagggatatagagcaaaagagtgtttgtcaccagtcaaagccgatgtgttaaaacccacttatccccatagccacacttccattacagtttatctatggatgccagtgacctgcaagaggctccttctccttgttcaagtcactttgggcttgttagctctatctcgaagaaggggcaaggataaacctctacccatgcagaagctgattttaccttttgctcttcctttctgactgcttaaaataaatgtatcattacctg

SEQ ID NO: 217791 - DNA, 270 bp, Homo sapiens
gcactgtgctggggaaaaaatatgattactcaattactttttaaggagtgaaggaaaagtttgtggatcctagtaattttccagaaacattttttagaggcatagcacattcatatcgatgctgcctcctccctcttccccttcaaaaagtttgcattctttaatcaccgtatgttggactctcacaataacccttatagtttacattttatataacaggtattttgaaggttgcttctgggagctgaatgacaggaagtacctgaaagt

SEQ ID NO: 217792 - DNA, 675 bp, Homo sapiens
attgtgatagtgctgcagtaaacatgggagtgcagatatactgatttccttcaatatactgatttcctttcttttgggtttatatctaggagtgggatccctgaatcatatggtagctctatttttagtttttcggggaaactccaaactgttctccatagtgattgtactaatttacattctcaacaacagtgtacgagggtccccttttctccacattcttgccagtatttgtggttgctgttttatgtgtccggttttggggttttttgtttggagacagattttgtttatgttgcccaggctgaaccatactttatacttctacttctattttatagtttgtggtattcttctgaccttcattttaactctgtccttcctttcaggctggttcaaactacactgagccttccctggtcactaaaacttgtggcccttcctatcctacacctcatttactatgggctctccatcttttggtccttaaggttcttctcaggttcttctcagcatgtcctttgtggtgcaacagcattaggcatttctccaaaagaacctaggcatagtgctatatatagtaggtactaatacttgttgaattgaattgaatttctgggcctgttttcttatctgtaaaataaaaggtatagactagacagaacaaagatctct

SEQ ID NO: 217793 - DNA, 467 bp, Homo sapiens
gctgttattgttacttaatgtacttcctggttatattctggcaacaagtgggttccaccttccctcagaagcctttttaaaaaactgtcttgtttatacatattaaaggaagaacaagtttactattccaagtagctcctttcgattattgattcattctgcctttaattccttcaacaaatactgacgttttgcagaggtgatacgggatgttccaatacagacgtggtctctgtcctcagggatctttcaatctagcaaaggagatagtatgagacaaataattttgcaaataaatatatagttaccaattgtgataagtgatatttaggaaaggcacaagatgccttggggtcataaggtggaaaggtggatctaatttagatcgggagttcaaggacagcctctcagacagctgaaactgagaactaaaggatgaatttgcaattaacaagacctgaaagcat

SEQ ID NO: 217794 - DNA, 390 bp, Homo sapiens
tctatctcctgacctcgtgatctgtccgcctcggccttccaaagtgctgggattacaggcatgagccactgtgcccggccgtaagttctttgatttcacagatgatacattaattttttctgttataaagtgcttaacatactattacaacaaagttcttagtaaatttctattgttttctttgatttgattatttttgtttcccttcaagttagtggttctcttttctatgatgtatgaaatggagttcattgttaattggggtgctttttcccattatttcaatttggaataatttggagttgttctctcgcaattttagatctccgtgtcttactacctgacatgtgtcaaggcaatccaacttaatttcattttactagtgacaag

SEQ ID NO: 217795 - DNA, 472 bp, Homo sapiens
tccctggggactgcgcttctagctgcctctcccgacactagcagctccaatccatctcctttctttactgctttcaaatactcagttcctcttagtacaaaacatacccactcactctaattcctacatattttttggctctatgcttgcttgagtcgcccatgccttctaggtttcatcaaatattttttgtggaccaatatcgccaccaaaatgaagtttatatcactcaaagcggttttaatttacttacaggacacattttttttcctccagattacgaaaatcacctaatattctgatgctgttttctcagctattcagttaaaggtatatattttgtatatatatgaaatcatactatatatggaatttatatacacttctatatatggctttgctctatctcaaaaaatctgtccttatgactaggtctgggccctcggcgtgtgcaggggatcactctagagtc

SEQ ID NO: 217796 - DNA, 858 bp, Homo sapiens
aggaccatcagcactggcttcttaaaaacacagaacttcaggtcccacccttgacccacagaattagattttgccatttaactttatactattactgtttccccattaagattttcttctctttttttttttttttttttggagatggagtttcactcttgttgcctaggctggagtgcaatggcgcaatctcggctgaacacaacctccgactcctgggttcaagcgattctcctttctttactgctttcaaatactcagttcctcttagtacaaaacatacccactcactctaattcctacatattttttggctctatgcttgcttgagtcgcccatgccttctaggtttcatcaaatattttttgtggaccaatatcgccaccaaaatgaagtttatatcactcaaagcggttttaatttacttacaggacacattttttttcctccagattacgaaaatcacctaatattctgatgctgttttctcagctattcagttaaaggtatatattttgtatatatatgaaatcatactatatatggaatttatatacacttctatatatggctttgctctatctcaaaaaatctgtccttatgactaggtgtgatggctcaagcctgtaatcccagcactttgggaggctgaagtagatcacttgagcccaagagttcaagcccagcacaggcaacatggggagaccccatctctaaaaacaaattttaaaaaacacacattagccaggctaggcatggtggctcacacctgtaatcccaggactttgggaggctgaggtgggcagatcccttgagtccaggagttcgagaccagcttgggcaacatggtgaaacacc

SEQ ID NO: 217797 - DNA, 475 bp, Homo sapiens
tggtagtttcccatgaattaataactttccttcttgcccccgtgttatctccctcacctgacccccgccaataaaacatccttaaaaggctcctctcaaattccttgcaaatattaggctcctctcaaattgcttgcacatgcttggagaagctcacagtggttagtacactcatacacaactgaacttgagcgacacaaagcttacaagacagcaaagacaacagcaaagctgggcccagcagccatcacctaaagaactcttcactcgttacattggagcaggtgatctctctggaaccaggaaccacagaacactgaaggacacggagctggtggctaaggattcaaggcctgcagtgaaaatgtaacatttccctccaagtgcttatttctgctataaactggtttagttttgcaatgaacaactagatttctaactgatattcacgttaataaacttttcttttttaaga

SEQ ID NO: 217798 - DNA, 841 bp, Homo sapiens
aatgtatttaaaggcaggaggttaataacaccagttctcagtggttcctaccaggatggctgaccatgtttggagacgttactggttatcacagtggggaaaagggtattactgacacccagtgggtagaggccagggccgctgctaaacatcctacactgcacaagacagcctttcccaccctcaaaaaatcttctagcccaaaatggcagtagtgttaatgctaaaaatccttgacctaaagaaaagcaagcagagcagagctgactgagaagtatataaaatggcacttagccaaaaagaaaaagatcactaaaagtttataatatgtgcaaatatcaacataagaacacaggaacacaaaaacatggaaaaaaaactttataaagaacatttccaatcaaattcctcctccatgccctagaaaataaagtcgttgagctaggttactaagcattcccctagagaacgtgtactgtggggaaaacactggtgattctcacctgtctcccagagtggctgccctgtgtctcatccccaacacctacctctaaactgcaagtcacagttacagctttgtggaatgaaaaaactaattaactttattttttttcaggcagagacttgctctgttgtccaggctggagtgcaatagcgtgacttcagctcactgtaacctccgcctctcagttcaagcaattctcctgcatcagccacctgagtagacatgaggaatataacaagcaaccacaccagaaagaaagaaatgaatatccatagtcgacaacacagagtacactaagttccccctgtctactgcagagggaatagtactctcgag

SEQ ID NO: 217799 - DNA, 804 bp, Homo sapiens
cctagtggctcccgcctgtaatcccagcactttgggaggccgaggcaggcagatcatgaggtcaggagatcaagaccagcctgggcaacatggtgaaaccccgtctctactaaaatacacaaaaaaagtcaggtatggtggcgcgccggtattcccaggaactcacaagaggctaaggcaggaggatcccttgaaaccgggaggcaaaaggtgcagtgagctgagatcgtgccactgcactcctgcctcagcaatagagcaagatcctgtctcaaaaaaacaaaaaacatgcaaaaaacacagctattgtgcctgtgatgaacgtgaatttggaggtgaaatcatatgcctgctgtaaggacatcacaaataccagtttatttctacagatgactttctcctatttactctttcaacattcgctctacaactgcagtctgggttatttccttcctgaagagtaggctttagtcattacatttcttataacttacacaactctagacttattctacccagtaaaactgatttttgcagcattctagacctgcactatccaattctatagtcactagtcacatgtggccactgaacttaaatgttctactgaacagcaagcaatgttctagtttgttgcctccacaaacttccatctaccgcttatatgtaattaccagagtccagtaatctataatttactgtctattacaaaacccataatccttaaaaactctacaaaacgacttagcacaaatggatagttacatatctcctataactacagagcaggatggtggaattata

SEQ ID NO: 217800 - DNA, 598 bp, Homo sapiens
attctcagcaaccaatccaaagccaccaagtcaacctgagctgacataacatgaaaggccctctgctttaacccatacaaggaaagttaactgaagccatctgatgttaaccaacccacttttggcatgacaccatttccttcttgcttaagctaccttacagaaatcgactgttctgccaaccctggaggaatgtctttccattttatgaatgggatgctgaccaactcataattgctaataaaagctaatgagatctttaaattcaatttgttgaaatattgttctctgtcatcctctaccccatcacctgtgctcagcaccacacctctgcttcactgtgcccctttattatttttctaaagctgaacaaatcacatgggccccacagttagtgtttaccttatgcaacgacctgtgtggcccctatcagagcaaacagagaaacagaaagatactcttccccccatattaattcctcctctgctcaaaaatggcttaaatttcttgaatttcttcaagccagccaaatgacaatcacagtcattatctaaatgcaaacccttctgagatagtgctttaattcacagtaagattc

SEQ ID NO: 217801 - DNA, 374 bp, Homo sapiens
ttgtagagttcagagctttgggaagtatgaccagaggggaacagaaaggaaaataggaataggctcaggaaatgccaatggtttttattcatttatttttaattttcattttaattatttttttagggacagggcctctctgttgcccgggttgaagtgtagtggcctcattatagctcactgcagccttggcctcccaaagtgatgggattataggcacgaatcaatgtgcccaaccccaccagtggtttgtgtttgttttttgtgacggaatctcactccatcgcccaggcttgacccaggaagtggaggctgccgtcacccaagatggtaccactgcacaccagcctgggtgacaaagtgaggccctctct

SEQ ID NO: 217802 - DNA, 404 bp, Homo sapiens
cctcactccccagtttcttcaaaattaatattttatattctgcatacacaaattccaatttggaattttaaaaatagaaatattataataatgaagacattaaaaaaccctttgacaaactattaggtcatttccagatatgttacttaagaacactttacatttcaaaaagatgatgtatgcacatggtgaattcaagtgttcaaaagggtaaacattggaaagcaaatctttccactcgtattcctcatttcttctctctggagtcaactgtcgatactacttttattcatttctattttatccttccggagatagtctatgcatatacaagcagataaatctatttttataagatttaaaatgtatgttttagcactctgtggggtacgttttatatcttt

SEQ ID NO: 217803 - DNA, 499 bp, Homo sapiens
ggcagataaccaacatcagcttcccacgtgactatctcctgatggtagtttctgtaccagactgagtttgtggttgctgacaatagaaactaactctaattaagtttaaacagaaaaaaaggtttgttgagaagatatgagatacttgatagaattgacaaaagaaaaaaaatctacaggatctcattaggttgaaataaaagtaaattaggtagctgctatcgactggattgtgtatccccacaattcatatattgaaggttaaccctaatacgactatgtttgtaaatagggtttttaggaggtaattaaggttaaatgaagtcataagggtaggatctctaattggtggccttattagaaaaagaagagagagagagagagagagatctttctccctgtgtgtgtgttcaccgaggaaaggccatgtgaggacacagcaagaaggcagctgtctgcgagccagaaagagagctttcaccagaaaatgaactggctg

SEQ ID NO: 217804 - DNA, 628 bp, Homo sapiens
gctgattctctaaatcccactctccaagcccactctaagaggaagtttgtactcaaattctaaattatgtcagaaattacaaggtcattataaatttcagaaatgtgtgtttttttaagaactattgctctttgacatagaggtggttgacactagggtttttaaaaaagcgctacaaagaaaatgactgttttcttggggaaaaagttaattatcatatcagtcatacaaatagctactactaaaatcctgatttttaaaaatggcataatcaggatcttaaaaatggtatattcgttaaagtatttaaagcatttctttaaaaatgttttctttttcaaattaaaatgtggctgaacaaaatattcacaaaatattcacaattagaagttggtggagagagcacaagtaactaaaagcttctaaaaactatcaagccttatagtagaatctatcctttaatatgacttcaggccaggcgcagtggctcacgcttgtaatctcagcactttgggaggccgaggcgggcggaccacctgaggtcaggagttcaagaccagcctggccaacatggtaaaaccctgtctctactaaaattacaaaaattaggcaggtgtggtgacgcaaa

SEQ ID NO: 217805 - DNA, 456 bp, Homo sapiens
cctaagaacaagcatgttatcaaatatgtgggatatgaagatattggaaatagggtccaggtctcatctcatctgtagaaatgagtaggcggtaaaaggggatgggaaggactacaattatgtggtcaggagcaaaatctgttaccctggacattgtcagatttaaatcccagcttttatgcacactagcattgtgattcagagaaagcgttttaccttacttgtcttacctgtaaaataaggacagtagtagcagtactcattttatagaattactgtgaggattaaataaagtaattcaaatgaagtatgtaacagagtgcttggcacataataagcacttgaatggaacttaagtgttagctattattatattacttcctttcctcataccaacactctggcaactttattattctaatttgtagtaaatatttgttgtattactattactta

SEQ ID NO: 217806 - DNA, 252 bp, Homo sapiens
tcgtgaactcctgacctcatgatctgcccgcctcaacctcccaaagtgctgggattataggcgtgagccaccgcccccagctgattccaggcgaattcttctctgatgggcgggcgagggtgtgttcgtgtgatgggttggagtgtgtgtgtctgagtacacagatgatgtgttttcccttcagcttcttacgttttctgagcatccattgtgcctctgcctcccttgtgcctctgggcagatcctctagat

SEQ ID NO: 217807 - DNA, 319 bp, Homo sapiens
tcgtgaactcctgacctcatgatctgcccgcctcaacctcccaaagtgctgggattataggcgtgagccaccgcccccagctgattccaggcgaattcttctctgatgggcgggcgagggtgtgttcgtgtgatgggttggagtgtgtgtgtctgagtacacagatgatgtgttttcccttcagcttcttacgttttctgagcatccattgtgccttaacattttctgcttgtcctttgggacaaagcagtattttactcattctttgaatgttctcattcttttgtatcatgtgacttattaaaatcagtttctaaca

SEQ ID NO: 217808 - DNA, 553 bp, Homo sapiens
aacgaaacttgagctatttcataacccattgcttttccatttttaccttattctcctcttcccttataccagaatcaaaatgaatacactaaaaacccctcaagccagtaatataggtatacttccagaattttgtcccccaagtactatgaacttgaagcaacacaactcaaaaaatataagccacaatgattatggcaacaacaagaaaacctaaaagaaaatttgccacaagtttctactagcctatgaggtagagccctgggacacccatcagtccttgaatgtcagataacctattcctatcacagctcttaaactgtaagttcatgagtttttcaagtgctcaagttcctaagtacaggatgatacaagcagttgttttctgtgatgtgactcatttcctttattttgatgctatgctaccttttacctttcatattgactgatgacgctgatattttggctgatcttacaatgggctaaaccttaattattgtcccctacttaagtatccacttctgtagatgatcatgtccaagtttgagctcca

SEQ ID NO: 217809 - DNA, 506 bp, Homo sapiens
ggtattgggcattacaagagaaactgggaacagagttaggtaagcatgtaatatatgtatatgtgtatgtgtgagatacacacacacacatacacttatatatatttgcttatcctgggacactcttgagactaattataccagaatgacagaaatgaaccaggaccgtccccaggaaaccaagagaactaaagtcatccaagactttggcttgctgcctctgatgtccacaggccaattagccaggatttagggtagtgtctacttgggacagttgtgggtgttgcttctggcaggaggaatatgaggaagaagatggtagggaaaggccatctatggtgaatcattaatgccatgcagttcttgagacagcatttgagaaattattctctggttttccttattgaaattgccaatgcctgttctctaggttctaagagcagccctcacacttgccatcacacagctatgtaaacacctatgtctctgctgggaggtccccacct

SEQ ID NO: 217810 - DNA, 641 bp, Homo sapiens
catggtagctcacgcctgtaatcccagcactttgggaggctgaggcaggcggatcacctgaggtcaggagtttgagatcaccccgactaaaatggagaaacccagtctctattaaaaacacaaaattagccgggtatggtggtgcatgcctgtaatcccagctacttgggagattgcttgaacctgggaggcggaggttgcggtgagccaagattgtgccattgcactccagcctgggcaacaagaacgaaactccatctcaaaaaaaaaaaaaaaaaaaccaaaaaaaaaaaaaaaattgggctagtgaatgagatacctagagtaatagaattcatagaaagaatggtggttgctggccaggtgcggtggctcacgcctgtaatcccaacactttgggaggctgaggcgggtggatcaccggaggtctgaagtttgagaccagcctgaccaacatggtgaaaccctgtttctactaaaaatataaaaaattagccgggcatggtggcagatgcctgtaagcccagctactcgggaggcagagggaggaaaattgcttgaacctgggaggtggaggttgcagtgagccaagagagcgccattgcactccagcctgggagacagagcgagactgtgtctcc

SEQ ID NO: 217811 - DNA, 450 bp, Homo sapiens
tattcttcatttctgtctgatttatattttaataattaaaaactaggcagttacatcagaacagcatgaaaaatagatgtgtgaaataacatggcatatttagggggcttagaaaacttcactgattctcaagggtaaagatctgtggcagggtttttcagtgttggcactgttgacattttaggccatataacactttgttatgcatagctgtctagtggaatacagcatgctcagcggcatccctgacctctacccattaggtaccaatagacacccttcctccttccagttgtgacaaccaaaattatttccaggcactggagagcaaaatcattccttaatatgaaccactagtcagtgagaagatcttgttcatcctgttggaaatatggctcaaaataatcagatcagttcaaagaggattttataagattttgtgtctcaaaa

SEQ ID NO: 217812 - DNA, 567 bp, Homo sapiens
aagaaggtttagataagagaagctttcactcttgttcatatcatggaatagtgtgaagggcagagttgtgtctagaaacctggtctgtcagcactgtgttttcttccactgtatcccagtatttccttaattagccttgttattagaaatgtaaaccaagtatccaagaaggtcctgtcaccaccactcagctgtagaataagttaaatccagcttaacttttgcatttgtgaaagtctgagacctttaaaaaatgcttagtcgtcattgtattcagaaagtttaagacttctatagtggttcagggaaattgtactgctgagaactagtaggttattacagccatgtttttctgtgattactttttatttttcattttgaaagaaaaaaactacctggcatagtctcaatgctttaaaaagacaggatttttctgtgagaccattgacatctaaattagtgttctcttgaactgttatcatgcatattaagacatatcatatatctaataaatggaagtaaaatggagttaattgaatcatctggttgggttcagctataccattt

SEQ ID NO: 217813 - DNA, 467 bp, Homo sapiens
aaagaccggatgttaaaggtgagcttgttgagtggaagggaacattctcaggttgtggaatttggttagaagctgtagaatttaaaagggggagggaagtgtaaaacacgaaggttggtggagtaagggaggcttctgctccgcagcagacagccagcaggcacacagggtccgtctgtttaggaaggggaggggacgaaactcccttggaaacttcccaccagggaagctgtttttctctccaggcaaaatatttgccagcacaataaaggtctccacatttgggaaaaagaaggctcattaccaaactcagcttgttaaaagtatttggctttgggcaaattcactcctgcaagaatagttattaagcacttactgtgtgcctgccctgccagatgctgacgttgcagtgagctgagatcgcgccactgctctccagcctgggcgacagagcgagcctctgtctt

SEQ ID NO: 217814 - DNA, 527 bp, Homo sapiens
atttaatgatgctatcctaacaggtgtgcagtaatatctcattgtagatttgatttgcgtttctctgataattagtgatgttgaacatcttttcatatacctgttggccatttgtatgtcttctttggagaaatggttattcagtcctttgcccaatttttttaaaaaatgggttatcagttatttttgctattgagttgtaagagtctcttatatattttggatattaatcccttatcagatatatggtttgcaaatattttctcccattccataagttgactctgttgatggcttcctttgctacacagaagcattttagtttgatggtgtctcactcgtctatttttacttttgttgcctgtggttttagggtcatatccaagaaatcaatgtcaagaccaatgttatcaaggtttttccctatgtctccttctagagtttttgtagtttcaggtcatatatatatgtctttaatccattttgagttgatttttgtgtatggtataagataagggtctaattac

SEQ ID NO: 217815 - DNA, 295 bp, Homo sapiens
taattgtctaatccatggagaattatggaaaatctgtccgtaccactgtggaaatcagaaagaatcagtgtctgtgaatatcagtcttgtaaaaagcatttgatttactaacattaggctataagcattctagggtactgtgactattaaaattgccatttaaactttaaattcatggctgggcgtggtggctcacgtctgtaatcctagcactttgggaggctgaggctggtggatcacttgaggtcaggagttcgagaccagcctggccaacatggtgaaaccccatttctac

SEQ ID NO: 217816 - DNA, 420 bp, Homo sapiens
ccctcctcaaacctagagatttctttaaaggaaggaaaaggagagagtaggggagagtacattgtagctgttagaagggatagttctacaaggtatccaaatttcctaagtatatttctttaaattttccttttattgaattttctgtttactggcattagtctcatatcagttttggctacctttagctgcttttgttgaattctatttaataaaggcactgcaagtataaaattattaaaaatagacaagcacaatcctttctctgctaaacaagcttatgaaaaacctggtgatacccaaagagctacaaaggaaactctcacacttggaaagattagactgataattagcctactcatgggttaaaaaagaacacaaaaattaaaatatagtaagtcctcattcatcaagacgtct

SEQ ID NO: 217817 - DNA, 621 bp, Homo sapiens
atgttttgtagtattcttgagaatatggaggctatcagatgttctttcacctgaacttaagtttgagaaccatacttgtaggccaaggacacagcatgaatgctggtgaaagtgtatggaagtgtttggaagcagtacatagctagagcaggaatgtgcagaggggaggaatgggagatgcagtttggaaagtaggtaaaggaatgaattcattatcaagctgagggtttatactcactttggagaaattgtaaagataaaaggtttttgaactggcagtagagaagaaaaggtagtgatgatttatgcgttaggtaagttaataatctggttgtgatattgtggttttaaagatgtgtcctatctatggattctttgatacctctcccctcaactaatgaggcttcgtttccctccccttgagtatacactgaacttagtggcttgcttctatgaaacaatatggcagaagtgatgctatatcacttctgagattaggttataaaacgactgtagtttcatggccgggcgaggtggctcatgcctgtaatcccagcactttgggaggccgaggtgggcggatcacaaggttaggagatcgataccatcctggctaacatg

SEQ ID NO: 217818 - DNA, 497 bp, Homo sapiens
taaggataaattcaggtgctttaaatgaacaaataacttagcagaatacactgattcctgaagcctgcccaattccttctgtgctctgacgtagacatggctgtgcattgtcgtaagaagtcgacaccacctatctctatagaaagcagaggggaaaagtgcaggattcagcagcttttcttaacaaattgtaacattttgagttggcttccatatataaacaaggagtagataagtttattttagcattttagcaaaaacacttagtaatttagtatatttccgtgacatttacctttaagactctttttaattacctaattgatcttatccatgatgggttcaacacaaagaacaaatattcagagaacagtcccaattccatttccaaattatgtatacttaaacataacatacctactaaaatattgctggcttctaggggtgacttttggtctgtcactggtaagagtgcatggatacacatggaaagtcag

SEQ ID NO: 217819 - DNA, 378 bp, Homo sapiens
actaaatcatatcaggtccttactaaaattccatactgcctatgaaactttatgatttactgtttaactatctctgaactctaagctctccctggactccaagctctacaagcataagaattatagtagttgaactttgggaggctgaggcaggcggatcacgaggtcaagagatcgagaccattctggccaacatggtgaaaccccatctccgctaaaagtacaaaaattagctgagcgtagtagcgctcgcctgtagtcccaggtaatcaggaggctgaggcaggagaattgtttgaatctgggaggcagaggttgcagtgagccgagattgcaccactgcactcctgcctgatgacagagcgagactccatctca

SEQ ID NO: 217820 - DNA, 559 bp, Homo sapiens
  misc_feature (56)..(56): n is a, c, g, or t
  misc_feature (83)..(83): n is a, c, g, or t
ccccaggcgggaggatggacccccttacctccactaaggacgggcttcaccactcnggtccttcaatggcggaaaaccactgntccttaaaaacttatactttaaaaaccatccggtactatgcctacagcctagtacttataaatttggaggagttaaaaatttttcctaacagatctcttcataaaggttcctgttatttaaaaccccactataataactactactattgatatccatgcacaacacaggcctgatccttaattcattcattgtctccactgttatcatctcaatcaatgatgtgaacatttacaaagttgttcagagcagaaacttggaggtcaagcttcaattgtctctgagctccccatgccctactctgaaaatattctacagattctaccttaaaaatataccacaatctgcccactaatcttccactttgatttctgccatcttgatccagccatttgtcatatctttcccacactattgttcctgactgatctcttcccctgtctgcttcccattctactctctgttttttctattgtat

SEQ ID NO: 217821 - DNA, 500 bp, Homo sapiens
gaatgtctacccaatgcttgtatcaccattgtatcttagaagtaaataactcattttttattttacaggttaacatatggaaagactttgacttgagtctcagaggagactttggattttgtacttggtacttttgagctaatgctagaaccagttaagacttcggaggattgtgtttttgcaatgtgagaaggacatgaggtttggatcccaggggtggaataacatggcttggctgtttgtttcctccaaatctcatgtttaaatataatccccagtgttggagatgaggcctagtgggaggtgtttgggtcactggggcaggtccctcataaatgtcttagctatgataataagtgggttcttactctgagttcatgtgagttctgcttgtttaaaagatcacggcacctccccaccttctctcttgctcccattcttgccatgtcatgtgcctgcttccttttgaccttctaccattatcgtaagcttcccaaagc

SEQ ID NO: 217822 - DNA, 399 bp, Homo sapiens
cttcatgaaaaaatgacagtggatattacattttacacttgtttatagattttctttctttttcaaccaagaaaatattttgaacaattgaaacttttaattgcatttgcaaggttttggcttctttatgttgtcatcacacagatgcacacacacatacacatacaacacaaaagagagaacaaaaaagcaaaaggagctaggaaaaaaacaaaacaaaacaagtagaggtgtatcaaagaactcaagctataaccaaaaagaaatcgtaaaatgcctttgctcgtttctctacgctggaccaaagctcaatatttgtaggtatatgcacattgtatagatatggctaaatgttgctgacaatctcgcaatactaaactgttcctattttaagaaaaa

SEQ ID NO: 217823 - DNA, 401 bp, Homo sapiens
aaagcaaatgtattagatattttcatttcaaacttggaatttaacctagccaccaaattccagattttatttgcctacagtggcagtttaattcaacaaatatttgttaggtgctttgggtaaagcagtatgggaaataaaaggcaggagcgagaaagtgtcctcactcacccatcttacagtcataggtcttggttggggagaaaaagaccggcattaaccactggctggtctcttctatagcacaaaaaataacattcaaaaggaagaaaagataattttctattttaatttggcagaaagtaaacagtgtttaaggagaatatagagtaacaaattcacttcaaaaagaataaatttaggcactcctaccttatgaatggctaagggtatttttatat

SEQ ID NO: 217824 - DNA, 753 bp, Homo sapiens
ggacacataatcccctgttgtagagaaacttggttttcaattgtacttcctagtttcaagtttcaacaactgcctcttctcttcctttgatagctgtaatgaacagctacctcccaccccttccgagatcctcagtcatttcctaccctacccctggacccactgtcttcctttcacatcacagtgcagggaaagtactcaggggtgagattgcgccagagcttcctggcatagggtaggatttggttttgttttttgacagtcttgctgtgctttatgtgattgtgtattcagttacagcagccaagagcctttaggccagattgtctacaaattacaattaaaaataatagtaatgcctctcattaccatgattattatgattagtggtgctgtgctgggtgggcctggttcagggcccaggtctgctgggaataaggctgggaagaaatggctgtacatagagagagacttgggctgctggtggcagcggaaggggcggtgtggagtcaggaggtcttgggggatactagtcagcaggacccaagtctgttggctcacctgtaggtcggacttcaaactccagggtatgttgggaaagagagtgaagtcctactgaaaagggaaggaaagagacagggtttcagaactcttttccgaatagaggttaaggacactgacctaggcagacctaatgtgtgtctcagttctgctccttaccagctagggatcccatggcaggtaaatgtgaac

SEQ ID NO: 217825 - DNA, 193 bp, Homo sapiens
agtgcctgacctgagctgggcccatcagatccagtacttacctggaatacgaaaaagatggagagagtgaccaaagattacaaaaatctctgaagcttatctacttgagagagagtccctgaagatactggcctctcattcctgctatgtatatccaatgtgactgaactctgaataaaatatacaagttata

SEQ ID NO: 217826 - DNA, 696 bp, Homo sapiens
gcattaaggcccccagttttcctgacaccttcagggtagagagcaggcacaggatttattctctctggtactcagtaagaagcagggaaccgccaacagaggaaaatgcttacgtgtccctgagtccttggacaaacactcgaatgtatagtcccatgaggtcaactagccagaaggagctggcggatcgccttggaaagagctcgcactgcccacacaatgtgtgtggtccttggaggggctgccctggtgagctggattgcttccagtgcttgtgccttggaggagccagtagtataggggctttcttagtctctgaggtttgttaacttgggctctgctgggccatgaaaacagcactccttgctgggccttgcagtactccctcatttgccacttcccagagagcctcatagactgacctgcacagacactaagggaacacacaacctggtgcaagcaaagaaaaatgcagcctccactgagaaagtccaagttggaaaaactgtaatgagactcccactgaggtaaaactaatggaagagatggaagagaactgtaacggacaactcaggaaatgaagtataagtacaaaagtaacatttggaacttaaaaactcatgatttctaaatataaaaattcagtaaacaggagaatggtcactgctgggctgaattcatgttctggaaaagcaa

SEQ ID NO: 217827 - DNA, 575 bp, Homo sapiens
tgaaatcccaacagggataaatatctagttatgctaactatattgcaagttttactatatattagttatacttagtgtggggcatgcttactttatgttttaagatttctggtctatatcacttgtccctggcactatcagactcttgctttctattttaaataactggtcaggtgatactggttaaccaaaagtcctagaagccagtgcccactgatcttagggcatttttcagcagtggacacattcatagtattattacaaatgaaaaacagcagtgaatgctaaactcttgacataactttgttttattttggatgatatctaaagatgttttcaatatagattattaaactatgactgtaaaaacctccagaaaagcatcagatattaaaaagtggaaatattctctccagaccatgaagaagtgaaagcccagtcagcacacattgctttcggtcctttcctcttgctggaatcccagttgtcatcaagttcaccctttcacttcacagctgagtaaaataggaggccgtttgtgctccatcacacttaactgtacctcctgcttcatg

SEQ ID NO: 217828 - DNA, 481 bp, Homo sapiens
cttactagaaaaaaatctggtaaaagtttggcacattacataggaagcggaaatagattatagatgagggaaaccaattttgaacatgttgcaatcatctggaaattagatgataaaggatggtaataatagaatagtcactgtaaatctgtgccatcctggtatatacctggctgataacaagttcttttaaaaaattaattttaatgacaatgaaaattatgtgtatttgtggtgtacaacatgatactttgatatatgtatatgttgtagaatggctaaatcaagctatttaacttattatctcacagacctattttattatggtgagaacacttaaaatctacttagcagttttcagctgggtgcagtggctcacgcctgtaatcccagctctttgggaggccaaggcaggcagatcacctgaggtcaggagttcgagaccagcctggccaacatggtgaaacccagtctctactga

SEQ ID NO: 217829 - DNA, 481 bp, Homo sapiens
cttaaaagccagctttccttgaacaaagctcctgttgctttctggagtgccttataaagaatgctgggaactgcttaaataaaaaactaaggtaaatacatatgcacataaataaaatcccaaactaaaaataaattgtctcttttaataaaaaatataaagtaaaatagaatgccagactcactgaacttcccagtactatgggtctggagaacagtttagacatctctttctaaaaggctgcaacaggtgattctgctatgaagccagagttgatgtgaatgtcagaagtatatattatgtgtctagcacatagtagatgttcaacaaaaagcactacccaatgtcacctgtgcaatattcttgcccaaaatgtttaacctcaatttaataacaaggaaataataaggtaagctgaaatttaggatcattctgcaaaataattgacctggattctttaaaatgtcagcattacattagg

SEQ ID NO: 217830 - DNA, 107 bp, Homo sapiens
gctgataatgatggagaggctgcaaatggtggtggtaatgaaggatgcagtttgggtcttcctcttgtaaaactgtcaatggaaaagaaattctagtttcagcgagt

SEQ ID NO: 217831 - DNA, 427 bp, Homo sapiens
gaatgagcccactaacataaaaataaaatcagttacatctgcataagttacatctgcagtctcctttgtcatataaagtaacattcacattttccagggaataggtcagaaacatcatttccaaatcttgattcttatattttcttagttctaaaattcttatttagcctgtaatccctgcactttgggaggttgaggctggtggatcacctgaggtcaggagttcgagaccaccctggccaacatgttgaaaccccgtctctaaaaatacaaaaaattagctggatgtggtggcgggcgcctgtaatcacagctacccgggaggctgaggcggaagaatcgcttgaacccaggaggcggaggttgcagtgagccaagatcatgctattgaactcgagcctgggcaataagagtgaaactccatctc

SEQ ID NO: 217832 - DNA, 211 bp, Homo sapiens
aaaccctctctgtgactaaccacaccaaaccaccaagtttactttgatgtgaagacctatggatagatattcaaggaaatctcttcccagggacctaaaaggaccacctgttcctctctcttctaaggcatcttcaccctctgggacttccaatggaagatagaagattaggacgcatatctgacttccttcccacctgctttctctctgg

SEQ ID NO: 217833 - DNA, 816 bp, Homo sapiens
atctctacttcaagagaaattgaaaaatgagaatttttgttaagaataatattctccaaaacaggatgtctactaaaagaaagtgagaaaagagctctactactagtagaattagtaacaatgagagtaaacaattgttacccactctaagaatacagcagaagccaagcgcagtggctcacgcctgtaatcccagcactctgggaggccgaggcaggcaaattgcttgagtccaggagttcgagatcaggctagccaacataacaaaaccccatttctactaaaaatacaaaaaattagccaggtgtggtgatgcacgcctgtagttccagctactcaggaagctgaggtggaagccacctaggcctgggggatcaaggctgcagtgagctgagatcctgccactgtactccagcctggggaactggagtgagaccctgtctcaaaaaaaaaaaaaaaaaaaagaatataccaagctacctactaaggggcatacctttcccaccaaattaattcagtcctttggtaagttacaggtgtggtggtttactgtacctttaatcattaatggaaactttagttgcccattcctctttggtgtcatgcagcccttgaggtaatttgcaccctgtgatgttttaccccgtccagctccatacactccagtgtaagtaggcctcccatttacacaccttacttatattcataatagttttatttgtacagaaatagcagtaacaatctgttatctaatatcaacctaatatctacttctaatgcaatttgattgcatgcttgtattaaaccatttccctc

SEQ ID NO: 217834 - DNA, 1154 bp, Homo sapiens
ttgaaccccagcttctctgacttaaagctgccctattgtgaagtagaaatgaagtgtaagcaatatattcttaagtatactggtcaattctgatttacatagaagacctaacagtttatttactccctactatttgttatgggattatgctgatagtagctattactaatagaagatacggtctaaatcagggaattcgtgttctatcagggatggcatatgtgcatatctaaataattactgtacactgggatatgttctagataagaggtgtatataaagtagatagagatgaggaagtggatgatgggcctgtatgccagtactactatcaggaaaaatttcatgaagatgatttctgtattgggctagtaaaaagcagggagtttcttggcagacaattaggggaataagtgaagcatacattttgacatgagcaaagcacagaatcattttattactccaagactcataagactggccctgtttacttcaaagttactttctttattatcaatcctgagttggcttcaaatgaggaggcatagccatgcatttctgaaaaaaaagggagagaattagtctgttaggcagcagtgggtgaacagtgagcaaagataggaagatgaattttgataggcagagttgcatattttgcaactaaaggtagacattgcagttgtatagttgaaagaccctttggttattttagctgcttataaccattatcgttagtgatgtgcattttttctttttttttgagatggagctctgtcgcccaggctggagtgcagtggtgtgatctcggctcactgcaacctcagcctcctgagtagctgggactacgggcacacaccacgaggcttggctaatttttgtattttttggtagagattgggtttcaccatgttggccaggctggtcttgagctcctgacctcaagtgatctgcccaccttggcctcctaaagtgctgggattacaggcacaagccaccgtgcccagcccatatacatatttttatgtaagtatgtttgtaaagttagagataaaatagtgataatacagtgttactttgagatagtatagtgttactttggctggtactctaattttactgtatgctgctattaatttatatttggggttttaaga

SEQ ID NO: 217835 - DNA, 220 bp, Homo sapiens
cagcgtcagcgggcgccagggccacgccggagaccaaagccaggggccacccttcttggagcgcttttccccctttcccgggtttgtgtccccgactttctccacccggagctacccaaagccggctccttggtgcccttggcaccttggcgtgctgagcactttgcgaggaacagtctgaccccggcgcgcagctccgcgggatcctgggtactccacg

SEQ ID NO: 217836 - DNA, 404 bp, Homo sapiens
tatttagcaacggaagtggctgtcagtggagaggggagctggagaggggacagcacaggcagagagtcttccctgaagtccagctggctcttctctaaagttaagctgtctctcctccaaagtccagccatccctctaaagtcaagttgcttctcctcagtcaagctgcttctctcctctaccaactgagtctgagatctttgtaggcataggatggggggcggggcgggccgtaggtagttttgggaaaagcaacattcgattggtaaaaagacattattcagaaagaaccaatcaggagacagcaggcaaacagggatagaagttatcactttggaccaagggtttcaggcttctcggctcaaaggtggggttttgctggggatctgcccatgtctgcctag

SEQ ID NO: 217837 - DNA, 357 bp, Homo sapiens
ggccaggctggtctcaaactccggacctcagatgatctgcctgtctcagcctcccaaagttcttggattacaggctagagcctgtaatcctgcacctggccaaggtgatattttaaaatatcataggaacccagctgttttacaactcttgataaatttcccactagctgcagcctccttttttgacccagagagtctcttgggatcatccagttcagttccttggtgttttctgatggtagagattggatggagggaagggctttcccaggatcacctggtaggaggtggtgactagcactcagacttccagagcctcaattcctggtttttctttttctttttttcttttcttct

SEQ ID NO: 217838 - DNA, 361 bp, Homo sapiens
ctactcgggagactgaggcaggaggattgcttgagctagggagattgagggctgcagtgagccatgatccagccactgcactccagcctgggcgacagagcaagaacctgtctcaaaggaaaaagaaagcccagccccggcttagtcatccgatgccatacgtgggctcgcagtgttgaggaggagtttggctcccctgtgcctctgcagctagagggcagctaaattatcagtcagatcacgcccccatcagagcctcccggggtccctgcacctccagagaaatcccacccactcacccccacagcccacagggctcacgggccccagcctgccaacctacccactgccaggccagccc

SEQ ID NO: 217839 - DNA, 538 bp, Homo sapiens
tgctaactctactgtgtggtggcgaagaagcatgcatcttgaagccagcccatctgactttgaagacaggctcaactgtttttcagacgtttgactttggtccgagttcacttaatctgcttctctagactcagtttcttcttatgcacaattttatacaaatataaccatactgtatgtaaccttttggaattgcccttttttactcagcacaattctctggagattcgtgcaggttgttgtatcagcagtcattcgtttttattgctgagtaatagtccattgtatggatataccgtagtttaaccatcggcgtaatgaaggccatctgggtggcttctaatttttggctctaacaaagcttctatgaacatttgtgtatgtatttttgtgtgactatgttttcatttctgtgggatcagtacaattgcctgatcatatggtagtttagttgcatgtttattatcttctttaatatgctttttttaaagagcagttttaggttcctagcaaaattgaggaaaagatagagatttct

SEQ ID NO: 217840 - DNA, 400 bp, Homo sapiens
ctgttgttttgaaatataatgatttttttaaagttttttttcctcctacgtgtgtattctttttctcttaagttgcttttttctttttctttttttggtctttttctttatcttccacattagaaggtagtttcctcacgcctgcaatcccagcactttgggaggccaaggtgggtgagtcaccaggtcaggagattgagaccatcctggctaacacggtgaaacccgtctctactaaaaatacaaaaaaattagctggacgttgtggcatgtgcctgtagtcccagctactcaggaggctgaggcaggagaattgcttggacctgggaggtggaggttgcagtgagccgagatcgcaccactgcactccagcctgggtgacagagcgagactccgtctt

SEQ ID NO: 217841 - DNA, 378 bp, Homo sapiens
gcagatggagtccagcctgggtgagagagcaagactacgtccaaaaaaaaaaaaaaagagagagagaattttcctgtaaataattaaaaagactaagcagccccagagataagacctcctgggatcattgtccctttatattgagtgataaagtaaccttccttgaagtatatcaatccataaccaatcaccttgctgcaccctatgtactggtcttgaatggaaaatgtggtgattcttctaaagcttctctgtctttccgtgtgtgtgaaacctaagggaacgctgatcccattcatttggagttgatgtttccaggtggctatcctcatgctttgtgttcaaataaactctgtgcttaatcatatattctaaatt

SEQ ID NO: 217842 - DNA, 508 bp, Homo sapiens
gtgcaaagcttccctccgcccacaaggtttctgtgatctttagcctttattgtgcagtttacttgttaaccggcttataatgtattcagcctatgctaatcattgactccttttgggaagggtagaaggtaaaagatgtatacaatctctcagctgacctttttttaatgttggggaagaataatgaacaacttttattatctaccatagacggccagtcttctgcttctaggatgctctcccaccaatgtgtccatctatgctgtcagccctaaatgccagtcctgtgtaggaagtcctgtgttcattcagaaaagtcacccagtgtccatccatttatgtccatcatattaaaaacagttgagttatatgataaaacatgctaccattaaatattttaacagatttaaataatatgaggaaattattaatggttgtgacatgttaaacaggataaacaatttttttataatataaacttttacatctatcatctgaattatgcgag

SEQ ID NO: 217843 - DNA, 264 bp, Homo sapiens
atgttccctcattcatcattggctcattcatccgcccatcctgtgtaggaagtcctgtgttcattcagaaaagtcacccagtgtccatccatttatgtccatcatattaaaaacagttgagttatatgataaaacatgctaccattaaatattttaacagatttaaataatatgaggaaattattaatggttgtgacatgttaaacaggataaacaatttttttataatataaacttttacatctatcatctgaattatgcgag

SEQ ID NO: 217844 - DNA, 505 bp, Homo sapiens
cggggctgctctgtctatggagtagctgttcttctattcctttactttcttagtaaacttgctttcactttgcactgcagatttgtcctgaattctttcttgcgcgagatccaagaaccctctcttggagtctggattgggacccctgtcctgtaacagatggagttgtttttacactcttctctgggtatgctcctcccccatggacactggggttgccacaagatggccttcaataaacgacagtgtcgaaaaattcgtgaaactgggtcaagaggatttctccttttgaggtcttagtggggcttttgttgtttcctgcagagttggaaggaagcggaaaatcaagcacagtgtgccaaatcctgtttggaaccagaaggggcctaataaataaatatgtaaaataaaaatgctacatgcagagatctccagatttactgactgagtaaattaactttcttgggaggtcaggattctatattctgtaccaaagaaagagaaa

SEQ ID NO: 217845 - DNA, 368 bp, Homo sapiens
cggggctgctctgtctatggagtagctgttcttctattcctttactttcttagtaaacttgctttcactttgcactgcagatttgtcctgaattctttcttgcgcgagatccaagaaccctctcttggagtctggattgggacccctgtcctgtaacagatggagttgtttttacactcttctctggagttggaaggaagcggaaaatcaagcacagtgtgccaaatcctgtttggaaccagaaggggcctaataaataaatatgtaaaataaaaatgctacatgcagagatctccagatttactgactgagtaaattaactttcttgggaggtcaggattctatattctgtaccaaagaaagagaaa

SEQ ID NO: 217846 - DNA, 253 bp, Homo sapiens
cctgatagtcatatcagaatgtatttccaggtccacagagtttagtaaatacacacatgtccacttgcacacgacacacaaaataaaggagaattcaccatcctagaatttatgaaggtcttcataaaggaggtattgtagttaagaaaaaagaaagtgacaggttatggaccaggaaacccaaattctagtcttgttttgccactgagtaacagtgagactttgagcaagtcacttcccttctttcggtctc

SEQ ID NO: 217847 - DNA, 475 bp, Homo sapiens
ctcttactactcaattgtatgtttcacattttccaaaattttgttggcatctattatccactgtagtcttctctcccattctcttgtgcttgtgacttatgctttttataatattttactatgaatgggtccattcaccgtatttaatcaagtttactgcctccctttggaaacactactactttaacttctaggatatcactcactcctacttttatgtgcttgttcattccttccttcttaggcttttattgcctttccctttctctgattataatctaaatatgtgcattagcctttaagatctctgtcagcaacaacaacaacattttttaatggctttaactaccttgagtaatttctaaatgttgatgttaagtctagcattctttggccccaggaccctattgtccattgtccaactactttccaaacatcttcacccagaaataccactgggacttaaatctcacca

SEQ ID NO: 217848 - DNA, 189 bp, Homo sapiens
gcagcctgtgtaaaacttgtgccaggtgctgtctgaacaagtgttcgtttgtgggctcagggtggtgcccaagtcttagaacttagaacaaagaagagaactcagagcagagaaacttcagcaggacattttttttttttttttttttgcattgctggagtggagggtgaggtttcagacacagagcac

SEQ ID NO: 217849 - DNA, 529 bp, Homo sapiens
tcacgtaattcttaaactactagagttatggtgcacactgtaacagtgacagtacacacagtaacatggttcttgtttcagtcttggaagactttgggatattcatccttgataattacataatttaaaataaaagctaataaagttgccttcaagtcattttgtatgctgatcacaatattctctgtgacaagtttactgctgttcacattcctatatcgcagtggcaccttggtttttaaaaggaaggctatgaaggggattgggttggttgagggtaacctttggtgggggtaacaaatactgaaatataaaaactaatgtacacttatcacatggtttacagtttctgtgaattctgtgtttatgaaaacgttaagtcctgtgagagattttcaatccccaattgttttggctgtctacatatgcaaagtcttgtcttaatttaataaggaattgaaattaacagcaaagcctgtttacacagcatttaaaacagtatagatcaactggtttctgcagtctttga

SEQ ID NO: 217850 - DNA, 363 bp, Homo sapiens
ttacttagagagcgaaacaccaggaagacagttgaggggtgaggtatgggtgaggctattcaaacagactcttgtcccttcatttacttcatttctaatcagtgatactatagcttttaattactaggaccatttcaaataatggctttcctcacaatctttgaagagactatatttattctggtttgttttctcgaaataatcttaaaatcttgaaatgtgcaaatagcttaattctgcttaaatataagatcaattcaatgatttgactgttccaggctactggctgcctctgggaaagtaacttggcctttagaaacaagaatagcatttatattatttgaaagataaaattaggttata

SEQ ID NO: 217851 - DNA, 250 bp, Homo sapiens
acaggcatacatatgcaggcgtgcacacgtccacatatgctcacatgcgtacacacacatgcacagacatgcacacatgcatgcagctgtgcacatgcgtgcaggcatacacacatacatgcacgcacacacatgcatgtattcacatgcacacacacacgtgcacaggcatacacatgcacacacacgtgccgacaagaccagcctggcctccccggctccaggccaccctcattcctgccacatcctc

SEQ ID NO: 217852 - DNA, 721 bp, Homo sapiens
ccccacatcggtccgtcctgcttccagctgctgcagcgcgccttcgccgccaaagcatccagcagccccctgctccggcccagcatggcgaccccgacccagacccccacaaaggctcctgaggaacctgacccattttactatgactacaacacggtgcagactgtgggcatgactctggcaaccatcttgttcctgctgggtatcctcatcgtcatcagcaagaaggtgaagtgcaggaaggcggactccaggtctgagagcccaacctgcaaatcctgtaagtctgagcttccctcttcagcccctggtggcggcggcgtgtaacaccttcccgaggaaactccgctgccgaccctgcctgagcgcgggagcctgaggaccgggtggaggcggtggggacccagccgcgcgccgggagcgctccccggaatgagccgccccacccaccccaaggctggagccgctgcaccctgctgtccctctccaggccttggcaatgacgatcccccaaagagcccgtctgcaccccagacccagggcctcaggcctccagctcctgggatccgggagtccatcccggcccagcacccccagcatccccgtgtatggcccccctgcacctccttgtctcatccccgaagatccgtccccctggcccctcagtgtccatgtcttgagcttaataaatgtgcatttggttttttcctctgaaaaatct

SEQ ID NO: 217853 - DNA, 832 bp, Homo sapiens
ccccacatcggtccgtcctgcttccagctgctgcagcgcgccttcgccgccaaagcatccagcagccccctgctccggcccagcatggcgaccccgacccagacccccacaaaggctcctgaggaacctgacccattttactatgactacaacacggtgcagactgtgggcatgactctggcaaccatcttgttcctgctgggtatcctcatcgtcatcagtaagtgcgacccattcctgggctgcctcagcctccgcttcctctgctggctttcatccatatcctacccgctatgtcctgtcttcttgttctgtctctctctcccaacaggcaagaaggtgaagtgcaggaaggcggactccaggtctgagagcccaacctgcaaatcctgtaagtctgagcttccctcttcagcccctggtggcggcggcgtgtaacaccttcccgaggaaactccgctgccgaccctgcctgagcgcgggagcctgaggaccgggtggaggcggtggggacccagccgcgcgccgggagcgctccccggaatgagccgccccacccaccccaaggctggagccgctgcaccctgctgtccctctccaggccttggcaatgacgatcccccaaagagcccgtctgcaccccagacccagggcctcaggcctccagctcctgggatccgggagtccatcccggcccagcacccccagcatccccgtgtatggcccccctgcacctccttgtctcatccccgaagatccgtccccctggcccctcagtgtccatgtcttgagcttaataaatgtgcatttggttttttcctctgaaaaatct

SEQ ID NO: 217854 - DNA, 358 bp, Homo sapiens
tttggttttgtttgcctctacatagttagaaatcaacaaaaaagtttcattattcaaacataaagtttagacagcataaagctatcaaaatcatacatgattataaagtaacagtatttggatccttcatagcatacttattggtaaccttcaatatacaaaacactatttcattacatctaaggttcacctttttcttcctaacactttaagaattgtacctggctgggtgtagtagctcacggctgtaatcccaacactttgtgaggccaaggcaagtggatcacctgaggtcaggagttcgagaccagcttggccaacatgccgaaaccctgtctctactaaaaatacaaatatt

SEQ ID NO: 217855 - DNA, 192 bp, Homo sapiens
ttttcctccccatttcctcttcatacattacatagattgtgaatgctctattaagtgaatgaaagaatgtttcctagccctaaacactactgttcacatcactttaaatcctatcaataagtcaaatgattttttaaattaatcttatataccattagttaaatgggtattctttttttttttttttttttt

SEQ ID NO: 217856 - DNA, 608 bp, Homo sapiens
ctgatgcggtggctcagagcacccgtatcatttatggaggctctgtgactggggcaacctgcaaggagctggccagccagcctggcgtggatggcttccttgtgggtggtgcttccctcaagcccgaattcgtggacatcatcaatgccaaacaatgagccccatccatcttccctacccttcctgccaagccagggactaagcagcccagaagcccagtaactgcccttcccctgcacatgcttctgatggtgtcatctgctccttcctgtggcctcatccaaactgtaccttcctttactgtttatatcttcaccctgtaatggttgggaccaggccaatcccttctccacttactataatggttggaactaaatgtcaccaaggtggcttctccttggctgagagatggaaggggtgggatttgctcctgggttccctaggccctagtgagggcagaagagaaaccatcctctcccttcttacactgtgaggccaagatcccctcagaaggcaggagtgctgccctctcccatggtgcccgtgcctctgtgctgtgtatgtgaaccacccacgtgagggaataaacctggcactaggtcttgtga

SEQ ID NO: 217857 - DNA, 408 bp, Homo sapiens
cttcacctcctgctgtgatggctccagcccttcctggggaaggctgtgggaagtctcccctctggctggcttcaaaagcttctcccataaaagctgagcaaaggtctttgtcagacttatttggaaaaaggctcctcggacatgagtagtgagtaaatcctagaaaacaatctgttgagtttgtaaatgaatacatgtttttggacttcatgcagacatcctcaatccctattctcagatgccgtagttatctgcagaattccccttcagttaggaagtaggtttttcatgtctatctgataacctggctttttatttgaaatgcctccaatgacagaaaacaggaactaagtggcttttatttaaggaagcaaaactcctatctgcctatcacagtctagagagttt

SEQ ID NO: 217858 - DNA, 391 bp, Homo sapiens
ttttcctttcaggagcaaagcagcagaaatctctgtcttgattggctcagaccaaaaatctccatatgaaaaggggaagattcaatcacccaaacctccttccttctctattttcttttttttctatctgaagatttatcctgaccattcagagttgctcagtatgggagataaatgatgctttcttaacctcaacccctctctttctttcttacagtcagtatcctgacctggcaaggtgttccttaacctcccctctggatcccccttagcacacatctgggacaatggagcgttcagcaccacggacagcattacaccctcttcaagtgcttgttaaagccatttgtctatttcactctcaagtaaataaaaatattttttaaaattt

SEQ ID NO: 217859 - DNA, 247 bp, Homo sapiens
atcagggtttcctgaccagtgagaccacagagggctggatctgaattcagagagtcaaattggctgtacatggtcagtatcctgacctggcaaggtgttccttaacctcccctctggatcccccttagcacacatctgggacaatggagcgttcagcaccacggacagcattacaccctcttcaagtgcttgttaaagccatttgtctatttcactctcaagtaaataaaaatattttttaaaattt

SEQ ID NO: 217860 - DNA, 212 bp, Homo sapiens
caccactaccaaatccagagaagaacaaaaaatttaagtcagtatcctgacctggcaaggtgttccttaacctcccctctggatcccccttagcacacatctgggacaatggagcgttcagcaccacggacagcattacaccctcttcaagtgcttgttaaagccatttgtctatttcactctcaagtaaataaaaatattttttaaaattt

SEQ ID NO: 217861 - DNA, 495 bp, Homo sapiens
ttttcctttcaggagcaaagcagcagaaatctctgtcttgattggctcagaccaaaaatctccatatgaaaaggggaagattcaatcacccaaacctccttccttctctattttcttttttttctatctgaagatttatcctgaccattcagagttgctcagtatgggagataaatgatgctttcttaacctcaacccctctctttctttcttacagtcagtatcctgacctggcaaggtgttccttaacctcccctctggatcccccttagcacacatctgggacaatggagcgttcagcaccacggacagcattacaccctcttcaagtgcttgttaaagccatttgtctatttcactctcaagtaaataaaaatattttttaaaatttccctgaggtcctgtgcctaaacataaaccacaccatatgtttagggctctgacttcccctactatcagcttactgttaccttataaacacaaacataattttca

SEQ ID NO: 217862 - DNA, 610 bp, Homo sapiens
gttggactggaagagggtttgggagagagacccacgtcagagaggcaagtgtgaggtcaccatggggggctggataggacagagaggccacacgaggatgccaagggttcttccacatgaagagggtggagtggagaggacacaagggagacggaggagcatcagcaaggccagaggaagcccttgtggagggaatgtccctacacaaaaatccattcaaaatagacaagggcttaattgtaaggcctgaaactgtaaagccagtagaagaaaacacaggtgaaaaactccatgacactggcctaggtttcagggttgtatcacttcttgcatatgaccctaaaagcacaagcaacaaaagaaaaataaacatacatgattgcatagagctaaaaagcttctgcacagcaaaggaaatcataaacagagtgaagacaactcacaaattgggatagagtatttgcaaaccatacattaagtagggggttaatatccaaaatatacatggaactcaaactcaatagcaggaaagcaaataaacgactaaaaaatgagcaaagaacactgaagagacacttctcaaaagaagacataccaatggccaacaggt

SEQ ID NO: 217863 - DNA, 479 bp, Homo sapiens
gatgtccatagggaaagtacttatttgcacattaaacataaataacctacattatatgcatgctctttagatttccttatgaaggatgttgaagtaaatattactgaaccattgtcgctttctctctaaagatcatttctttggtttgagttgtaagctgatggtcctcgttgggcccttcatttaatatggacctttgagttgatcataaatcatttatttcagcttcaaaaggacagaagtcatacctgcagcaagaggtggctaggaagatcagatgtgaatgaaggagtttcccaactatgagcccacacataaaccagagttgtcttttactttattataatacataacaaacatatatttttccccctgggaactacattttagcaatatatttttcattattttctattcttcctccatttttatacagtacatgtccactatataacgtgtcaagtccattttgcaacgat

SEQ ID NO: 217864 - DNA, 550 bp, Homo sapiens
gcatgggggaaaatgtaaaccatcaaagaaacaaagatgtgtttgaaggaagatagacaataataatagcacaagagctcagaggttaaaaataagaaaaccaagcaaaatgaaattgatttgggtacaggaaaggtttattaaacaggacaaaaaggtgagcaaaatactgattttttaaaacctggtgattgtagagttcaaaaaaacaagcttacttgtaaatattaatgcaaaaatattaaataaaatattaccaaatagactcaaacaattcattaaaagaataatacaatgtgacaaattggggtttattcataatataaagatggttcaatattaagaagtcttaccatattagttatctaagaaagaaataaggtattattaatctccttagatacttaaaagatacttggtagcacttcttcttgtcgccatgtgaagaaggatgtgtttgcttccccttccatcatgattgtaagtttcctgaggcctccctagccctgtggaactgtgagtcaattaaaccccttcctatattaaaaaa

SEQ ID NO: 217865 - DNA, 429 bp, Homo sapiens
tggctcttctccgtggcttcatacaccctgcctcctccatgaccctgtagggcaggtggcggctctacagggcagggagtcaggagataaggatcctgaatttcattcacctgtgaccatcagcaagttactctccatggcaggccctccattttcccgttggtattgggaggggttgcaccaggatatgatccgggggccctttcttcttcagtgacagtcatctctggatacacgctctaagatctaggactgaatattcctggggaatttttttcctcggtcaatgacactgggtggctttaggcagtcgatggcatctatttaagatcagtttcacaaactgtaaaaagggcatcagaaatctgccttgctcataagatctttgggggcattaattgtggattcttatgtatgcatgagtcctgg

SEQ ID NO: 217866 - DNA, 390 bp, Homo sapiens
cacttttagatgttagaagaaaatatagatatatttgtttatatatgaaccttaaattgagtaagaatttcttaaacaatataccaaaaacagaagaagcaaatgacatgaagaaaacattgatatatctgattatatcaaaatgcttagcttggatataaaattttaagatatatttatgcactaaaaatataaaatcatgaatcattgttaatttgagagaagcaggaagaacaatagatccagagatagtacccaggatattttaattatatgtataatttctcaaaaacatctttatatccatatatgcttatctatatataattgtatctatatttctcaaaaatatgtataataaacatttatagcaaaatgctatagtttgac

SEQ ID NO: 217867 - DNA, 267 bp, Homo sapiens
agagctgccagctgtggcttgtagcataggaggctggggatctttggagatggttttgcagcatctctgggtcttttttatcagcccacagtaaatggactgcccatattttcagcctggctgactactacccagttataaagagagctgtctgcaggaggaactggccctgagatccttggacacacgatggttttcccttcaccttcaatcacctgtggcctcctaaacaatgaataaagaaagtgcaatacctcctggctcaag

SEQ ID NO: 217868 - DNA, 307 bp, Homo sapiens
gggaggaacaatctttgctgcttcttgtgatagatcagtgtttctaaaataattttttcatcattgtcccataaagaaaaaaaaaagtaaatttctctctgactagagaaattaaatgttaaagaataagattttgtcaggtaacattgaccttgggaggtctacaaactattgtaaatagctaagattttttcttgccctacccttgaaccaatttttgcctctgtgaggacaatattgcccccttctgagaatacatgtacaaaataattatatatttttaaagccatttaaacttttttttttt

SEQ ID NO: 217869 - DNA, 790 bp, Homo sapiens
catgtacacatggcaatagctcagctagttcagctatcagtgttggcacaagtcatgagactcttttgttctcctttggttattattttttttaactcatttgttttgcagatgcaaaaacccaggcccagagagatgaagaaacctggctaaggtaacatgtaagttagtgtcaaaatcaggataaaacccagatcttctgactcttagtatagctctctttttacccagccacactgcctgtgtccctgggactgttagtaaaataacaggtgagctggaccccctttttgagatgactgggtatgtttactgtctgggtcagatcagtcaagtactctgagtctagggttgttcctagaacagaagctggggttgatgagcatttgtgagtattggagaaggagtgagggggagaagcctcacacgcaaacccaggccctggtttcaatttcgtgtatgagattacctgagaacggaatgcaagtaacaggcaaataattgacatctcaaacctaactgtgtatgcatcctgagtagctaatagtgagctgttcactactaatgctgtgtgtaggttcatcccaaagacaggctgatccacacatagacaggctggtcctatgattaaggagtgtgagctggcattccctttatcaggacaaagataggttctgcttcctctggatagtcttcaggcaaagctttacttatggccttgcaaataacccatggtctcttggtcgatgaacaaaatagcagtaaagaagatgaattctccttatttatc

SEQ ID NO: 217870 - DNA, 329 bp, Homo sapiens
ctttatgagttggtaacttacagctgtgaacctgcctccttgttttcattaagtatatttgaagttaatggcaaaaggcagtgctgacaaccctgggaaatggcagtcctttgtcttcttcctggagcagatgcaaaaacccaggcccagagagatgaagaaacctggctaaggtaacatggtcttttccacccaggttggagtgaagtggcccaatatcaactcattgcaacctctgcctcctggctcagactctcctccagcctcagtcttccgagtagctgggaccacaggtgcacaccaccacacctggctaattttctgtataa

SEQ ID NO: 217871 - DNA, 203 bp, Homo sapiens
tcccagcgagcaaggaaggaaaactggcataacatggaggagcgccatgccaggagttctgactttcgacagtttattctgaagctagcccagtcctcgtcatttcaagacaataaacaaagactgttccaagaaaaattcaaaatggcaacacaaagagcagatgaaaggcagcacaggagaaaaagcagtgagaaactcca

SEQ ID NO: 217872 - DNA, 519 bp, Homo sapiens
agaatcttataagtttttaagatagtatcttaatttcctgggaacacattcatttatatatctctaattatttttcaaggttttaaaatttcactatgcccaaaaggctcttgatcatactgaacagcccgagttgtattatttagtttacagttcaaatacaattttacttgcatgtattcttgtctgaatctcaggatatttcagaagtctttaaatatattcattctattattcaaataattttttgagtcctgactatgcaccagggattggacttggatattagggtgcacagaatgaaacacgattcctcttctcaaaagtttctggcttagtgatatgaactaaaccagcagtaaacaaatacaatatagggtcataaatgttcctggagagaaatatgcaaaggacactgagggactggaaggggcacccagccagactggggacagacaagaaaggcttcaaggtgtacacagagcagattcttgaagaatgaaaggaaaccagataggc

SEQ ID NO: 217873 - DNA, 385 bp, Homo sapiens
cacctactctcaccagtacaaaggatatgcaagcatggggaaaagttgtcttatttaaagtgcacttaatactttattagcaaagactaaataaatacattgagcaagtctatcaggttatcaatcagacagtaaaacagtggaggatcaagattgaaggttaagtcgtcatagaaagaacatgcttgctgtgataacatctccttttctaggttcttgaatgcaagttaattttcccaaggtctcattttcactctgtgcctcaagacttcactcctggcccataggtggctgttgatttttttttctttgacagcagggggtgctctgggaatatgctcttcaaactaacttctgcctctagttatggttctttaagaaccca

SEQ ID NO: 217874 - DNA, 664 bp, Homo sapiens
  misc_feature (1)..(1): n is a, c, g, or t
ngagtgaagctcagtctgtctctgtaacatactataagatttgcaccttgttgctccccaggaattatgttagtgtccttttctatagctagtcttcaaggatggacagaggcctaaaccacaacaacaacaaaaattagaaaaaaaaaatacttagatttcggtaatcatccataggaactcatagcatcagtctcttttctctgtgaataatatctttgtgtaagttgtcataaaaaatcaacgttgggtttcactgaagtgagaaaccaaaaattttagtgtattttcactaatttgtgggggtggggataggtagaggccatattcatagtactttgggcagtgttctctagaaaatttatagtacttttcgtgttattatacactatcacctattaaggtaagtatttggttaaagtgctgtagaaatggaggtgatgagaggttctcattgattacataatttcctagatagtattaactcataatgctttcttttttttttttttttttgctgaaagtattttttaaagttagtaattggttctgttgattttataggtacagtgtagtgaatgtaagtgccagccagtactggagctaacattagaactttacccttctgactgtagtttcatgttcttcacataaaccctacttc

SEQ ID NO: 217875 - DNA, 317 bp, Homo sapiens
tcagaggggtccaggagaagcaggcgccagggatccagtgtgagccaggacagtgacagtgagggacattcagaagactctgagaggtggtctgggtctgcttccagaaaccatcatggatctgctcaggagcagctaagagatggctccagacaccccaggtcccatcaagaagacagagctggtcatgggcactctgcagacagctccagacaatcaggcactcgtcacacacagacttcctctggtggacaggctgcatcatcccatgaacaggcaagatcaagtgcaggagaaagacatggatcccaccacca

SEQ ID NO: 217876 - DNA, 200 bp, Homo sapiens
taggggacatatgccctaaaaatagtcagttttctagtctgagtaatagataagagactgactaagcaaagtttaaaatgctatttggacactttaatgcacatattggatatctaaaagtctacagccatataaaaattttatataattaatgagcaaatgccgtctctcatgccctaaaataaatcagtagaaacatg

SEQ ID NO: 217877 - DNA, 455 bp, Homo sapiens
ttctacatactgtggctcctacaggtaggctttatttgtatctatgtacacacacacacacacacacacacacagtatttttataaataataccaatttataattatctggagattaatttgataatactttatggttgaaattctcttacctattacccagcagttctgctcctaagggaatcatgcatgtatacaagaaaacataaaaggatatttaatgcaacattgtttgcaatagcaaaaaattgtaaacaatgtaacataaaaggatatttaatgcagcattgtaatagcaaaaaatggtaaacaacataattgttcatcagcaggtaaataaatgtactatagattatatatgcaatataaataggattctgtacaacagttaatatgaataaattggatttgaaaaataaatgtgataaatctcaaaaatatagtattgagtataaa

SEQ ID NO: 217878 - DNA, 334 bp, Homo sapiens
tgtagtgtcaccccagttaaagctggcttcttagaagatcccccttgttggttgacttctgcaatctctctcatgttccttcacactgtcttagtcttgcatggctgctggaatgaaggaccacaaatacagtggcttaaactcacatgcaatgaagagatacctgcactttcaggttcactgcagcctgagtcacacaataaccaagataggtcaacaacccctgtgtctgtcagcggatgagtgggtgaagaaaatatggtctgtacacaatggtgtactattcagcctgtaaaaacaataaagtcctgtcatttgcaacaatgtggatgca

SEQ ID NO: 217879 - DNA, 118 bp, Homo sapiens
acttaaattagtttgatctttctagagtgtgatctcccaaaatgcagcaaacctataaaaattctgattttgttttggttattttgctttggagaacaaactcatcgccaatatcgta

SEQ ID NO: 217880 - DNA, 572 bp, Homo sapiens
ggaggagctgggtattgttatttttaatgatgaaatgtctccatctagtggaacttcagagcagtaaaccttgtcactatattaaagtgaagattatgtctccaaagccattttccttaaacacatacagtgtttaaagaaaaaaataaacttccacatatgttcttagatgatatccttacaactgtatgtattccttttggaaggcatagaaatgagaccagtacaaactgttaacatttttaatgtcatgatttgaacctcaaagagaggggtgcttacaataggggagcagcacagtgcagatcccacccagttggtaacgatctagctcttaagttgggcagtgggttcacggggttcatatatactgtacctatattcttcagtatgtataaatatttcctaacaaagatctagacatgaactaaatttaagattatgaataaatctagacatgaactaaattttatgaataaagaactttctgaatatgagtactgtacttttgctggatttgtaatagggtaaaaaggagagattaggaaactaaattaaagcataaggtttta

SEQ ID NO: 217881 - DNA, 221 bp, Homo sapiens
cggcacgaggattttaccattcagtgttaaatcaacttttagtgtaaatttaaggcccatcttctaacataggggtacgtgtgattttactgtgtcccttctccctaacactccagttcaagatagcaacctaaattctgagttgattattctggacacactccctcaaaatgcgactgtaagacaccagaatacaccaccccagtatgccaatatatcaa

SEQ ID NO: 217882 - DNA, 476 bp, Homo sapiens
agaaattggtgttgtaactacttttgaagatagaatacttgttatattaatttggttttattattcttgccttttttttttttgtagaaaatcatggctttctttttcttattctttgagggacagggtctcactctattgcacaggctagagtgcagatcacagctcactgcagcattgaacgcctgaactcaagcagtccttccacctgaggttcctgaagcgcttgtgactttttatttcttcatcctttccttctctctctctccctccattctgtccttcttttattcacttgattcttttttttttttttttgacttttaagttcaggggtacatgtgcaggtttgttacataggtaaacttgtcatggagatgagttttagagattattttatcacccaggtattaagcctactaaccattagtgatttttcctgatcttctccctcctcccaccctccaccctctaat

SEQ ID NO: 217883 - DNA, 689 bp, Homo sapiens
catagagcataacttgaaaatttagtaaagaaaagatcagggaaatcagatgctgagctgttgttcaggtccccttggcaaactaaaaatatatgaatataaatgtgtcaagttcattagacactcaaagggctccctttgattctggtaatgccttaagggcagaaatcactgagagagaatcaggccagagacaagccttcagaagagtctttgctgaatgtgaaatgagttcttgtctcattcaggactggcattgaacacattactttttgaacccggctttaggaggaggcaggcttgggataaaatgtcagtttgacttcttgctagttatcggaaattgttgaagttacagaatgatgccgctcccccatctgctaagtagagatgatacttcttggggcagcaatgaagattaaagttgtgatgtaataggcttagcatggaatttgaaatccttctcaaaggggttgtgaagttctgatttatggtctttcttgctggtatgatctctttttgtgatacttcttcagtgaacatatatattcactcttccctgagaccaatgccactgtcctcaatcggacccttgacaagttttacaaacctcctgtgaatgtgatcaaaccctacctgtacttacaagccttcaaagactctcacttttctaaaaaagcatcttcctt

SEQ ID NO: 217884 - DNA, 324 bp, Homo sapiens
acagaatagcattcaaagctgatcaggtacaaataagaatgtaatggatgataaagacagagcccgtttagtggagaaaggaagaattatctactacatgaagctgggaaaataggctggctgttagggatcaaaaaaattttagcatcaccttacacaatttaccaaaattaattccatttagattgaaaagttaaatgtaaaaacaaagacagataaaaccctgaaagaattctaaggaatatgggtcaagtgcagtggctcacacctgtaatcccagcactttgggaggctgagacgggaggactgctagaggccaggagc

SEQ ID NO: 217885 - DNA, 1191 bp, Homo sapiens
ttcaggcagctctttgcacgatgcccggggagctggcacagcaggcagtggcaacgtttctgggagccattcctaccctggggtgctagcaattgcctaaccacacacagaagtgatcggaaaccacataaatgcacctcactaagcccaaactgcagggaccccctaactcctcttccactcagccccaccccccaaatacctgtgggcacaccagtgccacctgacctaaagtggagtgtgatggaggtaccggagtagaaggtctaacagatatatcattttatatgttttatcgaaacataacatcattgtgtgaacaatttctagggctcctccccttgcaaatgaggggccctgtggtagccactgagtgctaagaagcgagatgttcttcctaccaaccgtcggctttagactgggccacctcgtggctgcccaggttggagaagggttgtgaagcatggggtttgtagtcagaagatatgggttgatctgacaaaactgggctgtaaacactgtacagcatcagttactcttactggccaaatgagcacttgttaagtgcatctggcatttgagccattgctggtaccaagtgctccgctaaatgctggaacgactgagaaagagccaccactctgcctcgcatgcttctctgggacacacagacctgggggcctgagccctaggtgggaaagcactcagaggtaatttctccttctgggagggctgcacagcccccagcccagggcaatgaacaaacagggggagcccaggaaggggagtcctgtccagggcacagtcttcgagtccccaggacaccatcacctgccacggcacagaaccgcaggctgtgagagttgattccaggggtgtattttatagcttactgatgagctgtcctctcctgtctcaggatctgacctgtgccctggctggctcgaaggctccatcttttgggaggagactgaaaactgcttcagaaagatgccaagagaaagaacaagatcattttcaccttctgacatgaaaaacaggatgacgcagccaggtgccaggcttgcaggccaggctgtggtctggagacaggatctttccacttccgtctttcctcctccctcacctctttaagtccaggactgactctgcagggacctcctgtcttgcaccccctccatgcaagccccg

SEQ ID NO: 217886 - DNA, 535 bp, Homo sapiens
atgccgggagaatgtttaattgggtaattacccaggttcagttctctgaacttgcttaattccctggataacaaaaaaaaggaaagaggggtaacttaccagtcagatatctactcccttttttaatgttatatagacctggatgcttagcttgtttgtgcaaccctagtcaatttgcacagcttcgtttgtaccattttttttggaagaggcaaaataagttctgttctcaaaatagagtcaccacaggtggaaacataacacttgtaagtagttcctctggttttctatctattcagttacttttgtgctaaagagtagacgtttgagttaactataacttattgtatatttcaaaatcaagattggaattgaaatgttcctaacacaaatattaaatgcttgaggtgatgaatataccaattaccctgatttgatcattatgcattgtaagttatcaaaactttacatgtgccccataaatatgtacaactattgtgtatctataaaaattaaataaaaatatactgagcca

SEQ ID NO: 217887 - DNA, 224 bp, Homo sapiens
cgtcacgcaaacccaagaggcggagggccgctgacgtggaaccatcatcacccgaacccaagaggcggagggtcggtgatgtggaaccgtcacgcaaacccaagaggcggagggccgctgacgtggaaccatcatcacccgaacccaagaggcggaggttgagctgagaagaggccagtgcactcaagcctgagcaataagaataaaaccgagtagaacaaaat

SEQ ID NO: 217888 - DNA, 518 bp, Homo sapiens
atatttcaataatattaaatggtattattttctaccagtttttaatcagacttgaagcttttcaggcacattagagagtaaatggacttttgtgtgataaattgggtacctaatcaccaattttaatttacttctgaggaaaattctattgtaaattccagacaactggtttgcaaaccctgctttagaatgcaacctctttctaggatgaggcctttttctgtagcaaatttctgtataacgaaaataccagaataaatgctgggttttaatggacagttatgctctactacattcatgaaaaatgtacttaatttacaactctactgaacacaattcagttttttccttcgttcagttttttttcatttcagtttttctactctaacccagattgaaactttgcattatctttaacttctctgtctttatatttatttccttcatttagttattcattttttcaatcattcattcactcactcattcaataaatatttactgagcatctacttgtt

SEQ ID NO: 217889 - DNA, 480 bp, Homo sapiens
tctcgatctcctgacctcctgatccgcccacctcggcctcccaaagtgctgggtttacaggcgtgtgtcaccgtgcccggccgcctttgaacagttttcaaagcaatgttttgtacaagctcagagcaaacacttctgagctaggctagtctttccaggcacatagacataaccagctgtaaacgctaaaaataagatatggcacacatatatggtatggtgtgatgttttctttcacagaattcaacgggttttgatttgaacagttttctttttctttttttattttactttaagttctgggatacaggtgcagaacatgcaggtttgttacataagtatacttgtgccatgttggtttgttgcactcatcaactcatcatctaggttttaagtcttgcatgcattaggtatttgccctaatgctctccctcctcttgcccccaacccccctgacaggctctggtgtgtgatgttgca

SEQ ID NO: 217890 - DNA, 288 bp, Homo sapiens
gaatggaatgcaatggtacggagtagaatggaatggaacgaaatggaatggaatggaatggaatggaatggaattggatggaatgaacccgtgagcattggaatggaatggaatggaatggaatggtatggaatggaatgggttcaactcgaatggaatggaaaggaatggaatcaacaccgagtggaatggcatggaatggaatggaatggaatggaatggaatggaatggaatggaatggaatggaatggaatggaatggaatggcatagaatggaatggaatcaa

SEQ ID NO: 217891 - DNA, 157 bp, Homo sapiens
attattaagtatccatatgttatgtgtgggtttctgggttctcctctgttccattctattcctttttttttttgctatccctgcactaataccacgtttcagggggctagaaaataaacagcaaaataaacccaaagaaagaaggtaaagccagttt

SEQ ID NO: 217892 - DNA, 1129 bp, Homo sapiens
cggccgctgcgtccgagtggcgtgtgtgcggcaggtggggctggctgacaaacgtggacgttaattagagccattttaattagaaattatggacgaggtgctcctcgttaattttcaaataaaatttacagagggtttaaatcacttccctccgtgtctccccatttagcacggggattggcgtcgttaactccgtgtgtagaacagggcacgctaattcagtcatgcctgatttaaatatgtttagaacttccaactaacatgtaggagatgggaacatggaacgctgctagctgcaggcaggaggcaggagcctagccccggaaggcccagcccgtcctcgtgctgtctccggccggtgctcgtgctgaggctctcctcgggcagccacccgggagcagacaccgtgtctttcctttttaacatttcccacttggtttctacgtaatactgttttccttttgacgcagatgttctgtcttcagaaaatacttaggcgggtttgaatatgtgtgctgtgcatttggagtgcctctgagtggcttccgtctggggacagatgttccgtcttcagaaaatactcaacgctggtttgaatatgtgtgctgtgcgtttggagtgcctctgtgtggcttccgtctgggagcaggccgagggtgaatctcctggatcaatgtgcagcgtcatttggtagattgcgtgtccagccttgccgcgctgtagggtgggtgtgatcatccgtggctgcgtcattcgctgagctgataaaaatcctctggaaactttcacgttgcctgctgccaaattacatagctcaaatcaccaattactttgtattgtgtaattaacaaaatattaatttcctatcagccagtgagtcagaaacccatcttaagcttcgttctctttagtaccgtcagcgtggctctgtctttccttctgctagttaccgggttacttgtttccgtggctgaaagatacgggtttgtttttgttctcgccgatgttgagtctgatgtggcagccacatgggtttggccgtggatgcatcctccattgcccacagaaccagagtcgtccccccgactctgtggttttctttctctgtcggccgcctgcctgcctcctc

SEQ ID NO: 217893 - DNA, 744 bp, Homo sapiens
gaagtccttggagattttgctcccggcagctggagtgcaaggagctgcctggagatgaagtgattggcgggctcgcctagctcagatgttctgtcttcagaaaatacttaggcgggtttgaatatgtgtgctgtgcatttggagtgcctctgagtggcttccgtctggggacagatgttccgtcttcagaaaatactcaacgctggtttgaatatgtgtgctgtgcgtttggagtgcctctgtgtggcttccgtctgggagcaggccgagggtgaatctcctggatcaatgtgcagcgtcatttggtagattgcgtgtccagccttgccgcgctgtagggtgggtgtgatcatccgtggctgcgtcattcgctgagctgataaaaatcctctggaaactttcacgttgcctgctgccaaattacatagctcaaatcaccaattactttgtattgtgtaattaacaaaatattaatttcctatcagccagtgagtcagaaacccatcttaagcttcgttctctttagtaccgtcagcgtggctctgtctttccttctgctagttaccgggttacttgtttccgtggctgaaagatacgggtttgtttttgttctcgccgatgttgagtctgatgtggcagccacatgggtttggccgtggatgcatcctccattgcccacagaaccagagtcgtccccccgactctgtggttttctttctctgtcggccgcctgcctgcctcctc

SEQ ID NO: 217894 - DNA, 392 bp, Homo sapiens
cagggtgactcaggtggacccttggtctgtgacaaggatggactgtggtatcaggttggaatcgtgagctggggaatggactgcggtcaacccaatcggcctggtgtctacaccaacatcagtgtgtacttccactggatccggagggtgatgtcccacagtacacccaggccaaacccctcccagctgttgctgctccttgccctgctgtgggctccctgactcctgcagccattctgagtgcaccagaaactgtgaggctgcagtggggaccacagtattggctcacctcctctgggctgtgggcgcttcagggacagggttgggactgcctgctggatcagattccggccccttttgtctcgtttgctaataaatacgtgtgcatgttc

SEQ ID NO: 217895 - DNA, 373 bp, Homo sapiens
aaccctagcttcctcaccactgctccctaaaatcagacagcaacagggtctgtacaatatgcatttcagcatgaatttccatgttcactcccacagttcccaaatgagtccagccccaagcgataagctatgggccagatgggttctaggaggatgaacctagcagcagccacctcagtgataggaatcaggagactgggtactaaggttcagagtcagggtcaggcacagaaatggaaaatggttgtccaggatgagcaatttgcctctcacggtttctcaggccgtggtcctgacctgtatcttcccctaatctccccgtccctgggactcacccatgcataagaattacgttcaataaaaacaaatatat

SEQ ID NO: 217896 - DNA, 456 bp, Homo sapiens
gtcttaacgttaatgggcaggcctggacctactgtttagagctactgggttcaaatttcatctttttatggctggaccttgagcaagctacttaagtcctctgagctgcagtacctacatcttaaggttgtttggaggataataaagttaatatattataaaattctgacaccttgccacagggtagatggctcaagtgtgtatgtcatttcttctttatctgtctgactctgataagcctacaaagatcttcagggaaaggatgaaatcttattcatctgtacaacactacagttagcacacaacccagaacacagtgaatcctcaatccatgttgaatgactcaactattgggaaataaatgttgaagagtagaaagaaatggttcctttttcttcctactaatagggaagagagcctctctccaacccccaacctcaaaaaaaggaaaagaag

SEQ ID NO: 217897 - DNA, 573 bp, Homo sapiens
agaaaaacaatcaacaactccagggaaaacaaaagccaggcaggaaaagcagtcacacggtcctgcgtggttcagcagtgagcaaggtgtttatcatcaccacgtcaacagcagaggcagatccaacccccgagaaagccactctgacgggtatgagtggggagcgcaggtgtgcagcggggagggcagaccttatcgggtgacctgttctccctggtcaccaggtaaggtcagcagccctaaacccattccaaagtggccacttggtttggccttgagaagggcaagacagcgcctctgggaggtgggaggcattactcctgaggttactcatgccctgatagggtctgtctgtgtccccacccaaatctcatcttcaattgtagttcccataagccccacgtgtcgtgggaggaacccagtgggaagaaattagatggatgggagctgtctcccccatgcagttcttgtgatggtgagtgagtctgcatgagatctgttggttttacaagcacctggcatctcccctgcttgcgcttctccttcctgccgccttgtgaagaaggtgccttg

SEQ ID NO: 217898 - DNA, 557 bp, Homo sapiens
  misc_feature (495)..(495): n is a, c, g, or t
  misc_feature (502)..(502): n is a, c, g, or t
agaatatcagagttttgccagaaacccttgagtctggagtggtacggctggagtccagattgcagtctgtggaggagtggacaggagaccaagaaattctcgagttctcttcagagaccaactggggatcaacaattcaatttaattctgacacccaaggaagaagagagtgcacctgatgtagtagccactgtaagaactgtgttggagaatgatccgattggccagtgcaagagggattgcagagaagaagaaaccacaagcagaaaaaccagatgaggaaattaagctaaatattaactatctcaagaatattcccagaagtgactgctaaatttaaatccctgctcacaatgaaatactgtacagcaggggttctcaaactttttggtcttaggacccttacagccttaaaaattattgagaactccaaagaactttcaattatgtgggtcataactactgatacttactgtattataacttgaaactganaaaattnttaaatatttataaacatttaaaaataataaacccattgtaagctaatgtaaata

SEQ ID NO: 217899 - DNA, 1818 bp, Homo sapiens
  misc_feature (1816)..(1816): n is a, c, g, or t
ggaccgtgtcaaattcatggaacgtggcatcgtgctctgacaaggagagcaagaggtcaggatccacaaaacaggccggatgaaatcaccatctccgtgcggggaggtggagagagcagagccctccctgccagtctggcaactccagcaaagtcctcaggctcatcccacacactcggtgctagtcactgctgtgtgtttacatgagtaatggagctgccgggggaggggagttgtaagcagagcgctgagcctcgcagctcgcattcggagggaagctgacatccacaccaagtcgagacttccagggatgtggccggggagcagtcacatgctgtagctttcatgagcacaggcatcagtcaggcagatgtttgtcgactggaatggcgccaaatcttaaaggcagaccacgcaaaaagaaaccatgcccacaaagaagagattcattcagtggtgttaaggattccaacaacaattccgatggcaaagccgttgccaaggtgaaatgtgaggccaggtcagccttgaccaagccgaagaataaccataactgtaaaaaagtctcaaatgaagaaaaaccaaaggttgccattggtgaagagtgcagggcagatgaacaagccttcttggtggcactttataaatacatgaaagaaaggaaaacgccgatagaacgaataccctatttaggttttaaacagattaacctttggactatgtttcaagctgctcaaaaactgggaggatatgaaacaataacagcccgccgtcagtggaaacatatttatgatgaattaggcggtaatcctgggagcaccagcgctgccacttgtacccgcagacattatgaaagattaatcctaccatatgaaagatttattaaaggagaagaagataagcccctgcctccaatcaaacctcggaaacaggagaacagttcacaggaaaatgagaacaaaacaaaagtatctggaaccaaacgcatcaaacatgaaatacctaaaagcaagaaagaaaaagaaaatgccccaaagccccaggatgcagcagaggtttcatcagagcaagaaaaagaacaagagactttaataagccagaaaagcatccctgagcctctcccagcagcagacatgaagaaaaaaatagaagggtatcaggaattttcagcgaagcccctggcatccagagtagacccagagaaggacaacgaaacagaccaaggttccaacagtgagaaggtggcagaggaggcgggagagaaggggcccacacctccactcccaagtgctcctctggccccagaaaaagattcagccttggtccctggggccagcaaacagccactcacctctcctagtgccctggtggactcaaaacaagaatccaaactgtgctgttttacagagagccctgaaagtgaaccccaagaagcatccttccccagcttccccaccacacagccaccgctggcaaaccagaatgagacggaggatgacaaactgcccgccatggcagattacattgccaactgcaccgtgaaggtggaccagctgggcagtgacgacatccacaatgcgctcaagcagaccccaaaggtccttgtggtccagtcgtttgacatgttcaaagacaaagacctgactgggcccatgaacgagaaccatggacttaattacacgcccctgctctactctaggggcaacccaggcatcatgtccccactggccaagaaaaagcttttgtcccaagtgagtggggccagccccttaccacgctactcctacctatctccccttttatactaataatcttnta

SEQ ID NO: 217900 - DNA, 1937 bp, Homo sapiens
tgagttcaatcaattcagaacgtcgagatggagcccaactcactccagtgggtcggctcaccgtgtggcttgcacggaccttacattttctacaaggcttttcaattccaccttgaaggcaaaccaagaattttgtcccttggcgactttttctttgtaagatgtacgccaaaggatccgatttgcatagcggagctccagctgttgtgggaagagaggaccagccggcaacttttatccagctctaaactttatttcctcccagaagacactccccagggcagaaatagcgaccatggcgaggatgaagtcattgctgtttccgaaaaggtgattgtgaagcttgaagacctggtcaagtgggtacattctgatttctccaagtggagatgtggcttccacgctggaccagtgaaaactgaggccttgggaaggaatggacagaaggaagctctgctgaagtacaggcagtcaaccctaaacagtggactcaacttcaaagacgttctcaaggagaaggcagacctgggggaggacgaggaagaaacgaacgtgatagttctcagctacccccagtactgccggtaccgctcgatgctgaaacgcatccaggataagccatcttccattctaacggaccagtttgcattggccctgggggggcattgcagtggtcagcaggaaccctcagatcctgtactgtcgggacacctttgaccacccgactctcatagaaaacgagagtatatgcgatgagtttgcgccaaatcttaaaggcagaccacgcaaaaagaaaccatgcccacaaagaagagattcattcagtggtgttaaggattccaacaacaattccgatggcaaagccgttgccaaggtgaaatgtgaggccaggtcagccttgaccaagccgaagaataaccataactgtaaaaaagtctcaaatgaagaaaaaccaaaggttgccattggtgaagagtgcagggcagatgaacaagccttcttggtggcactttataaatacatgaaagaaaggaaaacgccgatagaacgaataccctatttaggttttaaacagattaacctttggactatgtttcaagctgctcaaaaactgggaggatatgaaacaataacagcccgccgtcagtggaaacatatttatgatgaattaggcggtaatcctgggagcaccagcgctgccacttgtacccgcagacattatgaaagactcctctcacatccttgtgatcagatgcaaccgctaactaccaaaatttgaagatcattgattttatttacaacagtgcctctctcaatgttcaatcaatcattctccaagaggaatcacccataatcctatgtgttgtggtggggagaaaaagctaggattaccgttctagatgtcttccttttaattggttctaccaaagaagggcagaggacatgcacatatatccaagaagagactgaagctctgggctaaaacttcatgattatggtggatttcattcattcttgctagtcacaggttgcatgaacagataaaacagagatgactggattggtgaaggaacactgttttcaagaagggtcaatgagttgagaatggtcaggactttgtgggcaaatatctagtctggaaatgcccttggaattttgtaaagccttccaaaccaaatcaggatgatgagagctcttcctactaggctgcgggttcttctgttctcattcttttcactccgataaagagaactgctctttttcctatttccctgccaccagctttgctttcctagaagatgaagaagtgagtgatctctatgcattatccactgatttatttttcatgcactgtggttcatgtttccagtaaacgttttcattttacaacaagaaaaatgtagccagttcctcagtaaaatgttacttgtatatta

SEQ ID NO: 217901 - DNA, 1957 bp, Homo sapiens
  misc_feature (1955)..(1955): n is a, c, g, or t
tgagttcaatcaattcagaacgtcgagatggagcccaactcactccagtgggtcggctcaccgtgtggcttgcacggaccttacattttctacaaggcttttcaattccaccttgaaggcaaaccaagaattttgtcccttggcgactttttctttgtaagatgtacgccaaaggatccgatttgcatagcggagctccagctgttgtgggaagagaggaccagccggcaacttttatccagctctaaactttatttcctcccagaagacactccccagggcagaaatagcgaccatggcgaggatgaagtcattgctgtttccgaaaaggtgattgtgaagcttgaagacctggtcaagtgggtacattctgatttctccaagtggagatgtggcttccacgctggaccagtgaaaactgaggccttgggaaggaatggacagaaggaagctctgctgaagtacaggcagtcaaccctaaacagtggactcaacttcaaagacgttctcaaggagaaggcagacctggcgccaaatcttaaaggcagaccacgcaaaaagaaaccatgcccacaaagaagagattcattcagtggtgttaaggattccaacaacaattccgatggcaaagccgttgccaaggtgaaatgtgaggccaggtcagccttgaccaagccgaagaataaccataactgtaaaaaagtctcaaatgaagaaaaaccaaaggttgccattggtgaagagtgcagggcagatgaacaagccttcttggtggcactttataaatacatgaaagaaaggaaaacgccgatagaacgaataccctatttaggttttaaacagattaacctttggactatgtttcaagctgctcaaaaactgggaggatatgaaacaataacagcccgccgtcagtggaaacatatttatgatgaattaggcggtaatcctgggagcaccagcgctgccacttgtacccgcagacattatgaaagattaatcctaccatatgaaagatttattaaaggagaagaagataagcccctgcctccaatcaaacctcggaaacaggagaacagttcacaggaaaatgagaacaaaacaaaagtatctggaaccaaacgcatcaaacatgaaatacctaaaagcaagaaagaaaaagaaaatgccccaaagccccaggatgcagcagaggtttcatcagagcaagaaaaagaacaagagactttaataagccagaaaagcatccctgagcctctcccagcagcagacatgaagaaaaaaatagaagggtatcaggaattttcagcgaagcccctggcatccagagtagacccagagaaggacaacgaaacagaccaaggttccaacagtgagaaggtggcagaggaggcgggagagaaggggcccacacctccactcccaagtgctcctctggccccagaaaaagattcagccttggtccctggggccagcaaacagccactcacctctcctagtgccctggtggactcaaaacaagaatccaaactgtgctgttttacagagagccctgaaagtgaaccccaagaagcatccttccccagcttccccaccacacagccaccgctggcaaaccagaatgagacggaggatgacaaactgcccgccatggcagattacattgccaactgcaccgtgaaggtggaccagctgggcagtgacgacatccacaatgcgctcaagcagaccccaaaggtccttgtggtccagtcgtttgacatgttcaaagacaaagacctgactgggcccatgaacgagaaccatggacttaattacacgcccctgctctactctaggggcaacccaggcatcatgtccccactggccaagaaaaagcttttgtcccaagtgagtggggccagccccttaccacgctactcctacctatctccccttttatactaataatcttnta

SEQ ID NO: 217902 - DNA, 1765 bp, Homo sapiens
  misc_feature (1763)..(1763): n is a, c, g, or t
ggaccgtgtcaaattcatggaacgtggcatcgtgctctgacaaggagagcaagaggtcaggatccacaaaacaggccggatgaaatcaccatctccgtgcggggaggtggagagagcagagccctccctgccagtctggcaactccagcaaagtcctcaggctcatcccacacactcggtgctagtcactgctgtgtgtttacatgagtaatggagctgccgggggaggggagttgtaagcagagcgctgagcctcgcagctcgcattcggagggaagctgacatccacaccaagtcgagacttccagggatgtggccggggagcagtcacatgctgtagctttcatgagcacaggcatcagtcaggcagatgtttgtcgactggaatggcgccaaatcttaaaggcagaccacgcaaaaagaaaccatgcccacaaagaagagattcattcagtggtgttaaggattccaacaacaattccgatggcaaagccgttgccaaggtgaaatgtgaggccaggtcagccttgaccaagccgaagaataaccataactgtaaaaaagtctcaaatgaagaaaaaccaaaggttgccattggtgaagagtgcagggcagatgaacaagccttcttggtggcactttataaatacatgaaagaaaggaaaacgccgatagaacgaataccctatttaggttttaaacagaataacagcccgccgtcagtggaaacatatttatgatgaattaggcggtaatcctgggagcaccagcgctgccacttgtacccgcagacattatgaaagattaatcctaccatatgaaagatttattaaaggagaagaagataagcccctgcctccaatcaaacctcggaaacaggagaacagttcacaggaaaatgagaacaaaacaaaagtatctggaaccaaacgcatcaaacatgaaatacctaaaagcaagaaagaaaaagaaaatgccccaaagccccaggatgcagcagaggtttcatcagagcaagaaaaagaacaagagactttaataagccagaaaagcatccctgagcctctcccagcagcagacatgaagaaaaaaatagaagggtatcaggaattttcagcgaagcccctggcatccagagtagacccagagaaggacaacgaaacagaccaaggttccaacagtgagaaggtggcagaggaggcgggagagaaggggcccacacctccactcccaagtgctcctctggccccagaaaaagattcagccttggtccctggggccagcaaacagccactcacctctcctagtgccctggtggactcaaaacaagaatccaaactgtgctgttttacagagagccctgaaagtgaaccccaagaagcatccttccccagcttccccaccacacagccaccgctggcaaaccagaatgagacggaggatgacaaactgcccgccatggcagattacattgccaactgcaccgtgaaggtggaccagctgggcagtgacgacatccacaatgcgctcaagcagaccccaaaggtccttgtggtccagtcgtttgacatgttcaaagacaaagacctgactgggcccatgaacgagaaccatggacttaattacacgcccctgctctactctaggggcaacccaggcatcatgtccccactggccaagaaaaagcttttgtcccaagtgagtggggccagccccttaccacgctactcctacctatctccccttttatactaataatcttnta

SEQ ID NO: 217903 - DNA, 438 bp, Homo sapiens
ctctcctagtgccctggtggactcaaaacaagaatccaaactgtgctgttttacagagagccctgaaagtgaaccccaagaagcatccttccccagcttccccaccacacagccaccgctggcaaaccagaatgagacggaggatgacaaactgcccgccatggcagattacattgccaactgcaccgtgaaggtggaccagctgggcagtgacgacatccacaatgcgctcaagcagaccccaaaggtccttgtggtccagtcgtttgacatgttcaaagacaaagacctgactgggcccatgaacgagaaccatggacttaattacacgcccctgctctactctaggggcaacccaggcatcatgtccccactggccaagaaaaagcttttgtcccaagtgagtggggccagcctctccagcagctacccttatgg

SEQ ID NO: 217904 - DNA, 709 bp, Homo sapiens
tgtggaaacacttctgtgctacacaaagtcttctaaacaaaacaaatagtccatgccctggctccaggctgcggaccgtgtcaaattcatggaacgtggcatcgtgctctgacaaggagagcaagaggtcaggatccacaaaacaggccggatgaaatcaccatctccgtgcggggaggtggagagagcagagccctccctgccagtctggcaactccagcaaagtcctcaggctcatcccacacactcggtgctagtcactgctgtgtgtttacatgagtaatggagctgccgggggaggggagttgtaagcagagcgctgagcctcgcagctcgcattcggagggaagctgacatccacaccaagtcgagacttccagggatgtggccggggagcagtcacatgctgtagctttcatgagcacaggcatcagtcaggcagatgtttgtcgactggaatgggtaatcgctactttctctttgcttgatttttgtttgtgagcttgtttacctttggtaattccaggctggctttctgggatggactttcagaccagcgtttaggggaatgagaggagagagcgggtgtgggaaggggatcctaagccctaaagcctctttttaaacttttgcctctctgattttaaaggcagttctgctttactgagcttccaccaacagtaaaactgttatccggaggagaaaatca

SEQ ID NO: 217905 - DNA, 672 bp, Homo sapiens
tgagttcaatcaattcagaacgtcgagatggagcccaactcactccagtgggtcggctcaccgtgtggcttgcacggaccttacattttctacaaggcttttcaattccaccttgaaggcaaaccaagaattttgtcccttggcgactttttctttgtaagatgtacgccaaaggatccgatttgcatagcggagctccagctgttgtgggaagagaggaccagccggcaacttttatccagctctaaactttatttcctcccagaagacactccccagggcagaaatagcgaccatggcgaggatgaagtcattgctgtttccgaaaaggtgattgtgaagcttgaagacctggtcaagtgggtacattctgatttctccaagtggagatgtggcttccacgctggaccagtgaaaactgaggccttgggaaggaatggacagaaggaagctctgctgaagtacaggcagtcaaccctaaacagtggactcaacttcaaagacgttctcaaggagaaggcagacctgggtaaatatgacttgtaattttaaatctaatgtgtgggcgtatatagtaacttttcggttgaagatttttctggaaacactatcatttatatataaatgtatttcaaatttctttaacctcaaagggtcctaagaatatggatg

SEQ ID NO: 217906 - DNA, 2189 bp, Homo sapiens
  misc_feature (2187)..(2187): n is a, c, g, or t
tgagttcaatcaattcagaacgtcgagatggagcccaactcactccagtgggtcggctcaccgtgtggcttgcacggaccttacattttctacaaggcttttcaattccaccttgaaggcaaaccaagaattttgtcccttggcgactttttctttgtaagatgtacgccaaaggatccgatttgcatagcggagctccagctgttgtgggaagagaggaccagccggcaacttttatccagctctaaactttatttcctcccagaagacactccccagggcagaaatagcgaccatggcgaggatgaagtcattgctgtttccgaaaaggtgattgtgaagcttgaagacctggtcaagtgggtacattctgatttctccaagtggagatgtggcttccacgctggaccagtgaaaactgaggccttgggaaggaatggacagaaggaagctctgctgaagtacaggcagtcaaccctaaacagtggactcaacttcaaagacgttctcaaggagaaggcagacctgggggaggacgaggaagaaacgaacgtgatagttctcagctacccccagtactgccggtaccgctcgatgctgaaacgcatccaggataagccatcttccattctaacggaccagtttgcattggccctgggggggcattgcagtggtcagcaggaaccctcagatcctgtactgtcgggacacctttgaccacccgactctcatagaaaacgagagtatatgcgatgagtttgcgccaaatcttaaaggcagaccacgcaaaaagaaaccatgcccacaaagaagagattcattcagtggtgttaaggattccaacaacaattccgatggcaaagccgttgccaaggtgaaatgtgaggccaggtcagccttgaccaagccgaagaataaccataactgtaaaaaagtctcaaatgaagaaaaaccaaaggttgccattggtgaagagtgcagggcagatgaacaagccttcttggtggcactttataaatacatgaaagaaaggaaaacgccgatagaacgaataccctatttaggttttaaacagattaacctttggactatgtttcaagctgctcaaaaactgggaggatatgaaacaataacagcccgccgtcagtggaaacatatttatgatgaattaggcggtaatcctgggagcaccagcgctgccacttgtacccgcagacattatgaaagattaatcctaccatatgaaagatttattaaaggagaagaagataagcccctgcctccaatcaaacctcggaaacaggagaacagttcacaggaaaatgagaacaaaacaaaagtatctggaaccaaacgcatcaaacatgaaatacctaaaagcaagaaagaaaaagaaaatgccccaaagccccaggatgcagcagaggtttcatcagagcaagaaaaagaacaagagactttaataagccagaaaagcatccctgagcctctcccagcagcagacatgaagaaaaaaatagaagggtatcaggaattttcagcgaagcccctggcatccagagtagacccagagaaggacaacgaaacagaccaaggttccaacagtgagaaggtggcagaggaggcgggagagaaggggcccacacctccactcccaagtgctcctctggccccagaaaaagattcagccttggtccctggggccagcaaacagccactcacctctcctagtgccctggtggactcaaaacaagaatccaaactgtgctgttttacagagagccctgaaagtgaaccccaagaagcatccttccccagcttccccaccacacagccaccgctggcaaaccagaatgagacggaggatgacaaactgcccgccatggcagattacattgccaactgcaccgtgaaggtggaccagctgggcagtgacgacatccacaatgcgctcaagcagaccccaaaggtccttgtggtccagtcgtttgacatgttcaaagacaaagacctgactgggcccatgaacgagaaccatggacttaattacacgcccctgctctactctaggggcaacccaggcatcatgtccccactggccaagaaaaagcttttgtcccaagtgagtggggccagccccttaccacgctactcctacctatctccccttttatactaataatcttnta

SEQ ID NO: 217907 - DNA, 1113 bp, Homo sapiens
tgagttcaatcaattcagaacgtcgagatggagcccaactcactccagtgggtcggctcaccgtgtggcttgcacggaccttacattttctacaaggcttttcaattccaccttgaaggcaaaccaagaattttgtcccttggcgactttttctttgtaagatgtacgccaaaggatccgatttgcatagcggagctccagctgttgtgggaagagaggaccagccggcaacttttatccagctctaaactttatttcctcccagaagacactccccagggcagaaatagcgaccatggcgaggatgaagtcattgctgtttccgaaaaggtgattgtgaagcttgaagacctggtcaagtgggtacattctgatttctccaagtggagatgtggcttccacgctggaccagtgaaaactgaggccttgggaaggaatggacagaaggaagctctgctgaagtacaggcagtcaaccctaaacagtggactcaacttcaaagacgttctcaaggagaaggcagacctgggggaggacgaggaagaaacgaacgtgatagttctcagctacccccagtactgccggtaccgctcgatgctgaaacgcatccaggataagccatcttccattctaacggaccagtttgcattggccctgggggggcattgcagtggtcagcaggaaccctcagatcctgtactgtcgggacacctttgaccacccgactctcatagaaaacgagagtatatgcgatgagtttggaggcagattaacttcccattgttcttactaagaagtacaaagttaccaaaccaatgaactgaagaaaatctagaaaagttttcacgggtagatattgattgagtttccactagagacgaatgatcatctgtattgttattcttttcgggttctgaaatggcttggaaagaacttttaaataaactgggcaatacagtaactgatcacataaaattatatttaatgagatgtgtcatctatcacagtgttttccacacagttcttatcttacatctttgtgattcatttgtgctttatttttattgcaacaaatctcacagtaaagaaacctctttatcttggccatagaat

SEQ ID NO: 217908 - DNA, 1172 bp, Homo sapiens
  misc_feature (1170)..(1170): n is a, c, g, or t
ttctgggtttccagaacagactgttctcttctgactgttgcatatgtattgaagcctggcactatgaatctcttatgatgtaagattgaatttcccattgccattttttcagataacagcccgccgtcagtggaaacatatttatgatgaattaggcggtaatcctgggagcaccagcgctgccacttgtacccgcagacattatgaaagattaatcctaccatatgaaagatttattaaaggagaagaagataagcccctgcctccaatcaaacctcggaaacaggagaacagttcacaggaaaatgagaacaaaacaaaagtatctggaaccaaacgcatcaaacatgaaatacctaaaagcaagaaagaaaaagaaaatgccccaaagccccaggatgcagcagaggtttcatcagagcaagaaaaagaacaagagactttaataagccagaaaagcatccctgagcctctcccagcagcagacatgaagaaaaaaatagaagggtatcaggaattttcagcgaagcccctggcatccagagtagacccagagaaggacaacgaaacagaccaaggttccaacagtgagaaggtggcagaggaggcgggagagaaggggcccacacctccactcccaagtgctcctctggccccagaaaaagattcagccttggtccctggggccagcaaacagccactcacctctcctagtgccctggtggactcaaaacaagaatccaaactgtgctgttttacagagagccctgaaagtgaaccccaagaagcatccttccccagcttccccaccacacagccaccgctggcaaaccagaatgagacggaggatgacaaactgcccgccatggcagattacattgccaactgcaccgtgaaggtggaccagctgggcagtgacgacatccacaatgcgctcaagcagaccccaaaggtccttgtggtccagtcgtttgacatgttcaaagacaaagacctgactgggcccatgaacgagaaccatggacttaattacacgcccctgctctactctaggggcaacccaggcatcatgtccccactggccaagaaaaagcttttgtcccaagtgagtggggccagccccttaccacgctactcctacctatctccccttttatactaataatcttnta

SEQ ID NO: 217909 - DNA, 319 bp, Homo sapiens
aaagagagggagagggagaccgtggaaagagagggagagggagaccgtggaaagaggggagagggaaagggagagggagagggagagggacttttgtgtggaatcgagaatacatatttttaaaaataagtagtgtgcatagtatactagaagatgaccatggaaagtgagagtagggtaagggaaatgaacagggagtgtgtaggagggatggtccaggtaagccatcagaggcaagacttcaagggaaagaggaagtgagccacgcagatgcctgggggaggtgctccagggagaggtcacagccaactccaaggcc

SEQ ID NO: 217910 - DNA, 353 bp, Homo sapiens
actgtaaacttagagtcatgagattatgagctgatttggtcaccttcctctgcctttgttcaccgtgagttctgatgtcttagtgacttagttcaaagaagcttacgtcttagtttgaaacaggttctccacggtggtccccaaaacattctctgcatatccataagaattgagcgctatgggtgttaacatgcagaaagatcagtttgcagcagcaagtacaaaaggagaataggaatatctgtcgaatgagtgtgttttgtacataacttcagatacttgtgaacatgccttatatttgtccaacaactgtcagaataaagaacattctaaaacgagcaaaaaaaaaaaaa

SEQ ID NO: 217911 - DNA, 413 bp, Homo sapiens
tcctctttctttttttagggcatatgtgattacgctgagtctacctggatcatccagcatactgttttctgaataaggacccttggattacattggatccacctggaaaatccaagatgacttcattgtaagattcttaattgcatttacaaagtgtttaccttataagaaactatatttacaaattctgggtgttagaacataagaatcttggaggggggacattgttctgcttactatactttcatatttgtaagaatttaaaccaaatatataatagaagaagcatgtccttaatcaggtatttgagtggtaaatttatagtatataccaagaaactgcctgcattagtctgttctcatgctgctgataaagacatacccaagcctgggtggtttataaaggaaagaggt

SEQ ID NO: 217912 - DNA, 251 bp, Homo sapiens
tcctctttctttttttagggcatatgtgattacgctgagtctacctggatcatccagcatactgttttctgaataaggacccttggattacattggatccacctggaaaatccaagatgacttcatttgacttcatggagagttcctgaataatcagttgacagaggaagaaaagacaaaggcctggtttacagatgattctgcatgatatgcagagacctaagagtgaacaatcagagaactacagtctc

SEQ ID NO: 217913 - DNA, 435 bp, Homo sapiens
aacttaacagagactacagaaattgtttaaaatccagatccatgagagatttttcatggaggactattttattattgacacagtttagaattactggtacataaaaattactggaaataaaaaacagacttttagtgggtttactgtagtttaaattctctacagataatgagaattactattgtccatacccaagatctactgttcttattgccccactcttggtatgccattcaaggtaaaatctgctctaagtactatctttgaagatgggcttgctgcattaagtattcttaacctacttaggagaaaactttacaattaatttttattgagagcctactgagtccatggtattgtatccacacagactgcatgcacatgaatgtcgctagttactaatcatatttatttgctaaagtcatctcaacagga

SEQ ID NO: 217914 - DNA, 292 bp, Homo sapiens
cttcaatccagccaccagaagccgcattgtttacttcatcctctctcgggtcaagtatcaagtgataaacaatgttagcaagtttgggatcaacagacttgtaaactctgggatctacaaggcagctttcccactccatgattgcaaattccgccgtcagtcagaggatcccagctgccctaatgaacggtaccttctgtacagagaatgggctcatcctcgaagcatatacaaaaagcagcccttggatcttatcaggaaatactatgagagaagattggatctacttgcg

SEQ ID NO: 217915 - DNA, 484 bp, Homo sapiens
agtgtcttcagtgactagtttctcattatatcatctggatgcatattagagacgttaactcattacatactgtggatgtcttggggcattacatcttcacgctctcagggaaccacagttgagaagaaatttctaaaagatatgccacgagcagatggaaagtctgacttttaagaaagaacgtggaatccaagaaggatgctgacatatgtgagagtgaatatggacaaacgttaactccatagaaatagagccaatgtctaacttgaggtagcatcagcataaaactctaagaccaggcaaaaacactgtgtaaagcgagagggatgtgatggccaaaaagtgatctaagatttctgtaattctcagatattaactttagactttgttgaatattcctagttaataaactaagcttaatgtttaaagaatatacatagagcttttaactttctaaaaaaattaggaggataaatagagtaag

SEQ ID NO: 217916 - DNA, 1077 bp, Homo sapiens
gtgggtcaaaaggtaaatcatacgcagttttgttagatattgccaaatttccatccaagagaattatatcactttgcatcttagtgtagtttaatttgcatttctcatattacaaatgagattgaacaatgttccatgtgtttaagggccatttttatatcatttttgtatgtattgtttgttcttgtctttccctattatacttggtttttttggccttttttcccttgcttaaaaattttttttaaattaccttactttttaagagttctttatatattaggattatgctgcagatattttctgccagtgtgtgtcagcagtcctttgattttgcttccgttatttttttgccatgcaaaaatttttattatgtaatcaaatttaatctgttattgcctctgggtattaagtcagagttagtactctctccctgaactgaggttaaagaggaattcacttctttttgcttgtatggtttcattttttacatttagttctctgatctatttgaagtgtattcttttgtatgctgtgaggtatggatttgatcagttttttctaaatggctaattgattgtcccacacttttattaaaaacctgtctttgccccagtgattcatgatgatgcttttattgtattttaaatttccatatatacttgggtatatttctggactttctattctgtttcactcatctggttgtctgttcatgtgccattttacattaaaaaaattttttttgttttaatttttatttagagacagagtctttctttgttgcccaggctggagtgagcgatcatggctcactgtaacactgaactcctgagctcaagcaatcctcctgcctcagcctcccaagtagttggaactttaggcgcctgtaccattattatgatactttaattatagaggctttatagtatgctttaatgtctggttgtggtactcagtccttatagtttttctctcagtattttcctagctataattatatgtttgttttttcatatcaacttgaatattaatgtctagctccattaaaaagtttgtttgcagttttattgggat

SEQ ID NO: 217917 - DNA, 517 bp, Homo sapiens
atctccgctcactgcaagctctgcctcccaggttcacgccattctcctgcctcagcctccccagtagctgggattacaggtgcccgccaccacgcctggctaattttttgtatttttagtagagacagggtttcaccatgttagccaggatggtcttgatctcctgacctcgtgatctacccgcctcagcctcccaaagtgctgggattacaggcatgagccaccgtgcccagcctgttcaaatcttttgtacattcttcttttgggtttctttctctaataaataaatttagttgtaaaagtcaatttttgttagatgtatatactgcaaatattttctccactctgtgggctgcttttgcactcttttacttgtgtcttttgacaaatattaagattgtaataaaagcttggtcaaaagaggatcccttaaaaattgtatttatgtgtattccattctaccctatccatttctgtttcttttttttatttttattttttcagacggagtcttgct

SEQ ID NO: 217918 - DNA, 386 bp, Homo sapiens
accacacccagctaatattattttttgtatattatgtacagatagaccatgttgcctaagctggtctcgaactcctgggctcaagtgatcctcccacctcagcttcctgagtagctgagactgcagatgtgctacggattggctgggcagctcttcttacctggactcattcgtgtgttttccttcacttaggttcatctggtgtgtctatcccatccctctgcctcatcgctcacttaacaatagcagcctcctcatgacaacatgccctagtatgaaagctcttaccagacctcagcttgcatcctgtttgcttatgtttctttggccaaaacaagtcatatggtcaagcccaaagtcagtgggggaggtgattacacaaggac

SEQ ID NO: 217919 - DNA, 498 bp, Homo sapiens
cagacatggctccatgcgggcaggacccctcgctggggactctgtctttccttctccccagcccagactcgtcctcccgcctccaggcggtcttgggaagctctgaaagccttgaggttcaccacctgccctggcttccccacctagagtcctcaggccaggtcaggggcacttttcaaaggggccacaggggtgggctgggggccttagggtttggggtgcccctggacctcctgccttgcttctggtctggtgtcatcatcagataggaggcacagccaggaggcagagcagtgcagccctaggacagccccaggaactgggctttggggtcggtgactgttggtgtgattcccttctcagctacggggctctctgagcctcagtgtccccatgggtagaacggcgacagtcacggtcccagagcttccagcccaggtcctggcaccaagtgatgcccagtgtgtgtggcgtgtcttctgcgcatggctctgacca

SEQ ID NO: 217920 - DNA, 353 bp, Homo sapiens
atggagtttcacttttgttgcccaggctggagtgcaatggtacattcttggctcactgcaacctctgcctcctggattcaagagattcttctgcctcaacctcccgaggagctgggactacaggtgcccgccaccacgcctagctaatttttgtatttttggtagagacagggtttcattcaccctattggccagggttttttggagagagatctggtctcgaactcctgacctcaggtgatccacctgccttggcctcccaaagtgctgggattacaggtgtgagccaccatgcccatgccacccttttttattaataaattaaaaacaaaggcttacaataaaattttact

SEQ ID NO: 217921 - DNA, 677 bp, Homo sapiens
cattttacagatgaggaaaataaagcttggtagttaagtaacttgtccaaggtaacacagccagtaagtgccacatttacaactcaattctaggtctttttgtctctgtctctgaattacgttagactctaatttttatccttacattagtctgttggggtcatcaatgattcttaatactagaaggttgtctctaatcttaatgaggactctgcaatcatcctttcctttaataactattcatccaagtggcttgtctatcgttgttgtaaaataagtacgtttaattttttacagaagaaatgtagtgggcttaatcatgtgctggccatgtgtgtctgtggatgcagcatttaggaatatgggtcccagagtacagggctccatctttaagctctggaggttggaagctctaggaaaactaaggtgggttaaatgtgttcccaaaactgtgatcacattttatgtttatgcttttctctccctttctcgagtcatggtaggttactatttgagtgccatgccctagaactccctaaagtaaaggcactggtatcccaaaagaactgttctaaaagattacttacttctgtgaaggcagagagggtgctacagaatgaaaatagcattttaggaaggttgagtcagaggtgcgagtggggcatagagagattttc

SEQ ID NO: 217922 - DNA, 418 bp, Homo sapiens
tacaaaaaggaccaactgtagagccagtagttacaaagattctctgaagcaagtgctatggaagagctcagggatttttctttctttttttttccatttgtattgtaaaaatatctatagtttttcacacatacaatgatgccaatttcagtttttagcgaatgaaggagacacagaaggagaaatttgtatctcatatctgaaatagtttaaacttaccttgattttttttatcctggctaatgaaattttgttcattctttactgaagattataaaatgatttgtgggccagttgtattagattgaattagaagggttaagtaggaaatgatgataaccaccttttattatattccaaagcattgtgcagaatactttgcccgcaattaaatgaatatttaatgtaatacttagtc

SEQ ID NO: 217923 - DNA, 448 bp, Homo sapiens
tgaatatagcatttggaatttaattgattgttgtaaactcacttcaagtatatcttctgtttctttgagttatgtcatgccagtccctacagagtctgttaaccttacttggtatcattgtttcactttgcttattataatttaacccaaacttccccaaattttccacaattatattattaatagaaattacagaatacatcaggatcaaggcatataaggattaaggggagaggagtaaaaaaagaaatgcgcaggggcagaattaaggaatttagattttcacctatgagcaatgtggagtctctgaagaattttaagtaagctgagttctaatttcactttttattgtgatcagctgaacttacataggcaggcagtatttatctaaggggatttgcatcagtccctttggtgttttagtgagtatatgtttttttgtgtggca

SEQ ID NO: 217924 - DNA, 341 bp, Homo sapiens
tctcacagttgatgacatcatagatttttctgaaaatgagaaagaagttttggaagtgtcagcaatattcaaaacaggagagtgaggagaagcaatgataaaaaaaaaaaagtatcaaaatttttctatttgaaaaaagccagacatttcaaactctcagactctttgaagtagaaaatataaaagacaaaaagactcacatttggatatgttttggcaaatttaaaaaatttcagtgattaagagaaatcacataagtatccaaagagaaaatgaaacacacaaaaaaggcaggaatcagattttcatcagagattttatctcctctcctttccttttgc

SEQ ID NO: 217925 - DNA, 1222 bp, Homo sapiens
  misc_feature (995)..(995): n is a, c, g, or t
  misc_feature (997)..(997): n is a, c, g, or t
taatttaaaaattttttttgtagaggtgggatcttgctacattgccagggctggtcttgaactcctgggcttaaggaattctcctgcctcagcctcccaaagtgctgggattacaggcatgagctgctgtgcccaggctagaatggtttctgtaaactttatcttttactttttttgttttgttttgtttttttaagacagggtctcactatgttacccaggctggagtgcagtggctattcacaggtgtgaccatagctcactggagcctcaaactcctggactcaagcaaccctcccgagcagccagggctataggcacgtgccaccaagcctgcctacacttgtggattttataaagtactctctacatttctttccctagaaaaaaatattaccaccctttagattctaattctaaagtgctacatctaatacctctaacataagtaaagtctcattttaaagcatgtccaatgaataaatttgcttctactgcctttgcatatgctaagattttgatggaggaccatttttccagtgagctcacagatagtaccctgtgccctatgtcagcttagggcagcagttagaggcctttacccagaaaagaaaaagcctagcttgcttctaaggctacatacatccagatctgttccaccaaaatcaaatctgtggcaaggaggtccatggctacagattcttctgctatgaggcacccagggaaatagtccagaggtctgaattgcaaacaaaataattttaactaatataaaaaagaccatctgttcagtaactaattcccttgaggacatgatatggaagtcaactatccagcttccacctttaccatgggtttaaagtggcaaggaaaaccggcccactttgtgcccagggctcacggcgggaatctacaccttttggtaattgggcctctgccaggagttggacccaactggggacaacagggaaaaccctttttttacaaaaacaccnanacctcccaagaacacctttctctctttcataaccccaaaatatccctccggaacgggggcgccctataaccccagtccttgcgcaccctcgggggggaggcacattcttggcgctacggcctctctcctgggcaacataggtgtgcccaacaacagactacacacgcgggccgctctcctacctctctttgctgctcactcatatatgcgcgcctcatgtcgcct

SEQ ID NO: 217926 - DNA, 240 bp, Homo sapiens
ttccaaatggctggcaacctacctacctgcctggacatgtgaagaattgctaacattccccttaagatgtttctgctgacctggggcaggcataaaaacacatggtatggtgtgctgggcagagctagagccttgcacacctgcgtgggcttccaatgcagcactttttttttttttttttttgagacagggtcttgctttgttgcctaggctggagtgcagtgacttgatctgagctca

SEQ ID NO: 217927 - DNA, 1080 bp, Homo sapiens
tgtgctcacctctgagcaagaatttggtgggctagttggtttaagggaatggcccactgagtttctgtctgcctgcacttcaaaactgtttaagtctttaggatcatatctagaatatttgcactgaaattcagaaagggcaatttgccatttttatatttgcaaaataatcaccaaaggaaagagtactttttctcattaccacagatcctctgaaaaaaatgcagaaatttaattttaaaattctaattatttaaaatgtataagcaaaagtttgtactctgagcttgcaagcagaggcatttattaaaatttcttttttacttatttccttttgaatgtttttaaatgatatgaaaaagcttaagaatgtggagctatgtaaaataaaaaggaagtaaccccaccaagcacctctcaggaaaccctgtttcctgcccttccctccacccactcttatggtaagctttgataatagctcagtgtgtatcctcccaggcctgtttctggacatagcaacatttctctacatatatttgttttcaataagatgtcccacatagttggtagtgagggagtgttattgttgccgttgtttttatttttttttaattttggcaaagcacacaccacctttgggatgttgctattgtttttaaatgaaatcctagtacagatattctgcaacttgcattttttactcatcaatatattttagatagccttccacattgggacatccaggtcaacctcaaatcttttaacagctgtaagacattccaagtttttttcattttcaacggatcatatacgtaactcttgttctagaaagaaaggaatctggcaacttttgaggggatcttggggattttttttttcttaagaaaataattccatcttagaaatcgctaaactctatcttgttctattgtgttttggtaacaagggtcacaaatataagatgtcatcataaatattgggaagcagtcacagtccactttatcttgttgctctgaaaatgggatttgtgaatttactaaacattcttctggttataaaaataatacatatccactgtca

SEQ ID NO: 217928 - DNA, 427 bp, Homo sapiens
tactccatcctgggcgacaaaaggagacctatctcaaaaaataaggaagggggaagggatgaagagagggagaaagggaagtttggaagaaaaggaaagaaaaaaatgtggaaaaaatcgatccaacaaaaaggtattaagactcataaagactgtcttatgtagcagtgaacatttgtcttatgatttgttaatggagagtccaccaatctttcaaatacgacatagagacaatgtcatttctaagttgaaagtggagttgagacaacagagtgattaaaatgattagtactaaaagtatatacttgtatttattttaatttacctagaataatatgtcaagaatcatatactcgaagatgaaaattacagcttttctgaggatggtagcacaaagagtaaaaatgcttctccacactgtagtttg

SEQ ID NO: 217929 - DNA, 588 bp, Homo sapiens
aatcctggttctgtcatttatcaactttgtgacattgaaaaatttacttggtcttgctgagccttagccgcagagttagtgctgagggtgctgtactatggccggcaaaattttatggaagacagcagagcccagcaataaatcaactgatttcaatcattcattcaaccacatttgctgaatgtctaccatgtaccagttaggtgctggcaatacagtgatgaatacaagaacgtggtccctgatttgttaatctaattaacaaattttataatctaattaacagcagttctcccatatctgtggttttgttttccatggcttcagttgtctatggttaatttggtccaaaatattaaatggaaattccagaaataaacaattcataagttttaaattgtgctctgttttgagtagcgtgatgagatttcactttgtcccactatgtcttgcctgggatgcgaatcttccctttgttcagcgtctccacactgttgacacttgctgcccatgagtcacttaatatccatcttggtggtgggatcaccgtgcttgtgttcaaggaacaccgattttattttaccagtg

SEQ ID NO: 217930 - DNA, 360 bp, Homo sapiens
gggcggggtgtggacccccatgctctgcttgtttcaataggcatcacgtccccagggacagccacccagagctgaggtggaggctgagggggtggtcagggtcttcctgctgtctctgaagaccccctggggacacgtgcttgtcctcctctgccctatgtccccttgtcgctcttccctcctctgttgtcccaggtcgtgcccatgtgtgcgatcatgtgcccttcaacagactatgccctgggcatgatgaggggtgggactgggggagcacgaggcaggtcctggctttaaggaggcattgggatgtggtccccaccctgatcagggccccacatccactggttcacccttcctcct

SEQ ID NO: 217931 - DNA, 434 bp, Homo sapiens
caaggtccttgacctcatgcagtcttatagggagatttataagcaattgactaattactaaaaaaaatgataaatgcaatattagtggaagcaaagttactgtgagagcaaaagagaactgcctaggccagtgcagagcaagggaagtacaaaaatttcctagagaaagtcacgtgttagttgaaatccataaggataaattagagttgcccagagagagttccacaagattagagtccatctctaatttactttcctatcccttagcaaccagctcgacatatgacatcacaggtattcaataaatctttgcataatgagtaaaagtatttttacagcaatagcactgcctttgagaaaattactattatggcataaaggatcatgggacagctgtctttagtgaatacacacatacacacctgcaaacacac

SEQ ID NO: 217932 - DNA, 366 bp, Homo sapiens
gctcagggagaactgtggctcctggaaccaattccccatggatgctcagggaggactgtgttgcacagtggtcttgcaacgcctgtaaggtcatagtcatactgtccctcttctcagctgtaaatgggctggtaaaagaatctgtctcattaatgtgttgaaaattcagtgagataacacaaagcacttggttctctttctttacgtaagaattgcttattaaaactggagtcgtaaatgttataatacttaaacctgtctgttgccccttaaatgtagaagcttctagacaatagaaactaagtcataagtgatttttgtagtcatcagatgtgtgcttttaaccattgaaattatatgtaacag

SEQ ID NO: 217933 - DNA, 488 bp, Homo sapiens
ttgagctccgtggagataggccccctctcctggcttctctgcttgagccacataaaatgccacttcacagctcttccctttgaagcctgatccagtatgcatttggagctaattactgcagttgacacaactccatctaaaagcgtcatgaaagattctgtaatcactgataagaaaatgatcttgcaaattattgctgtgtcctcctttattgcctctttaccttaacagtacagtttacaataatgtaaatttttttctaatctttcaactttaaccctagaaattgtagatgttttagcagtggttatgtgatattggcacaacataactatataatttgctcaatattgtggtgcatacctgtaatcccagctgctcaggagtctgaggcatgagaatcacatgaacccaggagatggaggttgcggtgagctgagagcgagtcactgaactccagccaggacgacagagtgaaaccctgtctc

SEQ ID NO: 217934 - DNA, 462 bp, Homo sapiens
aaatgctacatgttgagcatcccaagttcagaaatcgaaaatacaaaatgcttcaaaatcaagaactttttaagcatcaacgtgatgctctaaagaaatactcagtgaagcgtttcagattttagatctggggtgctgaactgttaagtgtaatgcagatattcccaaatctgagaaaaatccaaaatccaaaacccttctggtcccaagcattttgggtacagcatactcaaactgtattaggtatttcttttggcctagggggcattgtgaaaaattactgagataccaagggagccacaaactaagaaagtttgaacatctctgctttagaagcttgagctaactaaggatttcaccaaaaggaggaagcacctcttacctttttttgtgctgaaaagtttgagtttgcaattttaaatctgatccaaaattgtcctaatacagttgttcaacattaaa

SEQ ID NO: 217935 - DNA, 544 bp, Homo sapiens
cgcggtggttcactcctgtaatcccagcactttgggaggccgaggcaggtggatcacgaggtcaagaaatgaagaccatcctggccaacatgctgaaaccccgtctatattaaaaatacaaaaattagctgggcgtggtggcttgtgcctgtagtcctagctactcaggaggctgaagcaggagaatcgcctcaacccaggaggtagaggttgcagtgatcccaaggtcgcactccagcctgggaagcgacagacatcgtcccaaaaaaaaaaaaaaaaaactttaagcacaaactttttaaaagctgctgaaaggaaaagaaattttgaggtggatacatatagtataactcgattcctgtctttattttttaccccccgatctgacaaacatgaaagctctccacaacttctctccattatttatacatttatacattcatccagacatccaatatttactgagcacttaaaatacattaggcactgcacctatcctgacactggggattcagcaacagacctgacaataaacgtgataatt

SEQ ID NO: 217936 - DNA, 331 bp, Homo sapiens
cccgggccggtccacctaagtctccgggagctgagccacatcttgcagctcctcagatttgggtggcgggcaggagttggcaccaggtctcccagatccccaaggaaagcacccaggtgctttcatttcagagacctgggttcctagggccacctgggcgaagccttaggcggcagggacaggggcagtcccaggtgtgtctttggcgatgtctggacagctctgtccattagagatgctaaaggacatccctaaagggatgagcatattctgccttcagttccctcccctgctgctcctgtcttttaaccgcgtctgctatccctctttc

SEQ ID NO: 217937 - DNA, 497 bp, Homo sapiens
gagttcattttctaagacaagaaaataaagtcagtatgtattatttgtagatattcctaattattatatgaagtgcacttttatcctgtatcagtcattcatactcaaaagttttaaagtcgacttctctcttcttttaatgagtgactcctaaaaagaatttcttttgtattcccattgcaacttttttagatcaggaccttctgctgactttaaagagtatccgagtaaccttgtttcccacccttagatgttacaaagataaattgctttatttttttaaacttcaaagctaaaggatttatccttaactcctccttattctctcccttaaaagctgaaagagaagtttgtatgggagaaaaatcaaagggtaaggataatctatagtccctaactaatgaatggtctttagggcagcactgtccaatagaagtataatgtgagcagtaattgtgaatcacatctgtaattttaaatttcttaggagccacatt

SEQ ID NO: 217938 - DNA, 602 bp, Homo sapiens
agactccgtctcaaaaaaaaaaaaaaaagataatggaagatgcttatattccatttggggtgggaaaaattacaagcagtgtgggcaaaaaatatacattcatggaaaagtatctgaatgataaacatgagagtgaaagaataaagtcaaatatgtgagttgtttcattaaataataaactaaattattccttcctctagatcaggggtgtccaatcttttggcttccctgagcctcactggaagaagaagagttgtcttgggccacacataaaatacaccaacactaacaatagctgatgagctaaaacaaaaaaaattgcaaaaaagatctcataaaagaaagtctacaaatttgtgttcggctgcattcagagccgtcctgggctgcatgctgcccgtgggctgtggactggacaagcttgctgtagatcctctgagattgggttaagtaaaaaaaaaaaaaacccaggtttatgctgaatataagaaatatacataaaataatatgaaaaagaaaggttgaaaatgaagtgacatttaaagaggctgggcgctgtgtctcacatctgcagtctgaacactttgggaggcctaaaatta

SEQ ID NO: 217939 - DNA, 201 bp, Homo sapiens
gaaaagataacacatcatggaagaaaacatgggctgctaaattcagttagaatacatgccaaatagggcatgttgatccaacagcttctctgcatatttgggatgagtagctgttgatagggcatttcagacctcagtcttacagcatttatcatatgtatctccagcttgcacctctctccttggcaatggccttcactg

SEQ ID NO: 217940 - DNA, 602 bp, Homo sapiens
agcatccagcatgtattctattaccactcagtgaccaaggttttatcccacttgcatatctaaaccaataactgcaaagggagaaggaattgtataactggcttagaaaaatagtcattcaatccctgggatgctcaataatgaccaaaatgaaggttctgcttaccgataagaaggggtatggttgtggggtaggcagccagcactgtctgccccaggagagctccagaggagagtgtaagacaaaagccaaattctttgccatcctttatgagtcctgtgttccttctctgtagctttatctgctgctttctgaataggccaagcacttaagttgatcttatctttgaaatttcagtcccttcatcctttattgaatttttcacctctttcttcttatttttatctttcaaagcctagttcaaaggcagcctcatctacttccccataatggggtgcatccctcctttttctagcctgctatggtttggaacttctctatttggcacttttgctttcctgctttatatcagtcatatcataagtctctcaccacagtggagtgaaagctccttgaaaacagaaatggtgtcacattattc

SEQ ID NO: 217941 - DNA, 445 bp, Homo sapiens
acatacacaaatgaataaatgtgattcaccacatacacaattaaaaacaaaatgctgggattacaggcgtgagcccccgcgcctggcctactcaattgttagaagctgcaaatagcttaagtttccttgactctgaaaaagaaaacaaaggatcagcaacattttaagcgaagttaaaaagattacttcagtttagtccacgcagttaactccagttctgcttgctattcatgaatattttggctttccatgagtcctgaaagttttttcctctattctaatgtcacaacttccaaagctgtcggaaacctgcatttaagtgcacctgtcaaagtcctatggttgattataaaaccaccttttaaagaggaccaaaacaagacaattgtctgtggatgacaaaagtcttaggccagccactattaaagtcaaaattgataatgaa

SEQ ID NO: 217942 - DNA, 240 bp, Homo sapiens
tcctgtattagactaattgggttggctttgatatttaattgctaaaaacacacttagaatacaaaccttactgtgtcaaggtctcaaagaagaaataattggtatggtataaagtattgaattgtatgctacaaacttctaagctaaaatattttcaatgtatgcaaggataggtggcatacatattatatattattcccccattaagcaaatttataatgagagaaagctatcttccat

SEQ ID NO: 217943 - DNA, 434 bp, Homo sapiens
ccttattgccatgaagtttacgtaggctatattttgtttattgtaacggaattcagactttgtactatgtttatgtatactatattttgtttattgtaagggaatttagactttgtattattttgttcattgtaaaggaattctcaaaactttgctggttttgagaaatggcctaatattaggagtgtcaagaggatatgttttaataagtaatatgtaaattctgggttcttgtcttacctcagttagtgaaacatagtttaatctatgaaacagtacaatatctttgcctcagttacattcttaggaacattaaaagtattatgcattgtacattttttgagcataaggggagaggatgtcattataaaaagccatctcactgttacactcttattaccaaagagtaaaatataaccttcctgaaagtagaa

SEQ ID NO: 217944 - DNA, 247 bp, Homo sapiens
aggcagaggttgcagtgagccgagattgtgccattgcactccagcctggacaacaaaagcaaaactctgtctcgaaagaaagaaagaaaattcttgaaaacaaaatgtgaagaagtgaaaagttaaaacttttttcttatagtaattactaagtgatgtcaacctcaagccctaaatttatgttcacaagtccagtttaggctgatctgctttccccagtgcaatgtaagttccatgagggcagggg

SEQ ID NO: 217945 - DNA, 255 bp, Homo sapiens
agaaattcaggtgtagtcctagaagtcagtgagaagaaaaatataggatgttctgcaagttgtaatgatgtgtggtttaaaggcctttgagagtcctaagaaggaggcatagaggaaacagcccagcatttgaagcagacaaactgggcttcagagcctagctcagccactttagtacctgtgaggctttgggaaagttacctaacatttctgatattctgttttctcatccaaaaaattgagttgttaagaatg

SEQ ID NO: 217946 - DNA, 548 bp, Homo sapiens
accttgaaatgagatagaaagtcatttggagggacaactgaatgacacacttctgttcacaggtaaccaggaccacaaggaaccacaacagggaggattacaggattgtgttatcacctggaaaatcttgagataggaaagtacattttccaggttccttcttcctctggcttccagacaggttcagccaatggaaaacactggtggaaaattgaagtacaggaggaaacaagaagcttttgtttctgaccattaattctccgtatcaaagctccctctggtgaaacatcttgagtggtttatgctttccttcctggaccttgaatgaaactatatgtatatatatatttcattataaactacttcaaactgttctgaaagtaggtaggagttttttaaattaaaagatattgaaattgtacttgaaattttgtcacaattatctctttaaaaagtcagttattaattttataaaatgtaaaaacaaagctttttccttatataagtgaaaaagtactttaatataagatggtgttattatttacatg

SEQ ID NO: 217947 - DNA, 394 bp, Homo sapiens
gactgagtatattcttggtttccagatcccagcctggagcaaatactgtggttaagttacaggaaagggcaattgagaaaatgacagctgcctttcattgtattaagttgattcattcaacaaatatttgttgagcaaatactatgtataaaacagggcatgaagagtcatataaaacagaaaaatatgacttagttcgtgtcctcaaagaagttaaaatctggggaggcagaaagcagcattccaaagaactaaatgtgctcatcagcatttgagggctggatatggtggctcaagcctgtgaccccagcactttgggaggccaaaatggtaagatctcttgaccccagtagtttgagagcagcctgggcaacatagcgagaccaaaaaaaaa

SEQ ID NO: 217948 - DNA, 689 bp, Homo sapiens
tggcttacacttgtagtcccagtatttcgagagactgaagcaggagtttgaggtcaggagtccaagaccagcctgggtaacatagtgagaccccatttctacaaaaaaatgaaaataaaaaattacctgggcatgaggatacatgcctgtagacccagctacttgggaggctggggcaggagaattgctgaagcccaggaggttgaggctacaatgagccataatcatgttattgcactccagcttgggtgacagagccagaacctgtctcatttaaaaaaaaaaaaaaaaaaaaagttggggagggtttgtggtccctgtgggttcatggaaagcccatggatttcaggaaatccatgggtctccctgaaattgaatgtaaaatgtggtgttttgtgtaattttctagaaaaagaggcctagtctgggtatggtggctcatgcctttaatcctagcactttgagaggctgaggtatgaggatcacttgaggccaggggttcaagactagccttggcaacaaatcgagactccatctctacaaaaaaaattaaaaaaataaggctaggcttggtggctcatacctgtaatcccagcactttgacaggatgaggcagctggatcacttgagcccaggtgtttaagacaatgctgggcaatatgacaaaaccctgtctataaaaaaaaaaa

SEQ ID NO: 217949 - DNA, 204 bp, Homo sapiens
ggtctaataggacaagcagtcgcaaaagatttcaaccatacacagggtggacaatcggaactcaaatgattgagaggtgatggagttgcaaagtactgcataatgtcttgtaaattatgcctgtcaacaattctgaatagtcttacattattattgtcttcttaccataacaattaaattttttctataaacagtaaatgatgt

SEQ ID NO: 217950 - DNA, 389 bp, Homo sapiens
taagcttcttttccaggcacgtctgcagagcatgacaggtgccagcgagaagccatctgcaggtgccacatgacactggtggagacatgcacaccttctacccggaggcctcgaggcaaactctagacgctggaggagaaggtggctggccctgaggccaagctagggctggagggtgagcggcctcaggcctgggctcactgactcactgtccagcagtcagaggcaaaacctcacaccaagccacggggccacatgaacccacagcagactagcttcttttttttttttttttttttttttttttgtttggcccccccccggaccggggggggcccctctaaggtgccgcctcgtggcgtttccactttttggccctgggcgcggcg

SEQ ID NO: 217951 - DNA, 295 bp, Homo sapiens
gcctaattgtaatgcatttaaatgctaagtatccataacaaggtgaacaaggttgtatattacgtgaatgtttgttcaataagcatgcatcaggaccccttcacaaatattcataaatcctcctataacttgttgaatatgtattttaggcccacccattcaacttaaattcctgtcttgcccctccctccctcaaagtgcctgcttctgggcttcccgcgattcccagcctgtcaggatgaccaccttacatgctgtaaccctttagaagaaataaattctcctctgtaagctc

SEQ ID NO: 217952 - DNA, 480 bp, Homo sapiens
gagagaaagaaaaaaggcacatgctgtttgaaaaatgtgtttgaaaaaaattacttgtgtgtggaagggggatgatgattgtttgaatattaagctgttgaattctaattcgatataagagagagccactacaggattgtaagctgctgtcagatcctgtgtgccacatattgtagttatttgtgcccatttccaatgtccttattaaattgtaagctctttaaggtcaggggctgggttttgtagattgcactgaaaaaaatacaggaagtagaaggactggcaaaggaccagtctcattaattctggtggtgatgaaagggcacttttctacaacactttaactgatgagctacgctgttgctgagaataaagactgttataagtgttacttaaagtagctacttaacatttacaaactttcggttttgaaaataaattagactttgggagtcatgtttccctggcaaaactcgagtt

SEQ ID NO: 217953 - DNA, 512 bp, Homo sapiens
agcacagctgagaccaggctgtgattatttcaaaacagactttattaaaaacttagtataatagggaattgcagaacaaatatgtatgtatttatatatgtattatgtgtggctgatctaggagaaataggcagcatctacttgctgagctttcagttgtctcatggtgagcagagggcatcttttctttgaaactcagaagcaggttgaaatctgggggaattaacttatttttttcctttcttccaaagaccttatttcatgacctataatttgtgtcctggctgactaacattgggaatatcagttcactttaggagattcagtctccttcctgctcagatttattgttactctgtctccagtagaacaaatagaccattagtacagaagagattcattcattgaacaaatatttaggacatgtgtcagatgtggttccaagtgctggacaaagaataataaggaagttaagctttgtgctagtggtgggggtaagatagaaaaaaaaa

SEQ ID NO: 217954 - DNA, 635 bp, Homo sapiens
cctttcattttggccaaacttggtttccaatttctaaagcaggcttctgctcatatttataatgtgaaaattttcttaaatgttaacacttatgaaatcgttatgctacataaaaattcccctgagtgtgagatacacgaagaaatgcaagagatgaaaaataatttgctctatcacacattttcatatttaccattaggcattaaaagcttcaaatcaaaattaaatttcctatgtaaaattaaaaagacaaatagcatcagttccttaaattagcagaagcaggcatctgctaaagttctgaggtagacattcagtgcattttacaagaaatcaacaatatgtccatttcttccagtccttggatcgaaataagtccattcgttctcttcatctataacccaataaataagttttgatggccatctaatgcaaagataatgccctcttaaccataagctaaaaaaaaaaaaaaaaaaagaaaagcttaaaaaaaagaaagaaaaaaaaacacacaaagaatgcaatggctttgaagcaacagccaaatttgtttttgtccaattcatttgtgtcttccagcccaccaagagcttacagccactgaaaaaggaagatggaagaaaggagaggtg

SEQ ID NO: 217955 - DNA, 491 bp, Homo sapiens
ttttgtatcgtgaatgtgtgatatagtgtgttcttacaatacagtaagccagagaaaagaaaatgccattcggaaaatcctaaggaagagaggatgcatttcctcgtctccacgtggaagcggatcaccctaaaggtcttcatcctggtctttttcatgctgaggaggctggggaggagaaggaagaggaggggctggtcttgctgacccaggagcagcagagaaaggagaaaatccacgtgcaggggctggccagcgctgggcttctcgggaatggaatcacacacggactgtggcgtacacatcacaactttaaaccccgtccgtactgaagcctgcgtccgaatttcttctgtttttgtggcggaaggataaatattccattgtacagacggtctacccggttcatccgtcacccacccatgggcacccgggccgtttccacccttagtgaaggaagccgcacgggtgtttgtgcggacaggagcttc

SEQ ID NO: 217956 - DNA, 376 bp, Homo sapiens
aaagtgctgggatcacagttgtgagccaccacaaagcctggcccagaacattttcatcaaaaataaacgtcatcagcccagccccagccccccagccataaagacccactcagccaccttctgttcccaggggctggccagcgctgggcttctcgggaatggaatcacacacggactgtggcgtacacatcacaactttaaaccccgtccgtactgaagcctgcgtccgaatttcttctgtttttgtggcggaaggataaatattccattgtacagacggtctacccggttcatccgtcacccacccatgggcacccgggccgtttccacccttagtgaaggaagccgcacgggtgtttgtgcggacaggagcttc

SEQ ID NO: 217957 - DNA, 538 bp, Homo sapiens
tcaaaaaaaaaaaaaaaattgttctatgccttctggcctccatggttttttctcagaaatccagaggcattctaactattgtttcccaacaggtaatgctttatttttccccagctgctttttaagattttctccttgtctttggttctcatcagtttaattatgatgtatatggacatggatttctttcggttatccttatcagagttcacagagccacttgattgtgtttcagatatctgggaagttctcagctatgatttcttcaagtattgttttctgtaccatactgtcctgtacttctgtgtcattgataacatgaatgttagagcttttgacattgtccgtgaattcctgagactattcattttttaaaaaattttctctaggtgggtgtggtggcatgcacctgtagtcccagctatttgttggggctgaagtgagagatcacttgagcccaggagggaggtcaaggctgcagtgagccaagatcgtgcctctgctctccagcctgagtgacaaagtgagactgtgtttc

SEQ ID NO: 217958 - DNA, 411 bp, Homo sapiens
taatactggtcttactctgttgcccaggcttgaggacaatggtgtgatcatagctcactgcagccttgatctcttgggctcaattgatcctcctcccacctcagcctcttgggtaactgggactataggcacatgctaccaagaccaagcccagctaatttttgtattttttgtagagacagggtttcaccatgtttcccaggctggtcttgaactcctgggctcaagcgatctgcccacttttgcctcgcaaagtgctggaattacagacatgagccatgtacatgtggctatgtaccagtaaaacttttatttacaaaaatagacatgtttgctgatccctattttagagaatttgccctgtttcctattttcatgtcagctcagggtttattggtatattaaccttat

SEQ ID NO: 217959 - DNA, 572 bp, Homo sapiens
tagttttctgaaattgaaggcactggtatagctcattaaggtggattgcataatactgtcttttatttggatttcctttaaacatggagggttcttacctgtctagaacaagtttgttcaagccgcagcctgtgggccacaagtggcccaggacggttttgaatgcggcccaacacaaatttgttaactttcttaaaacattatgtgatttttgttgccattttatttttttggctcatcagcaattgttggtgttagctagtgtattttatatgtggaccaagacaattcttgttccagtgttgctcagggaagccaaaagattggcccctggcctagattgaatgaaaatcaatcagttgaaggcttatgatatgcgaggcattgttctaggagctggggatatggcatgaacaagacaaaattcctgctgcataaaacttacactccagtgggggtcatagtgaggagaatggcgtgaacccaggaggcggagcctgcagtgagccgagattgctgcactgcactccagcctgggcgacagaggaagactccgtactcaaaaaaaaaaa

SEQ ID NO: 217960 - DNA, 226 bp, Homo sapiens
gatgggcaagtgggagtaggctggttgcagcaggaaaagacctctgctctctgcctgcagtcatcctgaatgagatttggacgctgataaagaggccttgtgctgttcactgtggccacgggtggggtctacttcatgctcacatattagcatgtatatctctgatgtaagcctactccacctccacccttttgtttaggtgttgattactagcacctacttctag

SEQ ID NO: 217961 - DNA, 542 bp, Homo sapiens
aaataggcaggaagtaccacaacagctaatattagagattatttcactgtttggagagtgttgtgaaggttataaatcctactgttgctatgtgagttctctttattccgttacatctgcattttaatcttcctaaaacctttcagttaacatgccttgataacacatagatgtgcagaaagttttaacattgatcttttaacttacgtttctcaatgactgccttgatcaagatacttgatgagagtttcatgacttaaatagctttagttcaggagtcaattttagcaccaaggctgaaatatcccaaaggtatccgaaaggcaagtaatgttctaagatgaataatttagaaaatatgccttaatatttcaagagagatcattcatcttatatttttgactttcattttattatgagccatcgtagatgttttaacttctttagcccacaaagaaatttctccaaagagagccagccaaccggagacagacagagacaaagaaggtataatgagtagagagtgcctcagtgtctcttaa

SEQ ID NO: 217962 - DNA, 459 bp, Homo sapiens
cgtagagagaaagtggccagtttttataaaaacgtaaaaaaatgagacagtgcatatactaatatggatgctttgtaaagaccgtagatagctctgatttcttaacctaaatcaatttgtttccttaaatcctctgagcagtttgtaacacaagtatattatccatgtagttgtgcttcacagcagtagaagtatgtgtgtatcattttctatactcaaccaagcagcttctggatgcagctctccacaggggacaataacagctgacatacagcacacacttagtgccaggcactcctagcgcttatacatgttgactcatttaagcccacgataagcctatgaggcaggcactattatcccatgtacacatttgaagttctcagtggttaagtgactcgccgaaagcctaaattgtaagtggcagagctgggacatgaacccaggccgtcagttatg

SEQ ID NO: 217963 - DNA, 683 bp, Homo sapiens
cgggggggcacatagtagttttccctcttaaaatattaaatttaaaataacctcgactgagtctctccttctcagtactgctttggaagagtcaccatgtaattcgggttgaaaatctgtttcaccagtgatgctagatacatgtgtgagaagagtttgtgtttataaaacattttttatagggcatcctgtgtaatgttaatgtatgcaattggatctctccagaggaataaagtaacacatttagaaataaactgctggaattggagcatttcaaggttttgagtactggttctgatgactcttgggtttaagtgataaagtgccccaagttttagtgttagcctagtttatgttgttagtaagcagtcttttctggcttcataacccagctacatctacagtgacagtccgtatagagaaagttatgtacacctggcactcgcactcattttcccaataaagtgtgcactgcgtgatgctcattccgaacataactcaagggtggtatttgcagtggatgtgctggagcttcccccgtgtctgccactgggatgggactttaaagtggcttcactcacagggtctccatttcttctgtctgtccctacccttctccaaagaactgtatcagaaacccattcattttaaagataaccacacacttcaccgtctgtcactgt

SEQ ID NO: 217964 - DNA, 282 bp, Homo sapiens
ggcatagtggttacacacctgtagtcccagctactcgggaggctgaggcaggagaattgcttgaacctgggagatggaggttacagtgagccaggagattgcgccactgcactccagcctgggtgacagagcgagactccatctccaaaaaaaacaaaaaaaaaaaaacaaaaaaagaagtacagtccacaacacacacaagaaatgaagttttctgtgttttaagaaagaggagttttaaaaaacaataaacaacaatgacaactgcgcatgttaaaatca

SEQ ID NO: 217965 - DNA, 1015 bp, Homo sapiens
ctacactcagttttcatcagtgaacagattttccttttacatcagcatcagaagcattatggctggctgaactgatagagaactagcaagtatggactcaaaagtggcatggggaccccttagtaattaattactgagggtaactaaactccaggtaaccttttgccccttcctttcttccagccattggaagaacgtcctcatgtggtacagtgtcaggcaggagacccatgtttctttctctgaatcaatagtgggtggcacagaacaacaaaaggacgtctagcttttagatcctgggctaccaaatcttctggcgccatcagctccccttccctcttggcacctctcctgtcctcaccctggtatgtagtaaacccaagaagtactattctctgggtccacctgcccataggatcctgaatcttcacacaaacaatattagtcacaattctaacaaccagttctgaaacatttactatatactgaatgatttgcaaacatagaaaagttaattttcacggcaaccgaatgaaatagattttcggcctggcatggtggctcacacctgtaatcctagccctttggaagcctgaggtggatggatcacttgagtgcaagagtttgagaccagcctggacaacatggaaaaaccacgtctctaccaaaaaattaaaaaattagctgggactacaggtcctggtatattgtaaacccaagaagtgctgttctctggggccaccagcctttgtattatgttggtgtggaggagggaggttattggtaggtaccgagataaatttgcccataggctcctaaatcctcacacaaacagtagcaatcacaattttaacaacacaactttaacaggtgctacaggtgctacctgtagtcccagctatttgagaagctgaggtgggaggattgcatgagcccaggagattgagactgcagtgagccaagatcacaccacagcactctatcctaggcgataagagtgagaccctgtctccaa

SEQ ID NO: 217966 - DNA, 546 bp, Homo sapiens
ttgagagctgtaatttaaggaagaaggtatcataggttacctctgtggaaattctagaatttgaatattatgcccctgctcacttgtagactgggctgtcactataaagttaggctgacttgactgtatctgataattaggggctgggagagcatggaaaattgaagccatagataatcccagtgtcttgttttagccaataataattcttctcccaccaagtctttatcagaactgctaacaaggagaaaagtcgactggtttgagtttcctcaccttttattctcccctgggtatcttcagtagaggtgctaatgaacagtgaaatggccaaaaggtgagcagctccagggaggagaagaaggaggctcagataatccacaaactgtaatcgctttgaataattgagttaactccagtaaaatgtagagatacattcacctgctaggcattgttggaagctaaattaacacactggaagcaaagctttcttttaagtttcatttttaatctaatggtggacattttggggcactgcagcctatt

SEQ ID NO: 217967 - DNA, 437 bp, Homo sapiens
tgagatggtgcccgagtgtgctatggggaggtgttcaggctgtttgctcctgtagtaattagccagatttaaatttcaaaaatcaagaattttaaatttttacttttattttatagaaaagaaaataaccaaagtctttctagggaaccgcaagactacaaaagtcatcccacctctgctcaaacaccttcagggaaagtgacttctttactaaataagacagtgccatctgtccccttgcctccaaatggaaacattacttcaaacattctgtaactttttgttcaaatgcttaatggagctggcaggacaaagatcttccatgtggatgcctgtgaaagtatgtctttaccagaagataacattttacccagaaaggcagtacagcataatggctcagatagagggtgctagacccaacttggtgagctattgta

SEQ ID NO: 217968 - DNA, 664 bp, Homo sapiens
ctcacacctgtaatcccagcactctgggaggccaaggtgggtggatcacttgagatcaggagttcaagacctgcctagccaatatggtgaaaccccatctctaaaaattaaccaggtgtggtggcatgagcctgtagtcccagggcagggctagggcaggcacatggacggggtgctcggcggccacacctactgcacactgctgcagctcaccaggatgtaccccggcctgcaggtgtacaccttcaccgagcgcatgatggcctactgtgaccagatcttccaggacgagacaggcaagaaccggtggcgggaggctgaagcatgagaatcacttgaatccggcaggtggaggttgcagtgagctgagatcgcactactgcactccagcctgggtgacaaagctagactctctctctctcaaacaaacaaacaaaaaaaaacatttcttgggcgggcgtggtggctcatgcctgtaatcccagcactttgaaaggccaaggcaggcagatcacctgaggttgggagttcgagaccagcctgaccaacatggagaaaccccatccctactaaaaatacaaaattagccaggtgtggtggtacatgcctataatcccagctactcgggagggtgaggcaggagaatcgcttgaacctgggaggc

SEQ ID NO: 217969 - DNA, 402 bp, Homo sapiens
gaaacttctttatccacgtcctcactctctttacaccatgcccaagttcacccagcttctccttgagcacttcaatatcacatggatcgacaccccccaaaaaacccttttccatttgagaacagctctctgtgttaagagttctgacataatgtaccagaatctggttgcctttaacttccacccaatcttcatgactcctgccactgaagctatacagttttgttttctggatttcagtcattcttcacagactcattccagacaatctccaaaatgtcagtgtaactgttagaagttggtgctaagggttgatcagaactctgatgagtatagagacctttggtgctataatgtcccttatttgaggaattgtatttctactgatatatttggaaagca

SEQ ID NO: 217970 - DNA, 410 bp, Homo sapiens
tgctgggcccgcacttggtgtagaggctggagagaagatcgtgtgtgctttgtgggccacatgcaggtcctgtcggtctttctgttttgttgataaccctttagaagtgtagaagcctggccaggcgcggtggctcaggcctgtcatcccagcactgtgggaggccgaggcgggtggatcacctgaggtcaggagttcgagaccagcctggccaacctggcgaaaccctgtctctactaagaatacaaaaattagccgggtgtggtggcgggtgcctgtagtcccagctactcaggaggctaaggcaggaggcaggagaatctcatgaacccaggaggtggagcttctagtgagctgagatcacgccaccgcactccagcctgggcaacagagcgagacaccgtctcaaa

SEQ ID NO: 217971 - DNA, 640 bp, Homo sapiens
attttttttaagtttctgaagccattttcatggaaagcaaatttgcctgaaatagaaaataggttaataggtgggtaccagctaggcttaaaactaacagagcaggagggaaagtaggtcagattttcctatcacatctttttacttttaaagtaaaaatggatacacatgaaatccgactcttcttaaattcctcaaaggcttggccttgtattaatggttgcttcaaaaaagagtgaatggcattttctgcttattatgtcaaaagctgaagctcttaccaataggatggagatgtatataaaacatacccacatgagattcttactttaaaatgcagattttaaggggtatgatgttgaataccatgtataaatgtaaggagtatatattttgaatactatgatcaccccagaatgatcattcaataagaatgtatctaatatcatttgtacattactctgcattataattgatcatacggccaactttaaatccacttagttttccctgttcagagatttctttcccagatatacttaagcatatacatgtgcatgcatttaatttcctagactatggagactaaaaatatggctgaaatttttaatatgattactttttgttgatatttaggttt

SEQ ID NO: 217972 - DNA, 343 bp, Homo sapiens
tcaggaagatagaaattttaataaattttagatcttaagtcacataagcatgttaaaattttgagcataaccacataacattaggcacttagcttctaaaccagtttggggagttgggggcagtaggaatcaagaaaacttggtcagtccagtacaaggcaaaaatacaggggaatgaaaagcagaattggaggaggtagaaagaaaaagccttaatatcagtgaacaatgaattgattaagcttttttgttaaaagatattttctgtttgattttttttccattaaaagagacactccctaacataattacacagaaatattaaaaatatcagggaaataac

SEQ ID NO: 217973 - DNA, 401 bp, Homo sapiens
ataaccaatttggaaaaatagttgttcttacaaagttaaacataaacctccatatgataccaccatttcactccttagacaagtgaaatcgtacgttcacacaaaaacctgaataagaatgtttacaacaacattattaatagtttacaaaaacaagtcgggcacagtggctcagtcatgtaatcccagtacttaggaaggctgaggcaggtggatcacttgaggtcaggagtttgagaccagcctggccaacatggtgaaacctcctgtctactaaagatacaaaaattagcagggcgtggtggcacatgccagtaatcccagctactcaggaggctgacgcagaagaatgacttgattgatccccggaggcagaggctgcagtgagtcaagatggcgcc

SEQ ID NO: 217974 - DNA, 386 bp, Homo sapiens
gcaacctgtagcaatggacccctctatggcctccctgagccaaaccctacctggctaagcacctgcgcctgtaagattgtcctcccagtggtgggagtgcgagagaggccatcttcacttccccttccttggagggcctgactttgttgccctaggcaggccaggaaacttattctaatgccaacgaaggaggcaacttttctagctagaaaagcacacgctacagctctctctcttgccctgaacaagcagaagagcacagcttatccccaaaagctcctggacaaatgtaggctctctgggggagctggtaagggaatactgcctcccttaacaaaacaaacctgagaatctccaaggtttagcactgcacacggagtctccca

SEQ ID NO: 217975 - DNA, 780 bp, Homo sapiens
  misc_feature (713)..(713): n is a, c, g, or t
  misc_feature (720)..(720): n is a, c, g, or t
  misc_feature (760)..(760): n is a, c, g, or t
actctgtgagtccctttatagagagatcttatttgtacattcaacctttggtctcatatataactctgaccactggaaaactcaaggacaaagtgaaccaaaaattaagctggacttgctaaaacaccatactattttccctgatttatatgtaaccaactctctaaaaatgaaaaggagttctacattcaattttccttcccaaaatttaacatttttcctcactaataaacactcctgaggagaactatttatgacacaatcctcttgtgtcctctttaagacaatgtgaaatataaataagtaattttaaactagatggtgataatcttttataaaaagtcctatctcatttttaaaaagtaaattttagggcattcaaatttgtatcacacaacttttcagaaatatacctgttatgtaatactaggtacaaatgtactgatttttctccaaggtataaaaatagctttggcgaaagtagctactactagttaacacaaaactcaagaagttaaatcagtcaagcagttaaatatgaaaggcaaagcaatgaaaatttttgtttggttgaagggcataaggggagaacacctagtcttcgttgtaatcagctatatcctttatggaaagaaaagcttataagagatgcgaaaacccacataatgaatcagagtttgttttctttttcaaaacaacctaaaaagctaggngtttggngtattctgtagcactagaatgaaaatttgcttttggtgtnttttttttttttttttcaaa

SEQ ID NO: 217976 - DNA, 465 bp, Homo sapiens
ctgcatagcagttgagtgatgctggttagctgttaaggtggcctgttgcagtgcagagtgctgagctgtttcctgttttcttctgattgctcctgaaaaaagaagccctgtcctgaagaacaaatggcttttcagtttattaaaatgcctgtcaactgcccttccagtcacccaggcctggaagagaaataatagagcatgcagtgagcacatctagctgatatgataatcacacctcttccccctccctattctgttaaatggcaaatctgatcatgtcaacatacatgaacttaaaatatggggaatgttattgaagaaatggtttgtaagtgtaggtacttataacatggtgtatgtttttgattatgaatatttcttactataaccatgtttctatcattgaattaaaatgttttcttggtgttaccttttctcaaaataaaactagaaatattttgtaga

SEQ ID NO: 217977 - DNA, 395 bp, Homo sapiens
ctatacccagaaaaccctaaaaactctgccaaaaggctcctcaaacagataattgacttcagtaaagtttcaggatgcaaaatcaatacaaaaatcagtaggatttctatgcaccaacaatgtccaagctgagagccaaatcaaaaggtaatttcatttacaattgccacaaaaataataaaatacctaaaaaatagctacccaaggaggtgaaggatctctacaacaagaattacaaaacactgctgaaagaaattagaaatgtcacaaacaaatagaaaaatactccatgctcatggattggaagaatcaacattgttaaaatggccatactgcccaaagcaatttacagattcaatgctattcctatcaaagtaccaacatcatttttcaca

SEQ ID NO: 217978 - DNA, 285 bp, Homo sapiens
ccttcatcttgctgcaaggccttgagccactggcccaagatagtcatcagctcaagtgagttgctgaagcctaatgtcatgtgacttggagtaatttactacttctctgagcctcaattagcttgactgtaaaatgggggtgaatgcctactttgtagcatggtggtgagaattaaatgacgaaacgaatatgaatgctctagatctgcattggccaataggaatataaggtggaccataaatgtgaatcacatttggggttttaaattttccagtagctacaat

SEQ ID NO: 217979 - DNA, 416 bp, Homo sapiens
gttctgggaaaaacgcaatgagctccaggacatagacaagattatggctcagagtgaaagggagagataagaattcagagaataatttgcatcagaaaagcacctgacaaaaagatcagatggtacaaagcatctagcaccttttcttcagctgaggatatcatggtactattataacagagggaaaaactgtactgaggaagaggatcattctgtattttgtgtgcttggattcaacaaggaaaatatttgtgatgaaatgcaatagtgtaatcacaactctcctcagttcagattttgttattgaaccaaacggaggtccactcgcccagcgtaataagactacgtatctataccatatctaaacgaaggcttgtagcaagagaagggaaagtgtttgtttgtagggaccaagc

SEQ ID NO: 217980 - DNA, 535 bp, Homo sapiens
tgttccattactgtgatcatgctttattgtatacctggcacctggcactagggtgaccaaccttcccagtttgcccagtactgagagattttctgggacactggactttcagtgctaaaacctggacagtcccagtcaaatcaggatgatttggtttgaccctacctggcatgtagcaggcacttggtactttgtactttttaaaactctttgatacttgttacctcttttgattattaaacccacgtggaaggtagggcacgtgatagagcctgatggcactggatacatgaagcatccgaagctcacagaggctaagttacacgcttaggtgttcttattcctactctaagattttaatgccagtcaagaaaattgtagcactttgggaggctgaggtgggtggatcacttgaggccaggagttcgagacctgcctggccaacatggcaaaaccccatctctactaaaaatacaaaaattagtcgggcatggtggcgcacacctgcacaagaattggttgactctgtctcaaa

SEQ ID NO: 217981 - DNA, 825 bp, Homo sapiens
gctgctttactgtcacaggaaaggcattcaataaacgcttgttgaatgatttaataaatagagctgtggatgaatggctagatggatgcgcctgagcgaaaccaaactggaaaggaaaacctgttgcaacataaccgcaccatgctcccagcaccacactgaggtcacgtgggggctctatgctgtttggggtcacctgaggcatattatgtctctttggagtgagtgatatacttttgattatcatctcaatggtttagtgtctgggtccttatgggtttgggtttggtggtgaggccaaagctgggggttaaattaaggtaacgctaaggcataggattgggggtgaacatagagctggcctgaggttgtgaatagggttggggatgggatgaggctgaagttgagactaagggtagaaatgagaataagggttgggcgtggtggctcaatcccagcactttgggaggccgaggcaggcagatcacttgaggccatgagttcgagaacagcgtgggcaacataatgaaaaccccatctctacaaaaaagacaaaaattagccaggcatggcagcatgcacctgtagtccctggtacttgggaggctgagctgggaggattgcttgagcccaggaggttgaggctgtagtgagtcatgatcataccactgctctccagcctgcgtaacagagtgagatcctattaaaaaaaaaaaaaagaaaagaaaggaaggaaggaaggaaggaaagaaagaaagagaaaagagagaggaaggaaggaagggaaagaaaaagaaagaaaggaaggaaggaaggaaggaagga

SEQ ID NO: 217982 - DNA, 335 bp, Homo sapiens
agtagaataattgcctggtagctctagctctgatgtttctggatggattcagttgtgaaccaacacctagggcaggacaagaatggaggccatgtgaggtgttggatgccttcctcactccatggtaatgctcctttctccactccagacactctcctgtttcatcatgatcataccactgctctccagcctgcgtaacagagtgagatcctattaaaaaaaaaaaaaagaaaagaaaggaaggaaggaaggaaggaaagaaagaaagagaaaagagagaggaaggaaggaagggaaagaaaaagaaagaaaggaaggaaggaaggaaggaagga

SEQ ID NO: 217983 - DNA, 387 bp, Homo sapiens
gagattggtcaaagttggcaccttagaataggtgaagtttccttggtaacttcccttgatctttcttgcacctattcttctgccataatacagccatgtactccattttcatcccctcacgctcccctactcatgctgtagtacatttggtcaaacaagagatcccctgctccccaaggactccaccttccaaaacagtcatattctctatgcccacctctcgatagaaatttccatttcctcactgcagtttggctgtgaatgattagtagtcatgcctctgcctctttcaccttttaacccagaaaccttttcttaaatctgctggatttaccgtaagaacaggaaaaaaggaagtaatgtttattgctttcaccccttttctct

SEQ ID NO: 217984 - DNA, 574 bp, Homo sapiens
gagaattaagttctaacagctgttccttgtgcttgaccaccccctcccaatgccatctttgatggtggtggtagctgttaaaaggttttgtgccctccacacacctccttaatggtcagactatttggaacctgaacaaacccatctctgaaaactgttttgcttttttttctccttcattatgaggtttatttacattcaaaattatagagagacactggagaaataggatgcctattgatttatttccaaacttagcacaggatcggttaatgcatagttgacattcatttatgattaagtttgctacagcattttaagaccaagacaataaatctgccttagaatagtcaagaatactgatgttttgagctgtggttaggtaaaagaatgtaaaaaaatacactctcaaatggatcccacagaagtgtgtatacatatgagagagaaagagggagagggagggaggatgatgatgcaaaagcaaatggagcaaaatgtaaaccattgatgagtctgggtaagggatgcatcagagttcttttactattgcaactttttggaagtttaaagt

SEQ ID NO: 217985 - DNA, 623 bp, Homo sapiens
gcagtagctcacgcctgtaatcgcagaactttgggaggccgaggtggaaggatttcttgaagccaggagtttgagaccagccttggcaacagagtgagaccccatctccataaaaaataaaataaatgtagtcaagcttggtgatgcatgtctgtagttgtagctagttgggaggctgagacaggaggatcactcgagccagggaggttgaggccttagtgagctgtgatcgcaccactgcactgaggtgtggacagcagagcaagaccctgtctctgtctctgtctctctctctttatatatatatacacacacacacacacacacacacatatatatatactatttacatatatacactagttttatagatatatatctataaatatataaatagaacttatcaaagttctattgtctataaatatgcaaagaaaatagaacttatcaaaatttgtcaatgcagagaaagcagtacttaaagcaaaacttatagtattgagagtatatattagagaagatctaaaatcaatactaagctttcaccttaagcaactagaagagcaagctaaagtaagcagaacgaaagaaataataaaaattagagcagaaatcaatgaaat

SEQ ID NO: 217986 - DNA, 564 bp, Homo sapiens
ttctctatctcagctgcaatagtgttccatcttaccacagagtgttttataattaatgctgttgactttataccccaaaatgggtcaagaagtggctacatgattaggggatgtttaaatttgtatgacgacaaagttaattgcaacaagtagaaaacttgggtgctaacacaggataacttctgctctttttctttcctggatatagttctgttggggtataaagtattaggtatttgtattttttgctgtcaaaataatggacttaacttttagagtgttcacagctaggatctctgtatttgtttttcaactaacaactaattttaaatgtattgtatcttttattacctgttctcttagattgttttttgctagtaacccttactcagcttctgcctttggggcttggactaatattgcttgtatggaactacagtactgtgactaaacatggagctcaatgcagctactgcttacaactgcttaaactttgtagtttggacttcatttttttctgtaataacaacttattaaatctagttgtatgaagtaaaaaaaaaa

SEQ ID NO: 217987 - DNA, 377 bp, Homo sapiens
agttcaaggcagtgagccatgattgtgccacggaggttggtgttttcaccgttagctgtgagagtgcaaaggcataagatgttagcagtggaagaccaaggtgtcactgatcgtttcgaggttaccctacccctccagctggctgtcttcagcagttgaggagacgcaaactgcacagaggacaatgaaatggaaaaatgtgtggttttcaatgagcaaatatcatggagggcagtacctagagccgggcatagtgactggcacctacagtctcagctactcaagaggattgctggagcccagacgttcgaggctgcagtgagctatgatcgcatcactgcactccggcctgggcaacaggccaagatcctgtatct

SEQ ID NO: 217988 - DNA, 390 bp, Homo sapiens
aaatatggtggtatcatggaagccaaaaggtgagaacagaccaaggagagtctgaggagagaaaaactcagatcgaacgaacgcctggctaccaggggcacctggcatggagggtccagcaggtggtgtcacggcaagcaagagaagaggtagataactgaaagtgaagggagggagtgctggatttggagcagaatggccacttcaggagcaggggctgagcctccgagactctgccacctcagttcctaacacacagcagccgtctagtgaaagtgccggcaggactcaagcctgaaacactaagaatcaaaggggcagtgcaggcctcgccttcaaagagaggcacgatgggtaacgtgtggggcatgaatgtccccagtatgacgg

SEQ ID NO: 217989 - DNA, 756 bp, Homo sapiens
agctgagatcctcacacccaagtgtctgggttgcacaagcaaatggcagaagcaagcgggaaaagacgagaaggtaaatgtgggtgctcctggggaatccgtcctgctccccactgaggtcacagactaggcataagccccaccctggatgaaacagacaactttaaagtccccgccatgtggtatccaacctcactgtagtgagctaacctcgtctgcgggacacatcagaagccaggaactttcagagaacatcaagacttccagtttgcattggtccacaggaacatctcaagctccacctacagagctcagaaagattcaggagcgggtttaacggccaatgatgcttccccaaatctttctgtcctcctaattcattctgcatcagggccgtgtgctgtggatgcttaagtacgcaggtgttttcaagactaagaaggtcttctgaaagttcttccccatgaacaggcaaaaatcaccactcattgcagggggaccttatgcttgaggatatcatgggcaagaagctccagccaaactagtaagaaccggccggccaggcgcggtggctcacgccgtaatctcagcactttgggaggaggaagtgggcagatcacttgaggtcaggagtttgagaccagcctggccaacatggtgaaaccctatctctactaaaaatataaaaaaatgagtcggttgtggtggtaggcgcctgtaatcccagctccttgggaggctgaggcaggagaatcg

SEQ ID NO: 217990 - DNA, 682 bp, Homo sapiens
agctgagatcctcacacccaagtgtctgggttgcacaagcaaatggcagaagcaagcgggaaaagacgagaaggtaaatgtgggtgctcctggggaatccgtcctgctccccactgaggtcacagactaggcataagccccaccctggatgaaacagacaactttaaagtccccgccatgtggtatccaacctcactgtagtgagctaacctcgtctgcgggacacatcagaagccaggaactttcagagaacatcaagacttccagtttgcattggtccacaggaacatctcaagctccacctacagagctcagaaagattcaggagcgggtttaacggccaatgatgcttccccaaatctttctgtcctcctaattcattctgcatcagggccgtgtgctgtggatgcttaagtacgcaggtgttttcaagactaagaaggtcttctgaaagttcttccccatgaacaggcaaaaatcaccactcattgcagggggaccttatgcttgaggatatcatgggcaagaagctccagccaaactagtaagaaccggccggccaggcgcggtggctcacgccgtaatctcagcactttgggaggaggaagtgggcagatcacttgaggtcaggagtttgagaccagcctacctatatcagcagctgagaaggtgaaactaaagt

SEQ ID NO: 217991 - DNA, 755 bp, Homo sapiens
agctgagatcctcacacccaagtgtctgggttgcacaagcaaatggcagaagcaagcgggaaaagacgagaaggtaaatgtgggtgctcctggggaatccgtcctgctccccactgaggtcacagactaggcataagccccaccctggatgaaacagacaactttaaagtccccgccatgtggtatccaacctcactgtagtgagctaacctcgtctgcgggacacatcagaagccaggaactttcagagaacatcaagacttccagtttgcattggtccacaggaacatctcaagctccacctacagagctcagaaagattcaggagcgggtttaacggccaatgatgcttccccaaatctttctgtcctcctaattcattctgcatcagggccgtgtgctgtggatgcttaagtacgcaggtgttttcaagactaagaaggtcttctgaaagttcttccccatgaacaggcaaaaatcaccactcattgcagggggaccttatgcttgaggatatcatgggcaagaagctccagccaaactagtaagaaccggccggccaggcgcggtggctcacgccgtaatctcagcactttgggaggaggaagtgggcagatcacttgaggtcaggagtttgagaccagcctggccaacatggtgaaaccctatctctactaaaaatataaaaaaatgagtcgcaggtgtaccgcgccagaaagtctaagctcgttgcgctgtgaaaaggcgccaggtcc

SEQ ID NO: 217992 - DNA, 777 bp, Homo sapiens
agctgagatcctcacacccaagtgtctgggttgcacaagcaaatggcagaagcaagcgggaaaagacgagaaggtaaatgtgggtgctcctggggaatccgtcctgctccccactgaggtcacagactaggcataagccccaccctggatgaaacagacaactttaaagtccccgccatgtggtatccaacctcactgtagtgagctaacctcgtctgcgggacacatcagaagccaggaactttcagagaacatcaagacttccagtttgcattggtccacaggaacatctcaagctccacctacagagctcagaaagattcaggagcgggtttaacggccaatgatgcttccccaaatctttctgtcctcctaattcattctgcatcagggccgtgtgctgtggatgcttaagtacgcaggtgttttcaagactaagaaggtcttctgaaagttcttccccatgaacaggcaaaaatcaccactcattgcagggggaccttatgcttgaggatatcatgggcaagaagctccagccaaactagtaagaaccggccggccaggcgcggtggctcacgccgtaatctcagcactttgggaggaggaagtgggcagatcacttgaggtcaggagtttgagaccagcctggccaacatggtgaaaccctatctctacataatttatatttggagaatgaagtcggcttagtggtggtacggcgccatgaaagtgctacaaagcttagtttgcgcttgtgaaaagggtcgcacggtttcc

SEQ ID NO: 217993 - DNA, 542 bp, Homo sapiens
aagaaaacagaaataatcctatgtccctctcttctgaatacagggcatgattttttagaaggaattagtcccaaaagtttttgagtctaacagaaaagaagaagatacttttacctacagaaattgtgtgggcctttgaggttctatgctccttttaggcataacatggtgttgaagccatttgcagttagcagtgacctgatagtatcttatggcaactttgtatttcaacttctcagcttgtgtgatccttctattgctgactatagacccaggaaacctaaaagctacatcttacctttctaattctttactccttggccatgttctgtttctagcacagtagatattcacacgtggcaccttatgcttacctaggccctcataaagcaaaatgctctttgtttgggcaccaatgatgtcagtatagaccagcaaactagagggcagcaatctaggtccttaaccttttaaaatagactgatgtactagctgcctttggattttggtatctcaataaagagattagtatgttggccttt

SEQ ID NO: 217994 - DNA, 523 bp, Homo sapiens
aagaaaacagaaataatcctatgtccctctcttctgaatacagggcatgattttttagaaggaattagtcccaaaagtttttgagtctaacagaaaagaagaagatacttttacctacagaaattgtgtgggcctttgaggttctatgctccttttaggcataacatggtgttgaagccatttgcagttagcagtgacctgatagtatcttatggcaactttgtatttcaacttctcagcttgtgtgatccttctattgctgactatagacccaggaaacctaaaagctacatactccttggccatgttctgtttctagcacagtagatattcacacgtggcaccttatgcttacctaggccctcataaagcaaaatgctctttgtttgggcaccaatgatgtcagtatagaccagcaaactagagggcagcaatctaggtccttaaccttttaaaatagactgatgtactagctgcctttggattttggtatctcaataaagagattagtatgttggccttt

SEQ ID NO: 217995 - DNA, 708 bp, Homo sapiens
agttgcatgttgtgccctttgtaaaaagtggtctgttgtagcgcatttagttttttcaattcagttcaacagaatttttttgagtacctacgtgtagtctaggtactctaaaggtttgttctatcctttcttgaatcttgcttatgtttatagagtattcataatgtgtgaagcagagtcattgcctgttgtctgaagccagcataggaattgtcgttttggaactcagcttcttagctaattgtctgtatctcatttgaaggattattaaaattatagtctcttcagtttattctgctttcatttatactgtttcatatgtcttaacagattaaagcaaagacattaaagatttggtcaaatctaagattagaaaccaattattttgacttacagtccaatattgtatctgttttgcataagttaatggatgcctattatgttgtgatattccggatgataattctatttatgtaatgctttagtcgtaaacattcaaatactgtttctcagaaaaaataatgcaccgtgtttttttaaaattctgtgttaggtcaaattcagcattctgtaattttttcacatttatattcttcttcttcttttttttttttttttgagatggagtctcactctgtcacccaggctggagtgtagtggcacaatctcggctcactgcaacctccacctcctgggttcaagcagttc

SEQ ID NO: 217996 - DNA, 105 bp, Homo sapiens
gtagcaggagaggagatgggtgacggcagaaaggggacagatgagggtaaaaccaagagccagatcccaagcccctcaaaccacggacctgcgagatagacaggg

SEQ ID NO: 217997 - DNA, 543 bp, Homo sapiens
atttttagtagagatggggtttccccatgttggccaggctggtctcgaactcctgatctcaggttatccacccgcctcagcctctccaagtgctgggattacaagtgtgagccaccgcaccccgccctaatctcagcctttttatatcttcttggtaggcccactttttggcatcccctaacaagaagtcctcagagatttttactactcaacatgtgtgcgtcccactcagatgtattgtgttctttctgttcaccctctacttcccattccatttcttcctctgacttagggttagaatggcccaatgatcctacaactttttgatgctatttcatttgattcctctactgtctaaatcacaagttggctaactttacttactgtaagggatcagatagcaaatagtttaggccttgtgggccattcaatctgtcataactacccactctgaccatatgtagtgcaaaagcagcccttgacaatatataaatgaatgaacgtgaatgtatttcaataaagctttacttgtggacactgaaa

SEQ ID NO: 217998 - DNA, 457 bp, Homo sapiens
aaggcagattaggagatggccctaaagtgcttaagtctaccatttttgcactcccttgacctacggttgtcaaatgtttcttggtgaggatggagatacgtgacaatgaacaggcctttcttgctattaaacagatgggtggttcatgtttcatttagcatttattcaaaagggtttcccccacaaactcaagcaataataataaagatgtattactcctttatgctatgttatctggaatttattcctaagtatcactgaagcaagactgcaagtggtttgtgcatttatatatcttgaatcgctatacattagaaaagcatagaattgttatttgccctattacaactgcttttgtattaggtttagaaatcttctcagtttttgtgcaatcctgaaaagaaaaaatgaccctttaaattctattcactgtctgatgaaataaatccttgtgtaa

SEQ ID NO: 217999 - DNA, 425 bp, Homo sapiens
acatattttcttgtaaaataatgaagttttgacttgctttgttaattagtggttgggtgaataaaaatttactcaaagcaggactactacattgtgagagtaaattggcaacagtgctatttatttgagctctgtttaaaaaggaaaaaaaggactctccgtatatctagctttctcctgtgtgagcactacactttaacaaggatatttctggacatagtaggaagcatggactgtggtggggagagattggggattagtataccagttaagaggcttttaaagtagtctaggcaagagaatattagaaactctaaaccagacagtgaaatttttagagtggaattgtggtgaagattactttgagacttttatgaagtagaatgaaaagatttgaagaagaattagatgtctggaggttaggg

SEQ ID NO: 218000 - DNA, 419 bp, Homo sapiens
cagagatgggagttatgctgctacaagccaaagaacagctataacaaagactcctttgacctaattctggtcgcactcctctaagccctcaaggccctgacctttggtctccgcatctggcatgtgtagtctagttcagctggatcagtttagtgaaaatcccccattcttgatatctctctcaatatcttaccctggcctgccttcatcaagaatctgctgagtcagtctagcaagaatacccctttatctctgatgtttcctctcagtgatttttccattcaccaatccccaacttgctccttggctgtaaattcccacatttccttgttgtattctgagttgagtccaatctttctcccctacagccaaatcccattgtagtagtccccccgaataaagtctgccttaccatcttt

SEQ ID NO: 218001 - DNA, 443 bp, Homo sapiens
aggactctacttctaattgtatagagaacactgataatccatggcattaactgtttctagagatacacaaaataaattcacctgatactcctaattcaccacttacgagacacaaggaacttgatgattctgcatgattctttcgaacatttgtggaaaaccaagggatataatgacattggttggttgctcctaacattgctggagaatgtggtgaaagaaatggatgagctcaggaattggaatcctcagctccagacgcacataaatatcctagaagattctaatgtgccctgaaggagaatattctctcctgtagccacagggttgaaattgcttaaaatcaaatacaagtcctcaccttgcaattggctgatttacaataaaatgtgaactctcagccttgcagggtgtgtactgttgaagtggggggcatcgattgg

SEQ ID NO: 218002 - DNA, 508 bp, Homo sapiens
aatagtgagaagtcccatccttgacagaggtgtctgggaaagtactcagtgaaatgcgctgatatcttttcagtgggaagtgagggagacaccagggctgcacttacaggtcaatgggaaagcaatctgcctcccaatcatcctcttgactcagtgttctggctattcagatcagacaggcacctcttttcatatgcaggaatgctgatgttccaagtagagaaagattgtgactgtctcctgcaacctggaaggcactcctcctgtggggatgtagtcaccctggagtgtttcagaaagtctgtacacttaaagtataataataataataataatatatatataataaataattttaagatttcaaaaaaaattaaaacaaatgtgggtcggttcgggagcaacaaatcttttcttttttattatttaatgttcaaaatttaaatatatatatatatatatatatatatatatatatatacctccaataaatgaaacctgatgactg

SEQ ID NO: 218003 - DNA, 282 bp, Homo sapiens
actatcgcattttttcataattaaaaggtatttgttagttatccatttataagactggtgtgttacaagctttaagagtatacgcatgcagtttttataatgattaagaaggctttttattatttggaaatgcccagaatatagcagtcaatacctaaaatacttgaaatatgtcagagcatcattatgggtgatttcttaacatttttataaatggttaaacaagtatttgaaaatatttgtatgcctctatggaatataaaagttaagtttaaaattcta

SEQ ID NO: 218004 - DNA, 357 bp, Homo sapiens
tttcagtggatctctgtgactcatgagctgaatgaccttgaagcaagttgctgcccctctctgagccacagttttctcatctgtaaaatggacccaggccaggcacagtatttcatgcctgtaatcccagcattttgggaggccgaagtgtgaggattacttgagcccaggagtttgagaccagccctggcaatatagtgagactgtgtctctataataactaaaaaaacttagctgggcatggtggcgccatgcctgtggtcccagctacacttgagcctgggaggttaaggctgcagtgagccgtggttgtgccactgcactccatccagcctgggtgacagcgagaccctgtct

SEQ ID NO: 218005 - DNA, 390 bp, Homo sapiens
actagaaattaataataaagatcagtaaattaaagttccttccacctggaaaatttaaaactcttaagcaactgtcttagtacattttgtgctgctataaaagaatacctgaggctgggtaatttataaagaaaagaggtttatttggctcacagttttctgtaggctgtacaagaagcatggcgtcagcgtctgcttctggtgagggcttcaagaaactactcatggttgaaggagagcagacttcacatggcaagagaggaagaaagagagtaggaaggtgccaggctcttttaaacagccacattgttagtgaactaagagtgagaaatcacttattattttgaggtggcatcaagccattcatgagcgatctacccacatgatgca

SEQ ID NO: 218006 - DNA, 511 bp, Homo sapiens
caccattcaacgcactgcaaagtgacagagtgagaacatcagtccaaaagtaaggagagaccctgtgccatcagagacggtgtatcctgtggagtcattcaggcaggtgacttggaacagggagtttcagcgtagtgagcccttggtgcctggcttaggagtgaatgagattaggagaatgagattagaggttacagagccttcctaagaggccccaagagtcttccagacctcagcacccccatctggaggggagcagtgggccctgttgccctcacacctgtgtctctattgtctgaaagttcagtagaagggagttcaccacctctgtcacctctgtcagctcctgcctgggggccactctctcctcacccagacacaggctccccagccagatcactctggaactttccctggcagctcagagtggcaggagtcagagctgtgttgacattgcacatttttgaacctgtctacagcagcctgggttgggcacaacctggaattgccc

SEQ ID NO: 218007 - DNA, 508 bp, Homo sapiens
aaagatgagatcctgactcatctcctgataccctgacttactcccttgctccaaacatcctgaccttgctattctttcatcatgccagacactctcctgcctcagggcctttggatggaaaactcttccttcagatatctgaatggctcaatcctttactttcttcagggctaccttcttaatgaggccttttttggataccctaaaatttcagcggactcccacacttcctataatttctttgacttcttttccttatgacttaccattatctaacatactgtacgtttaatttttcttgtttctatctgaatgtaagcttgaatggctgtgcatttattttgttgactcattgctctggcatctaagacaatgcttagtacattgcaagcatttgataaattcattaaatgaataagaatattgaggcccagaaagatgaagttactcacctaagattacacaggtaatgaacaataaagctaaaatctaaacctacattgcctta

SEQ ID NO: 218008 - DNA, 339 bp, Homo sapiens
ctccgcctcctgggttcaagcaattcttgcgcctcagcctcccaagtagctgagattacaggcatggtgtccaccaatttttttttgcattttttggagagacagggttttgccatgttggccaggctgctctcgaactcccgacttcaagtgatccatccacctcagcctcccaaaatgctgggattacaggcgagagctaccatgcccggcctaaatcctaaacaacttgaacattttctttaaatatgtttattcctagcttgtatcctctaacatatgttactcctgctagttcaataaatatctgttcaattgtttttgttgttgtcttgattc

SEQ ID NO: 218009 - DNA, 1319 bp, Homo sapiens
tatcttaaatgggattttataactaaaatctaaagttcaattcaagagcaataataataaccaccaatacaattttcaaaaagggtcatcagaacattttaccctatcaggtatcaaaacttactttaggaaaccatagttgttataagagtaatactgccctaagaaaaggaaaagagatcaatggaacagaatagtctagaaaaagacccaagtaatatatataaattagtttatgatgaaagtgacatttcatactagtagggaaaaagttggaattttcaaagaaaaaaaatgatgtgacagaacaaatcgttcttcatctgataaaataataagcttagactcatgtcacaaatcataaaacaaaaaataaaatcttccaaaagaaccagaagtaaatacagaatagttgaaaaaatgtgaaaataaagccttctgtcctaggtaagaccttaaaacctagaacgtataaaaaaggctgacgttttaaatcataaaaattttaaagctttttcatgaccaaaaaaatgcagtttaaagacaaggaagagtatgggataaaccattttcaacatacataaacaaaagatttcaagtcagactgtatcagggagtcctttatactataaaactatttgtaccataactatgagaactggacagaagatataaataattcacagaaaaaatgttaataaacaagatatgtgaaatatactcaaggttttaggtaaatgcaaattagaacagcacttttttggccacagaagcataaattaacaattttcatataaatcctattttgaaaccaactcgatagttgataaaaattctaaatccagaattctagttttcttaacttatcccaaagaattacttgcatctatgtgaaaagatttatatataataatgctcattatggcactgtttttattagcaaaaaacttaatgggttaaatatattacgatatatctatatggttttgtagagtagtcaaattcagagaaagaaagtagaatggtagttgccaggggctggggggagaggaatgggaagttattatttaatggatacacagtttcagtttaagatgatgaaaaagttctggagatggatgattgtgatggctgttgcacaacaacatgaatgtacttaatgcatctaaactgtatacttcaaaatggtaaattttgtattttaccactatttaaaaaaagtgttcatctaaatgtacttatgaggtagtctccaatgtatagttttaagggaaacaaatatgttgtagaataaagtataattccatttatctttaaaa

SEQ ID NO: 218010 - DNA, 196 bp, Homo sapiens
actccctcaccaaggtacccaagcaacgttccaaacatggcattagcctcaaagttcaatgactctatagttctatggaatgcctacaaatatttttaaaatgtaatcacttatagaaagattcaacaggctattttttcccttcaaataaatttagaatacacacacacacacaaaaaaaacacctcgtgattat

SEQ ID NO: 218011 - DNA, 456 bp, Homo sapiens
gtttcagcatatcatcaataacactgggtattactatttttaatgttaggaaaattgatatctcatttatattaggacaaatacaagtaagatataattgttttggaactctgtacaatgagctgatgacattgttacaatgagagacacttgttagagaccagcttaagcaaataatgagatttattgcctcatgcatctgggtgctggcctcagggttgattgattcaagaactcaaatgatgtcacagaaagtgctatccctcattcctcttctattgcagacacttttttctaaggagggaggcatggttgcaaggaggtctaggcttatatcatcttagctaaggaggtctagaggaacgagacatctttgttgtctctgatttaatcctacattaatcagagctcatttaagtgccatgatagaaacccaatttaagctggcttaagcca

SEQ ID NO: 218012 - DNA, 440 bp, Homo sapiens
tgggtgggtgtttcaagcctcttcagaagcgataacagtactagggttttctgggaagggccggtggtgagtgtgattttgctctgccccaggtaactgttctctacaatccactttagggtcttggccacatgtgggaggtggtcccagcagctcctctgtaggcatatctgagcattttgtgaggttggagcctttctctccagtgagttcatggttccacaagaggaagctgcctgctatcgcctgtgctcatttgatgacttcctaggttttacgacattaatttaagctctgcagcccaagtaactctctttgattgcagcagtatgcgcttaaatgtcagagctttgctgaaaaaccacttgagtttgaagaaagtcattgtgttcagtaaaatctagccacattttatgtttatgacctttattagggcatcc

SEQ ID NO: 218013 - DNA, 186 bp, Homo sapiens
tttattgcctaagtaggtgacctatcagagacagtcttcccttttttcaattatcttcagtcgctaatcacgaatccttggagccctcattcacttggtattgagaaagcaagtgtgcttccatactgtctgagacctcacacgcttttctacaatggcattcaataaagtgcacgtgtttctggt

SEQ ID NO: 218014 - DNA, 347 bp, Homo sapiens
ccccacctccaaatattggcaggaaatttagactagcatttcaaaattagtgcaggggtatggtcacatctttggcactttatttttaaagattacaaatcgagaagtatagcatagtccttttatcttttaaataattagcttatttttttgaaatttgtcatctttttgactgacattttccagagaattgctgtaaagccacaagatggagctcaagctaagcaccaaatcattttggaattagattgagtgagctaaatcacattaggaattgaatgtaacactttttgtgttttaagaaattaagtctgaaatcaaaatataatttaaagatgatcaaaact

SEQ ID NO: 218015 - DNA, 519 bp, Homo sapiens
aaatgtgtatatgtatttttttttagccttcaaatgtaaattaacatggagcccaagaggccaaaaaacagctgctacaaaatataccagatttgtattatattgaatttgtggcccaaaccagaccatatatttttctgcttggtaaaaatgtgatagtgaaatgggagagttcctttgaccccctcatgggacttgcgacagggttggctcgtttgctcagctgccgtgcccaaaccccttgtgggaaagggagcatacaggtgagggggtgcagtctctggggtgaatgtctttgggcactggcaggaacaaacctgcagcagcctctaggggttgcccacaacctctggagcccctaagggtgtgtgttacaaacaatgctcttttagcatttgccttctactgttggctaagtgttaaccagctcagtggagggtcagggtgacagctttttacaccctgccctcttggtacctaggttcttgtccagtgtccaggaagaatcagatcacacgg

SEQ ID NO: 218016 - DNA, 521 bp, Homo sapiens
atatcaaatacttttgtatttcaaagctaattttaaagaattaaaatcttttttataggtacatgatagttgtattatacatacttacagagtacatgtgatattttgatatcacacaaacgtatattataatgatcaaatcagggtaattagaggatcaccaagaatttttttaagatagtttttatgtgtagaaaaacataaaaataaaatcaaacatgctgttgcaaactgtcccaaaatattagtcaagggtgcttggaaaatattcaaggctcttctgtttcttaacttatcctgttttggtatataccttttaatttttgttgtggccataatttattgtattaaacaatatagtgtaacaatgatttactcctcatttaaattgtaatttgtcttataagtaatctagaaatgatttaaaatatttgggaagatatgtgtaggttatatgcaaatgctatgccactttatatcagggaattgagtatccttgggttttggtatctgtgggaggt

SEQ ID NO: 218017 - DNA, 347 bp, Homo sapiens
agtagaggcggggtttcactgtgttagccaggatggtcttgatctcctgacctcgtgatccacccgcctcggcctcccaaagtgctgggattacaggcatgagccaccgcgcccggcctgtcttgggtttctttggcatcttctcattccccatcccgctgcaagactctgtgcctatggaggcctcctagtggtataatgtgaagtttctgtgcatgggatggcaagccagttaggaaggaaggtaagtaaatatcccttccacttcctggacttcagactaaggctggttggattcttgctgtgtccctaatgcaatccccgagccccttccactgtgcattctg

SEQ ID NO: 218018 - DNA, 275 bp, Homo sapiens
gtacttctgcaactgtattcctaagaaaagtacatgtgctgtgttatctgagttgcaagctgaatgagttgtttttcatgactgctatttttacttgaaagaacaactgagagctgggtgtgctggtatgagcctgtaatgccagctgctgtggaggtggaggcaggagtttgaattcaggtccagcctgggtaacacaataagaccctatctctacaaaaacaaaaacaaaaacaaaaacacaagaaaccagacacacatacaaacacaaaccc

SEQ ID NO: 218019 - DNA, 524 bp, Homo sapiens
cagtagtggtaagtagtaagatttgtgatatatttttaagatacagcccaaaaatttgttggtgaatactatggtttgactgtgtctcccaaagttcctgtgttgaaaatttgatctcaaatatgaatgtgttaagaagtggggcccagtaggaagtgtgtgggtcatgacgtcatcaccctcttgaaggaattaatgctgttgtttcaggagtggtttccttataaaagaatgagtttggtctccttttgtttctctctccctctctttccccatctactatgggatgatacaaaacaaacaagcaaaaatgtccttgaaaaattccagcccctcaatcttggaagtcccagctcccagaactgtgagccagtaaaggtctgcttattataattacctagtctctggtgttctgttagagcagcacaaaattgggctgagacaatagattaaatatgagtaaatcaattcatatgaattaatatgtctctattcagtatcccaagttatgagggtagacaata

SEQ ID NO: 218020 - DNA, 475 bp, Homo sapiens
aaatgttttattaaaataaaatgaatggttgggaaactagaaagaaaattcatctttgcagggaagattatgaggttgatttgagatacgttgtttaaagaagtaatgtaatacattcaagtctaaatgccctctggacaagtgcacatagagaagagaaagtaaagactctaatcaagaagcagagctcatgttttctgattcccagatccgcactcagtcttgaccacttgcattaacccaatgaacagcagtcagaacagacgcttacctctaaatggatgggaagacacgctgaattctctttagcataaaaggtattatcattaaagttgcattatttagagaacatggggagttatgaggtatggctacaacttcctgaatcctgcctttctctttacaacccgggccatctgccttaatggttctgctagtgttttcagtggctttccattgcctttgacaatgaagg

SEQ ID NO: 218021 - DNA, 346 bp, Homo sapiens
ttttctttttttggaatgtgtactctatttaatataatctttgatggggttaagtttatgtctatcatctttctaattgttttcagtttgtcccctcagttcttttttttgtttgtttactgttactcttttctgtcttttgagaaaataaaatatacttagtattccattttatcatctctttggcttcttagctacacctctctgttttattttctttaatggttgttctagggattataatgtgcatctatttgttagattcattacagtgcatctttaattattcttacatcacttctcctatgttgaaaaaaacaacagtataattctgtatacttctctt

SEQ ID NO: 218022 - DNA, 388 bp, Homo sapiens
agatacatgaaaatatgcaaatcacgaatcatcagggaaatgcaaattaaaatcatgatatctcacaactgttaaaattggctatcatcagctgggtgtggcggctcatgcctgtaatcctagcactttgggaggccgaggtgagtggattgtctgagttcaggagttcaagaccagcctgggcaacatggcaaaaccctgtctctactaaaaaaatacaaaaaaattagctgggtgtggtggtgcacacctgtaatcccagctacttgggaggctgaggcacgagaatcgcttgaacctgggaggtggaggttgcagttgaccgacatcatgccactgcacaccagcttgggtgacagagcaagactctatctcattaaaaaaaaaa

SEQ ID NO: 218023 - DNA, 598 bp, Homo sapiens
cagccattctgacaagaactagactttgggctccttgagaatattcagttttgtaagttttaatatcctctcaccatattcagcttaaaataccatacttaatgattatccttggcaagacaggtgtgaaaggattgctgttgtattacaatcatggtgcaaaaataccagtcaccagtgagggtatacaaataccccttcaaattaattatggctgcctatgaaaggaggttccctacgtgtcctttgattccgacattcatgggcagtgacactgtgaatgaattcaagagtgaagatggggctgttcatgtcattgaaaggcgctgcaagctggatgtagatgcaccaagactgctgaagaagattgcaggagttgattacgtttattttgtccagaagaactcactgaattctcgggaacgtactttgcacattgagggtcataatgaaacattttccaattgctataccgttcaccctgaaaatgaagattggacccgttttgaacagtctgcaagtttagatattaaatctttctttggttttgaaagtaccatggaaaaaattgcaatgaaacaatataccagcaatatta

SEQ ID NO: 218024 - DNA, 615 bp, Homo sapiens
gactcacacatctgcaattgtctggctattgcctgcagctggctgctttgtgttggccttgcctgtatgactggaacaactggggttcctcttcttccaggtttaattcatgaaatcctgccgtaccttcaataccaagatttatccagtctagcacagtactccaattgtgcaatgcacctttatatgtggataacatctggacccctccatctacctgtgccaaagaaagaatcacaggagaatggagaccctccacgctaatacaaatatattccacttctattagaccacccaggccatggcattaactccatgacatgaagaaaatgcaggaggaggatactcaatacaacaggacttctaaagactggcgaaatgcttcatgatatcatcaaagaatgagatgtacttaaatcaagaatctcaagatgaaatcattctggattatccaagtgtgtcctatatccaaaaaaaaaaaaaaaaaaaaaaaaaaaatttgttggcccgcctggccccttaaaaaaggtttttaaaccccttctcgtggggggggggggggcccccatttgttttgtggccactgggccaaagcgggttcccgagggaaatctc

SEQ ID NO: 218025 - DNA, 525 bp, Homo sapiens
gactcacacatctgcaattgtctggctattgcctgcagctggctgctttgtgttggccttgcctgtatgactggaacaactggggttcctcttcttccaggtttaattcatgaaatcctgccgtaccttcaataccaagatttatccagtctagcacagtactccaattgtgcaatgcacctttatatgtggataacatctggacccctccatctacctgtgccagtaagtaaaaatgctttctaatcctgcttcgatgaaattgtctgggggcttcatgtcattgttcttcagagttggatctcaattagtgtcctggaatacatgtgtcgtttcttagttaacccacccactttatttaagcgcatccaaagtaactacttcaaaaaatggtgtggagaagtagttttctgagttgcataaaaatatacatatgtttattgaataatttgattggtattgaggttttggcttgaaactgttttccgttagaatttaaaaattgttgcttggcttccagcattc

SEQ ID NO: 218026 - DNA, 396 bp, Homo sapiens
aaagcagagttctaagcagaatcctaaccctgcgagggtggggagaaaatcaatgttttgagctggtgtctgtttgcagcgaggtgctggtgaggccattttcatcaggaggaacggtggtggtggctacttctgggctttagatccacgcaaggtctcctaaatacaagtcactgtcatggtacacaatttagcaaaacttggaggctgattttccccgttgacttagctaagggtcaggaggaagctgtttagaagtacagaggttctgcatctgggagggtaaaatccaaacgcctctcatgctcagagggaaagcatgcctgcatgtttactatcactgctggcctacgtgcttgtgtgtctgaaataaaactgtaacttatataaaaaaaa

SEQ ID NO: 218027 - DNA, 396 bp, Homo sapiens
aaagcagagttctaagcagaatcctaaccctgcgagggtggggagaaaatcaatgttttgagctggtgtctgtttgcagcgaggtgctggtgaggccattttcatcaggaggaacggtggtggtggctacttctgggctttagatccacgcaaggtctcctaaatacaagtcactgtcatggtacacaatttagcaaaacttggaggctgattttccccgttgacttagctaagggtcaggaggaagctgtttagaagtacagaggttctgcatctgggagggtaaaatccaaacgcctctcatgctcagagggaaagcacccattcacgtcccataccctcaacgccgacagcgtttgcgggttttccttttccctgaaaataaaataaaaaaaa

SEQ ID NO: 218028 - DNA, 422 bp, Homo sapiens
cacctcagatcctgactgagttggtctgaggtacagccaagaattgatattttccaggctccccaggtgattctgactgcaagtagggctgggaacctcctagttatgttgagaatgtgctgggcaagtcagacagttaatcctgtatcactactttaccaagggctgtgttctttcctgccagaacttggccccattcagtgactttgtctgcaaatcaggatagctacttggtgaaggtgagtgaaagttttgggtttatggcttaaagaatggacaaataggcctggcatagtggttcctgtctgtcatcccaacactttgggaggctgagacgggaggatcacaggagttggaggctgcagtgacctgtgatcacaccactgcatgctagcctgggtaacagagtgagaccccatccg

SEQ ID NO: 218029 - DNA, 189 bp, Homo sapiens
agttttgagcacagagccctgccagcatctctcttctagaagaacctgcaggccaagaccctgattaatttttagcaaactaacatgaccaaaaacatttttttgggtgattttagtaattgaataggtaacattagctaataaggctgtttttgctgttttaaaatcagaactggttagctctccaat

SEQ ID NO: 218030 - DNA, 435 bp, Homo sapiens
caatttcttttcatatgtgctgcatctgctgataatttatgttctcaaagccttccttttcttctaagtagctcattaaagtgtttccctaaacactcttccctttctaaaactgagtctggcataagctattcaaatattaaaagttctactgaactacaattggtttgaaagctgcagtgaacagactggactgccttcttttaaagcacactttcccttttagcaatataattctattcaacttttgctttcaatgtgtggcaccaaatctctttcatctcaaaaaggcagcagtcttttcaagaatactctggaaacacctttcccttaaatgttttatttgattatcagcactgcattatcactattttctaattatcgtcatacggttttggtcacacttaatgaataaaaagtaatggtaaaaaagaa

SEQ ID NO: 218031 - DNA, 2195 bp, Homo sapiens
ggcacgagggtcgggcggagcaggcggctgcttgacagctgagagccgagcgggcggcgcgggcaggtccacgggaagcctacacgcccaaggtcatgccctgaccacagctgcccttcaggaggctggcacggagccacctggggccattgggctgtttgtcaagggtggggcagcagcaacttgccactcttcctccatgagcccagccagagcctccactgggcacttagcacaagaaaaaccctgcaggagccggatccagagcgctgggattcagcaggagtgccaggagaattcaacacaggtgtgctgcctcctctcctgccaggtgtgtggctgcacaggagtcttgctgatggtggaattcaagtcaccagtggccaaagtaccctccaggtgtgaagagttgcaggtcctccgaggagccgggagctgcaaggttctgaaaaagacttcaagaaactgactaatcgcgatggctgcccctgacgggagggtagtctccagaccccagagacttggtcaggggtctggccaggggccaaaggggagtggagcctgcctgcatcccctggacagcctggagcagaaggagactcaggagcaaacgtcgggccagctagtcatgctgaggaaggcacaggagttctttcagacctgtgatgctgaaggcaagggcttcatcgccaggaaggatatgcagaggctgcataaggagctaccgctcagcctggaggaactggaggatgtgtttgatgccctggatgctgatggcaatggctatctgaccccacaggagttcactactggatttagtcacttcttcttcagccagaataacccaagtcaggaagatgcaggtgaacaggtggcccagcgccatgaagagaaggtgtatctgtccagaggggatgaggatctgggcgacatgggcgaagatgaggaagcccagttccggatgctgatggacagacttggagcccaaaaggtgttggaagatgaaagtgatgtcaagcagctctggttgcagctgaagaaggaggaacctcatttactgtccaactttgaagacttcctgaccagaatcatctcccagctccaagaagcccatgaggagaagaatgaactggagtgtgccctaaaaaggaaaattgctgcttatgatgaagaaatccagcatctctatgaggagatggaacaacaaatcaaaagtgagaaggagcagtttctcctgaaggacacagagaggtttcaagcccgcagtcaagagctggagcagaaactgttatgtaaggagcaggagctggagcagctcacccagaagcagaaaaggctggaaggtcagtgcacagccctgcatcatgacaagcatgagaccaaggctgagaataccaagctgaaactcactaaccaggagctggcccgggagctggagcggacttcctgggagctccaggatgctcagcagcagttggaaagcctccagcaagaggcctgcaaactccaccaagagaaggagatggaagtgtaccgtgtgacggagagtctacagcgtgagaaggccgggctcctcaagcagctggatttcctaaggtgcgtcggtgggcactggcctgtgctgagagcacctcccagaagcctggggtcggaaggaccagtctgagggtcatccttgcctacgtgctggaaaaacgtgcctgctgagagagtgccctcaattcccttggtccccagtgcagtgtttggaccaccaagtagccactctattatgtttggtccgtttacacatgcgcccacatccagtttattcctcctggtggggaggctctgccccactcctctgagtccctcacaggactgtgcttggtacttgatctcatgcgagcagagctgggtttaatgagcatttaatctatgctagaaatattatctcgttcattgtcagcaaaactgttaggtgagtagggcagttcattcacaggaatttactgatgggaagttgatattagaggaaagaagtaatttaccacaggcgacacagctactctctgatggggccagaatggaaatccgtaactcggctgtgttctgttcatgtttgttgaatgagtaaatgaatcacaaacagagcaccaagaaaaagctttctcagccttcaaagacccccagcaataaactcaaagtttactggt

SEQ ID NO: 218032 - DNA, 525 bp, Homo sapiens
ggcacgagggtcgggcggagcaggcggctgcttgacagctgagagccgagcgggcggcgcgggcaggtccacgggaagcctacacgcccaaggtcatgccctgaccacagctgcccttcaggaggctggcacggagccacctggggccattgggctgtttgtcaagggtggggcagcagcaacttgccactcttcctccatgagcccagccagagcctccactgggcacttagcacaagaaaaaccctgcaggagccggatccagagcgctgggattcagcaggagtgccaggagaattcaacacaggtgtgctgcctcctctcctgccaggtgtgtggctgcacaggagtcttgctgatggtgcttttctggatgccagggatacagctgtgaaccaaagagacacctgccttcatggagcttacactccagaccagcgctgcacatcagaaatgcaacatgagccacttgtataattttccattttggccacattgttttaaaaaagtaaaagaaacagatga

SEQ ID NO: 218033 - DNA, 367 bp, Homo sapiens
aaaaaaaaaaaaacaataaaaaatagcaatacaacaataaaaaataatacaaataaaaacccaatacagtataataattatttacacagcatttacattgtattaggtattataagtaattagagatgatttaaagtataagagaggatgtgcgtaggttaaaggcaaatactatgccattttatatcagggacttgagcatccatggattttggtatgtgggggagttgggtcttggaactaataccatgtggatacccagggacaactgtacattcgctctttcttttttacattatcccctttcattcctctttcctcctcacctctttttagccacaatctcatagctgcacagcaactcgga

SEQ ID NO: 218034 - DNA, 659 bp, Homo sapiens
ttcctgggggcaatttacaggttctctggattagacagccccattgggacatcgctcggacccttcaccttctagcccacgcaggacaactcgctggcgtcggtcacaccttccgcaggtggttggaccgcctaagccagatgcacccggcccacctcccttagcaggggttccgaatagaagtgtgaaaatgtgtgcaatgacttctgcaaatcagaggacttgttgaaaggtccaggggtccaggcgtgaagggaaagcagccaccctgcggggcgccccctccccggcgtctcccgggcccggggcgctgcgcaggccgccgccgatcccagggcgcagccagcgcacctcgggcctagcaccattagaaaggcaaatcgcagagccggggtgcatttaaatgcccggccatgggccctgggggtgtctctccagcgggcgccgccgcaggggcctccagggcgcgtcgaccccggggcgctgggcgcggcccgcgggcgcacccaagacctcagcccgcagcgcccgggcgtccgcgccaggccggggcaggggagggcacccagagcccccgggcccgcgtccccggccccgcccgggcccctcggccgcctcccagggagagggcaagctccccggcccccgcccgcggccgc

SEQ ID NO: 218035 - DNA, 271 bp, Homo sapiens
ggacagatgaagactagtggatggaaagtctcagtagggtgcaagctttccaagtataacgactgagtccgagtcatctctgttacccagcacatggcctggcacaaaaggagcagggctgagtttattcacaaaaccagccttttactgagtaccctctaggtgccatgccctgatctgggtactgggaacaaactggtgaccaagatggacaggatccctgcctacctgcggcttatagtccagtgatgaacaaagatgctgagcatct

SEQ ID NO: 218036 - DNA, 595 bp, Homo sapiens
aaggtgtctagtaagtacaagatgaaacatcacttacctaacttcccttcccacaacgtcactaaagctatgggaaaggaatgaaaaaggtatcaactcacatgggcaaataaatggaaacaataacagcaatagacgggaaatttaacaaaatatttggaacacacccaaaaaactggatgaaaaagctcccattttagcaataaagggaagtagaatgatatttataggagttttaaaaatctattatgggctgggtgtggtcaaacattgggaggccaaagggggtggatgacctgtggtcaggagttcgagaccagcctggccaacatggtgaaaccccgtctctactaaaaatacaaaaattagctgggtgtggtggcacacccctgtaattccagctactcgggaggttgaggtgggtgaacttgggaggcggaggttgcagtgagccaagatcgcgccactgcactccagcctgggtgacagagcaagactccatctcaataataataataataatgatgtctttcgtttgtttgttttgagacagagtctctttctgttgcccagccggggtgagggggacaatctc

SEQ ID NO: 218037 - DNA, 415 bp, Homo sapiens
atgccatcactgtaatgagccactgtggaatcttgtggaaaggggaagtgattcaaaatccttgtgagctattgacatagggctgaagattgatacatctctgaggtaggacagtgagggtatattgctgtcctggccagctgaaagcaaactgcttctgatgggccttatggacaggaatggagaaaaagggatttggcaggtcaatagctgcatgccaggtaccaagggatatgttcatttgctcaagcaataaaaccacatctgctacagagcttcaattagagtcaccacctggctaagcttgtggtaatccattgtcagtctccaaaatccatctgtcttctgcataggccaagtaggtcagttgaattgggatatagtgggaatcacttctcctgaaacttttgagtcc

SEQ ID NO: 218038 - DNA, 379 bp, Homo sapiens
gagggacagcaggcacataaagatggcagatcttgcaggattttttcagcagagtaagagaaagagaatatgagtgggaaaaaaagtgggaaggggctttcaggtgtaaaagttttagaattgctgagaaaccaacacaagaagaatgcttccgtttttgctaagtatctgcttaatgccaaaaatttatatgccatgggtccagccagcaacatccaatcatctgtgagatgattgctcaggtcaggcattggcacagcaggcatgaaggaagattaaagggtcaagtgacccctgggcatcactgagttagcactgcagggatgaccccacagtcctggctagagagagcactgagaagataagtaggagcttatgg

SEQ ID NO: 218039 - DNA, 223 bp, Homo sapiens
gccaaggacacaggcagctgtatccatccacaggctggtgtatccatccaccaggcactacattagttgagtgtcctggtgccagctctgaatttagagatagtctcagtgtttttcactgttgcatcccaaaagcctagcacattgggttgtaggaagcacttttcagagaaactccctgatcttttcagtctggatcagaaatcctagagtggatgtgtgt

SEQ ID NO: 218040 - DNA, 426 bp, Homo sapiens
gaattttgtaccacgtgctcatattctatctcttactctcctctggccccccactttcctaaatagagaatcacacttacagttggtaaaattaaggtgatactatcgtttgtagaatgggaaagatttaaaagaggcataaagaaataaatttgattagtatgtaatgaccacagaactaaccttacaaagaaacatagcctctgaaaatattagcagtatgatcataagttgggtggatcatatccacccaggcaacatggcaaacaaaatatgctccttggatcgacctacaacatcaataatccaagtctcttattcagtagctcagggatagcagcaattcaagtcatggcttcagtcagtctaatctgaagggtatttgcatgaaatgtcattcagactaaatggctcagggtgaccttg

SEQ ID NO: 218041 - DNA, 432 bp, Homo sapiens
atttcagataagtgttatataatgatcactggatcagttagagtttttgaaacttttcccctagttaggtaactactaaaagaacattgtgaaaattccagagaagtataaggaagaaagtatcactcacctatattcctgtggttgagtagacagttttgatcagagggaggaatgtagaagggaaatttatttatttattataggagaaaggagaaggtatcagttattgagcatagatagacattcaaagaaaccttgcaggtcagccaggccttgagaggagatggggagagagaaagagacagaaatagacaaaagaaaacaggcagaactctggaatggtttgcattcttctgaaaacagtcagaggaaccaagaacatagtaggcatctggccaagtagagttcagtgcagttaaggtcttggtc

SEQ ID NO: 218042 - DNA, 419 bp, Homo sapiens
gataaatattcaaataagtaaacaacatttgcttgaagactggctttggttttcccgcctttcctgattcctcggaatcaggaaatattattaggctttgttaataataatagatggtttatgaccggttttgttcttgatttacttattcaaaacatagttatggcgccactcagaaacaggtgaattaaaaagaatgaagtatctttgggcctttctgaaagctgcaggaactcttgtggggaggaagaagatagggacaaagtgctcaaaccattttcttggaatctgtgtcagagaagctaagcttgtttgggatgcaacttggagacaagctctaaagcatgttttattttctccttgcgaagagttttttaaggaataaggaatgattagactgttagctccttacaaggtgg

SEQ ID NO: 218043 - DNA, 462 bp, Homo sapiens
cataaaacattgatgaaagaaatttagatatgaacaaatgaaaagatatcctatgtttatggatcagaagaattaatattgtttaaatgttcacactacccaaagcaaatatatagatttaacacaatcctcatcaaagttctggtggcattcttcacagaacagaaaaaaacaatcctggccaggtgttgtggttcatgcctgtaatcccagcactttgggaggccgaggcaggtggatcacgaggtcaggacttggagaccagcctggccaatatagtgaaaccctgtctctactaaaactacaaaaattagctggatatagcggcatgtgcctgtagtcccagctactcgggaggctgaggcaggagaattgcttgaatccgggaagcagaggttgcagtgagccaaggttgtgccactgcactccaacttgggcaacagagtgagacttcatctcaag

SEQ ID NO: 218044 - DNA, 305 bp, Homo sapiens
actgaatttgttgatcaattctaagagtttttttggtagaatgtttaggtttctctatatatgtgaccatgtcatctacaaacagggataatttgacttccttctttccagtttagctgttcttttttttttttcttgcctagttgctctggcttattcaaaggttgttgacacatacatagatacctattttaaaagagtggcatgtgagaaaaatacaggaaatagagcccaataagatatgaatatttgaatttgctgatccattctttcatataggactataagatttaactcttaaaact

SEQ ID NO: 218045 - DNA, 417 bp, Homo sapiens
ttgagctttcgttttttcatgaagatgaagggaaccctttgctaaaatagctcccttcttacctgtacatgaagaagttgtatccctgatgatggaaaatattcatgcatttataaaatgttgaattacatcatgttgcattacagagacttcacaatgtgtgaatggagctgtatagtacaaaaagagaacacctctggctgtgcttctatcatgggcaaatagattgtcatccaggaagctaaagtcatttaggtagtataataggtttgtcatgaaattatcaatagaagtgctatctaataatctaaattcaccaccaatatttcttaaagtttatagtgctttataccgtggcccttataaccagaaacataatagaaatggaaaaatgtggcttaaataaaaattggaaga

SEQ ID NO: 218046 - DNA, 512 bp, Homo sapiens
cacactgctttccacagtggctgaactaaatttacattccccccaacagtgtataaataagcattcctttttctcaacctcgccaacatctgttgctttttgacattttaataatagacattctgactggtatgagatggtatcacattgtggttttgatttgtatttctctgatgattggtgatgagccttttttcctatatttgtttgctgcatgtatgttttcttttgagaaatatctgttcatgtccttttcccattttctaatggggttgtgtttgttgaattaggttgcttatcaattctggatattagacctttgtccaatgcatagtttgtgaatattttctcccattctgttggtagtattcttcagtattggcaaaagcatttatcttctggagaaatcgattgggaagaggctaatgtcactgattccttaatagtgttcttccttatactattattagggttggtgcgttttcattgtttgtcttttgtttatttgtttt

SEQ ID NO: 218047 - DNA, 377 bp, Homo sapiens
actctctgatgtgtttataggatataaattatattgttccttttttggagatttttcttcatgttgataaaaatttttaaaggcatttaatgttctgaaactactttcctaattgtttggtgaaaggttgacaataattcgttctttaaaatctgaagattaatggatctatacctgcttgaggtaatttttaccttaaaaaagtctaacttggaatttcttgactatttgttttatcatgttatttatgctaaatggatgtgtgagaaatgaatttgatgctgctcaaatataccttttccttttgtattgtaaaacctctaaagcaggagcttcaatatagaaatggtctggaattgagtaaggcggatgaattt

SEQ ID NO: 218048 - DNA, 401 bp, Homo sapiens
aaacgtccacagagaatggaaaattactgaacatacaaagaacaaggaaaaatcacaacttgaatgagaagacacaatcaactgaggccaaaattgaagtgagtcagctgttgcaattaccagacaaggattttaaagcagccatcataaaagggcgtcagcagcaaactattcattctccttgaacaaatgaagaaatagaaaaatctcagcaaagaagaagaaattatttaaaaagtgaaagtgagtgaattgaaacattccataaccagaattaaaaactagcaggattagctcagtaataaagtggagaagacaaagatagatcggtgaatatgaggatagatcaatagaatttgctcagtctgaccaacaatgaaaaaggtagacaaaaaaaaaaa

SEQ ID NO: 218049 - DNA, 526 bp, Homo sapiens
ttttttttgagacagggtcttgctctgtcacccaggctgaagtgtgcaggggcactatcatggcttcctgcagcctcaacccctagggctcaacccctacctcagcctcccaagtagctgggaccacgggtgtgtgccaccacgtgggctaatttttgtattttttgtagagatggggttttgccatgttgcccaggctggtctcgaactcctgagctcaagagatctgattgcttcagcctcccaaagtgctgggattacaggtgtgagcaaccacgtccggcctgtgcatctctcttaatgaaacctgccaaggaatctggcaaagtcatggaaccgtgtggtccaggccagcaggatggaagatacagagcagccatgagtcccgaggctgtgacccaagccctcatcaaaacacctgccttgggggaaaaaactctgctagtagaataggtgtctaccagcagtcccaaaagctataggtcctagagggcagatgccacaaatgataaggccccaaaggtaa

SEQ ID NO: 218050 - DNA, 439 bp, Homo sapiens
tcctgtttatatttagtgtgtttttataattctcctggtaaatatgatgtgttttaaagacactctccaaaattacaaagaaagtagtcatttactacacgctcttaactgattcatacaagacagtttactgatatgtaaagcgttatttatattttttcaccgtgacagagaaaaaatatagttttacatttcaactaatatcccacgtgcatacatattatgcatacatgtaattccctattaaaaatgaaaaatcctgcccctttctcaactacattaatttcagggctgcctgctagactctaaagctacagctttaagttcatcaatataagaggcagtttccaacacatcctttttgccaaacctttaccaagggtaacactccccagcaatcacatctctcaccgtaagtcttgatttaggggagggggag

SEQ ID NO: 218051 - DNA, 500 bp, Homo sapiens
tttttttttttgagatggggtctttctgtattgctcaggttggtctcaactcctggacttgagcagtcctccaccttggcctctcaaagtgctgggattacaggtgtgagcccccatttcttttttgcagcctcacctttctttttcctctcctactgttggtgatcacttctgctgagtatctcttcgtcttacttctgccactgtcccatggctcacctttcctgccagtccccaccggcacacggcaccgcacttgcctctataggagtgtggcagccactgccagccatcttccccaacgtccatttctcccctttcccctgcgtgattgcctctgggaataaaagaccacatttcccaggctccctcattctggccttggccatgtgactaactgctggtcaatgggcgcagtttgggatttgcaggaaggctgattaaatgcaactgattccgggttaacaggaagaccctttttgcccttctgtcttatcccc

SEQ ID NO: 218052 - DNA, 394 bp, Homo sapiens
gaagttaggagactgcagagaacagtgtaaattctatgtggaactctatgttgctgctaaaatggataagggaaattctatataaagaagtggacatgactgggccccgtggctcacgcctgtaatcccagcactttgggaggtcgaggcgggtggatcacctgaggtcaggagttcaagaccagcctggccaacgtggcgaaaccccgtctctactaaaaatataaaaattagctgggcgtggtagcatgcgcctgtaatcccagctacttgggagacttgggagaactgcttgaacccaggaggcagaggttgcagtgagtcgagattgtgccactgcactccagcctaggcaacagagtgagactgtctcaagaaaaataaaataaaataa

SEQ ID NO: 218053 - DNA, 337 bp, Homo sapiens
ccaggagttcaagaccagcctgggcaacatagtgagaccctccccccatctgtacaaaaaaattacaaaattaaccaggcattgtggctcgcacctgtggtaccagctacttggaaggctgagacaggaggatggcttgagcctgggaggttgaggctttaatgagccatgatcatgccactgcactccagcttgggcaacagagtgagaccctgtttccaaaaacaacaaaaactggtttcaaatatattgctacattggaattctccataaaggaattaattgttgataacaatgccctcagtatactatttgtcaatacctataacaatgcaac

SEQ ID NO: 218054 - DNA, 277 bp, Homo sapiens
gagatgtgtaggagaggcagagccactactgaaagttcccactagagcagtgcctagtgaagctgtgggaatgaagcagcccccaagaccacagaactatagggccaccagcatataactgcaccctggaaaggctgcaggcataagactccaacctgtgagagctgctgggtggactgagtctaggaaagctatagaggtagggctgcctgaggcctttgtgagcccaacctttccccagtgggcccagcctctgtcctagtgtgcccaggatttt

SEQ ID NO: 218055 - DNA, 568 bp, Homo sapiens
tagcgaagtgaaataaagatattttcagacacataaaagctggaagacactttaaggctgaggtgggcagatcgcttgagcctcagagttcgagaccagcccgggcaacatagtaagaacctgtctctaaaaaaaatacaaaaatagccaagcatagtggcacacgcctggagtctcagttacttgggaggctgagcctgggaggtttgcttgagcctggaaggtcaaggctccagtgagccataattgtgtcattgcactccagcctgggtgacagagcaagactctcaaacaataaataaaaagctgaaagaattcatcaccaacaaacactataagaaatgttaagggatgtctttcaggcagaagaaaaataccagatggaaatctggatctacacaaaggaatgaaaggaatgacaggcattgaaaatggtaactacctgagtaaatatatatgcctgtttttcctttttaaatctctttaaaatataattgaggaatgatatcagcaaaagggcagagtaagacagctccaagctcccatcacccaacagaaacatattaaa

SEQ ID NO: 218056 - DNA, 385 bp, Homo sapiens
cagaaaaatagctgaaaaatcaaatcatttggagattaaagaacacacttctacataacaaatgggtcaaaaaagaagtctcaagaaaaaatttttaaatacttgaaactaaattaaaatgaaaattcaacttaaaatttgtggcatggaacataagcagtgcttagaaggaaacttatagcaatgaatgcatatattagaaaagatgatttaaaatcaataatctaagcttccaccttaataaactaaaaaaggaagaacaaattaaatccaaagtaaacagaagaaataactagaacagaactcaatagagaaaaccaactataatcaaaagctagttcttagaaaagatcaataaaattgataacccttcagccaggcagag

SEQ ID NO: 218057 - DNA, 329 bp, Homo sapiens
agtttctcagaaagaaacatttaataggcgtttatgaacagaaggcaagtcagggatggcaccaagataagatggtggatccctgtgccatcacccccacccccccgacccagggcttctatagcataggggaagggtaatgcgggcttcagcagggatgtgtatggccagacacggtgggcggatcacctgaggtcaggagttccagaccagcctggccaacacggtaaaacctcgtctctactaaaaatacaaaaattagccaggcgtggtggcaggcgcctgtaatcccagttactcgggaagctgaggcaggagaatcgcttgaa

SEQ ID NO: 218058 - DNA, 258 bp, Homo sapiens
tgagaaaggaccatggtttgaatgggagcaccaatcaggttggagtgggaatgtcaaaagctctagatccttaggatctgctgctagagagggcttggaggtgattagaggggtcttgtttgctgaactaaacaaacttatttgctgggaatgacttggtaatgttagaaggaaatttgcttttttgggggagagggtgacaaagtcttgctctgtcgcccaggttggagtgcaggggtgcaatcatggctcactgca

SEQ ID NO: 218059 - DNA, 485 bp, Homo sapiens
agctacaaaaagacacggaggatatttaaatgcacattgctaattgaaagaagccaatgtgaaaagattacacactgtgtaaaatcaactatatgaccttctggaaaaggtaaaattatgaaaacaggaaaaggatcagtggttgccaaggcttggggttagggatagagatgtgcaggtggaacacagaggattttaagggcaatgagactactctctatgatactataatggagggtacatgtttttatacatttgtccaaatccatagaatatacaccaccaagaatgaaccctaaggtaaactgtggactttgggtgattatgatgtgtcaatgtaggttcatcaaatgcaggaactgtaccactctggtgaaggacactgatagtggagaggctgtgcatttgtgaaggtggaggatatacagctaatctctgtaccttcctctgtacttcagttttgccatgaatctaaacttctgtaa

SEQ ID NO: 218060 - DNA, 249 bp, Homo sapiens
gtttaagtttgttttcctttgtggtcctttaatcatccaaggtcaaaacttgggtgttatcctacattcttatttctttttttgatcgctcttgctgcccaggctggagtgcaatggcgtgatctcggctcaccgcaaccactgcctcctgggttcaagtgattctcctgcctcagcatcctgagtagctgggattacaggcatgcgccaccactcccagctaattttttgtatttttagtagagacag

SEQ ID NO: 218061 - DNA, 401 bp, Homo sapiens
gccttgccggcaccttgaacttccagcctccagaactataaggaaataaatttctgttgtttaagtctgagtggcttaacaacagtttaagctgctgttatggtagcccaagccgactaatacaacacttaaggatttcagtcactgagtggaaccaccttagaatgtgaaagacaatgaggatatacacacagcctccttcccctgtgtttggagggtggcttcaaattccttctgttttatgtgctgtgtagggaaaaaaaaatctgtaaaattatgtgagtttgtaattgatagattggttctctttcgtgcaaatagtgcttatagtttaaaagtcctagaaaaaattcacagtcacattttctgtatgtaactacatttatgtaagtgaaaacttg

SEQ ID NO: 218062 - DNA, 255 bp, Homo sapiens
tcctctggggcttggcggagggtcgggagataggaagtgtttgaaggtgacatgcactcagatctataatttactttgaattgcaacaagtacaactataaaattggattaatggacagatacacaataaggcaaatatagtgaaaagttaattgtcaaatctaactgctggttattcaagcgcttattgtccagttcttttaactttcctacaggtttggaaattttacacgatatttaaaatatataatttaa

SEQ ID NO: 218063 - DNA, 523 bp, Homo sapiens
cgatgtaaattattggcttctacctttacgtcagcgttttctccatctctcattttgtcatttaacacactgtgctacaatcatgtggcagcttgatcatctccactacactatgctttatttctcgacaaagctcagcacaaatggcttctgatttaacggatggacgcaggttctgcactgacttctgtttcggaaccacagtaaggctgtgcagcaggagccacgaaacccgactccacctagtgctttaagacgctactgacccgtccctttggcgaggggacaacttcgaagtatgacctggccaggaggagccacaaagcgcgattagcctcgctgcatttcaggtacaggccggcgccagccgtgcctcaccaggtccaccggctccgagcagcagcaagcccggtcggaaagcgaaagtggcctcgccatgtccagaccggccagctcccccgcctacctgaccccgccccgcagccgcacctgggtccgagtcatcgccgcggccgccacggcc

SEQ ID NO: 218064 - DNA, 458 bp, Homo sapiens
aaacaactccatggaactcagaaggagagtccccaaacatgaatttggcagtgatttttcaacactgtccagggagaacataagccagctttccaccatcatttggacaaatttttagtgataggacacatataatttatcaggctttattgtggtttcattttcttttggtttagattcaatactcaccagataacttctcagatgccacagtatgaggaatagggtaccctgtgtggtaagaggactattccccccattgtaaccaaataaactggcatttggcctatatggtaattttcttcataaactttataaaaaataaatatatattttgttgaggatacagggctagtgaaaaataaaaatatcaatataacattaaccttttagaaattagttagcataaattaacccttggaagcctaatcaattccatgtgtccagaaaaaaaaaaa

SEQ ID NO: 218065 - DNA, 621 bp, Homo sapiens
atatctctgcattgatctcccaggtgatgcaactcttctctgtgctctgcctacaggggacactgtgacatatctctgcactgatcacccaggtgatgtaaatcttttctagtctctgcctacagagggcgttgtgacatcactctgcacggatcacccgggttatgtaactcttgtctaggctctgcctatgggggcattgtgacatctctgcactgattacccaggagaggtgacacttgtctaagctctgcctagagggacattgggacatatctctgcactgatcactgaggtgatgtaaaacttgtctaggctttgcctacagtgggatttatgaaatatctctgcactgatcacccaggtgatgtaactcttgtctaggctctacttaccgggcgtattgtgagatatctctgcactgaaaacccaggagatgaaactcttgtctagtctctgcctatgggggcaatttaacaaatcactgcactgatcaccgagatgatgtaactcttgtataggctttgccaacagggggcattgagatatatctctgcactgatcaccgaggtgatgcaactcttgtctgggatctgcttacagtggacattgtgacatatc

SEQ ID NO: 218066 - DNA, 339 bp, Homo sapiens
ggaacaatgcaactggaagactttagtcccctccctaggaataggatgtgtgttgatattcctagtgtgtgtctaaacatggtctgcatttagcttgagtgttgacattcatcgatccctaaatgtttcaaaagagggaagcattccagcctagcttttcagggaagcagagaatcaggtttttcaggactgggggcaggaaggcctcttaggacaatcaccacagcttcctaactcatgcccctacccccatcggctttgtctctcctttgtcctccacagacctgccatcataatatgatcttaccacctccctattcagaattcttcaccattagc

SEQ ID NO: 218067 - DNA, 603 bp, Homo sapiens
tggaaaaggtaagtaaattgggcacagaaccaagtcacagccactaactgcacagtcatgagaaatgaaaactatgggaaaaagagttttgaaatgctaattgaaaagcaagatacaaaagtataaaaaatgttttaaagagctataaatgtgccataatacaacaatgattaaatgcttatacccatagagaaaaatactggaaggaaatttcaccagtacaaccatggctgtgccaaaaaagcaaacatgagtgatttcctgttgctgttgtcctctcttctctcaatgttctatcacatagttattgttagaatacaaaaacaaaatggataaggcaaatttacgaaaggtatgttaatactaagtgtcaataatctgagtgtttgtacacacttatttagtaagcttgtaaaaaaaattcagtggttaaaaattcagtggttatttaacaaaaactttttcaaaatattaaattgatacaacactacaatgtatcataatttccttcttacttgcaacaaactcctggatgaacaaaatcttcctcaaatgtctagacaacgtatgtatgtattgcctacacaggaagacagttttgca

SEQ ID NO: 218068 - DNA, 486 bp, Homo sapiens
ttttcaaattattagaaaaacatattgcatatattaaattatattctttatatattttgtctgattctctattattagcagattctctattattattaatagatttttttaaaaagcccctgtaattaaatagaattaaataggattactctttattgtatcagataataatgaaatatcacagtacgtactgaagtcaaataattcatcaaaatgaacttgctgctgactttcatgtgtactctattgaacatatgaattacacttttatttactattatttttatcttccttctgcttttccattttgtttcagaatgttcttctaatcttcaggatctcctctcttgttgatttcattatcaatattttcttagctatcataattcttttaggtattgtcatgattttgatcatcaggcttaaaattttatttttcattgcaatataatgaaataaattttggacattttgaagcttttgtaa

SEQ ID NO: 218069 - DNA, 667 bp, Homo sapiens
tgaaatggagtctcgctctgtcacctaagctggagtgcagtgctgtcatctcggatcactgcaacctctgcctttcaggttcaagcgattctcgtgctttagcctcttgagtagctgggattacaggcatgcaccaccacacccagctaatttttgtatttttagtagacacagggtttcgccatgttggccaggctggtcttgaactcctgacctcagatgatccacctgcctcggcctcccagagtactagcattacaagtgtgagccactgtgcccagcctgttaaatacttttgtaggtaaatgccattactccccttttagcaaggtgaaagtaactttaaccttttaacaaggtgaaagtaacctgtccaaggtctatatttaacaaaagtcaaagctacttttgtttttatctttaaaagataaggactcagcctgggcatggtggctcacgcctgtaatcccagctacttgggaggctgaggcatgagaatcacttgaacccaggaggcggaggttgcagtgagccgagatcacactactgccctccagcctgggtgacagagtgagactctgtctcaaatatattattacttcactaactcaaactccgcctaaatcaatcctactgagcttagaagttcatcatgccccagacccct

SEQ ID NO: 218070 - DNA, 740 bp, Homo sapiens
aagtagcaggttgttgtatgtacgttcttactgataacccactggtcagtgtttttgcgttggtcttatattttggtaatttcaaaaatactcagtaatatgttgttattaatgcacagaagggatgcgtgtgtctaaatgcttagatttgcttgctttgtcttaggtttggtgtgtctttttaaacttgggaatctaggtatatgctcttaaaaagtacttcttggggaattagaaaagatttctaagataagacattgattttgttatcttagcagtgtaatcaaaacaaatattataacctcaggactaattcttaatgaactttgctgaaattgaaagttgttgctgacaacttaagagcatttcttctcatcgtcatcagccattatgaacgcccttgttttcttgctgtcagctgtttgagattgtcatgatgatgttaaattatgttcagtcttctgagtgttttgttgattaatttgtgttactactcttttattaggatttatgttgtctggtgtattgtagcatctgtatttctgtcaccattgaaaatcagttagaaaacatcagtaacttattttgttcacttggaaaagctttccaagttaacattcctctacaattatcatggttaacagaagtaatagaaagagcatggactttagaatcagaagatgttagactgtacaacacttttctgtgttcctgaagaaaaaaatagaataaagacaaaa

SEQ ID NO: 218071 - DNA, 501 bp, Homo sapiens
cgccactctcacaggcctctcctctccagaagcccctcccccagacaaaagcctagagggagagaggccggagtccccaggcctggcttgcagcctggctctgcccacgacccgctgcggagtcttgggcaagttctattctccctccgacccttgatcttggtttctttgaattgggagctgcggcaggtgaggggtctcttagagctctttccagaataccatggaagggaaaaatcctaacggctcaaagaagtttgctaagggtcaggaagcaggggatacacgggcctctcctacccgtgtaggaggcaggaagggtcaaagcagaggccagctctcccagactgtgggggaagggctgggggggggaggcccacgaggactggccacagccaccatgcaggaacgtcctggtgtggcctggcctggctctcacagacccaaggcttccgtgtagaatatgtctgtggttattaaacagacaggcctagtggaaac

SEQ ID NO: 218072 - DNA, 767 bp, Homo sapiens
cttgtaccactttaaatttgcttccacgcagaatagcagccaggcaaacagatgctccatcctaaggtgtaggaatttcttgtaggcggaaatgatttgttaggcgaaagcttccgaaacggttttccatttcacagtctcttccggtgccaaagtccagcaccaacgcctggttctggggtccgaccctcatgcagccgccgccgcgctcctcgtggctggacgagccggaactagcttcctccaggagctgctgctgctgctgccgtcactgggcgccgccgcacagccaaacggcgttcctccctctccgcttccctgagaactcgcggcccttctccaccaccaccagcatccgcggggaccgagaccggacgaaagtggcggggacccaaggcccctgaggagggggcgccgggcccgggagggggcgcgggacgggcatgggaccgggtgggcgcggcggcagcccactggcgccacttcgagctcgaggagacccagactgatagagcgcggaggcgtttccagaccgcagcgacaggcgtttccagaccgcagtgacaggcgtttcaagtccgcagcgcggagacaagcgcaattttggctttccacttcaccgcccacacttcactcggaactgtcttattttcacattgcttattgcaaatgtatagaaatactattcactcgtttttatttccacttccctctcccatcgggcagccattctaaggtgtttaacatgtaatttttgttctctttaa

SEQ ID NO: 218073 - DNA, 128 bp, Homo sapiens
tgtggattaccattattatggcacatacagtaattataaagacattgggataatagcagacaggcaaattctattctatatactttgcttaagaaattgtggtgggccggacactgtggctcatgcct

SEQ ID NO: 218074 - DNA, 550 bp, Homo sapiens
tgagaaagtgcctgtctggaatatggaatcgcaagccgctgcagaaatccaccaagcagcatctcctctatggaacaaaagccttaatctgtagggggaagaggcaacacactgaaagcacaaacctgaggacattgatggagacttgctgcagcttggtgaagagaacaagagaaaaaaagcttgacatctaagaaaggggcaagaacatttgctcggcccaacataattatggaagaaagaacaggaacatctgtgaaggccataccactaagaatcaagctaacaatgcctgcctaggaggtttaattggaacgtctgcctctgctacctatccaacaagtgttgactaaaaataatactgaaacacagtgggaatgctataagagacagattcactctggcaagcagtgcaagggaaagacacaaagccaagtataaaacacaaaaccaagcagaggtcaaactttaaatccagtacaatttctgactagattaacagaaagctccatgttgatggtctaactaaaggaaagttatgctcatcttc

SEQ ID NO: 218075 - DNA, 352 bp, Homo sapiens
aatctaatcccaacagtaaagatatacaaaatgaggcaaaagaaacaggaaaacttctgagcagtcagtggagttgtcataaagttcatgcgctaaaatgttttacttttataaaagtaaacaacaaaagaaaaatcattagggcttatagtctgatatttacttttagtttagaaacaaatgtttacagaagtaagatttcaaaagtaaaagtaaattttaaatgtgcaaagttttatcagattgtttttctggtttctagcatatccctcttccctgcaaggctaattagaatagagatagaggacatctgttggcaacagcaaaagtaataggcaaaagacagcaaaga

SEQ ID NO: 218076 - DNA, 581 bp, Homo sapiens
ttttattatggtacctgtattaatgtggatttatccaatatgtgatatggtggtatgattagatatacattaatggaggatttttttttcattgtacatattctacttggtttgatcatattataattctcacagctaatgtccatgtttctacagaggttcagcaattcaggatattattttcaaattaccaaaatgagataatttaactcccttttacttttgcattatttttagtggaaaaaaattaaatggtagtattataagaagctttatgctgtgtatgctagtcttattgtatatatgtactgaaagtacctttgacactgtacttaattggatttaatttcaaagaattgtaacaggaattatgtgagagaatagaaaatatatggaacttaattaagtgctgtccatatgtaaaggtaagattcatgactattgtttgatgtaacttatttattttacatcctgatactgttgtataatagcacaaaatgcatgtctatgaggaaaaacttgctttttctattttactttgagtttttatgtgtaataaaattatgcttaaaataggaaag

SEQ ID NO: 218077 - DNA, 668 bp, Homo sapiens
ggagattttatctgtgacacccaaggctcttaccttagaacttttatttgacctctcataagccttactagtatttggttaatgttcattatatttaggaactcagcaatttcaaagtccatggccacatattttattgtttgtgtgtgtgtgcaaagcctagtgttattgcaaatagccacatacttttaaaacaagtatattaatgtctacatttgtcatgctgggtttcaaacgcaaaggactcattaaaattagtcattaatcacttagtaatatatattaaatattaatgtttgtcatgaagtatgtaaaacaacccgtttgtattgtatcctctataatatgctcagggggtagaaaatacttgattttattgtctgtaatgtgtaatcagagattgaacgaccaagtaatgtagcattatccaaagattatttgttatatttcagttgtaatggagttaattgcatgcctttcagataaaaaaatactgtatgtacatccttaattcatctggtacaactatgtttaaaagtgcttaataaagtattcagtactatttaggtaataaaattagtagtgacttacttaattttatgtagcatcactttcttaagcctgtttttaaagtgatttattaccagacgggcaaaaaggcaattttt

SEQ ID NO: 218078 - DNA, 281 bp, Homo sapiens
agctctttatcccacttgtagggtcaggacagaggggatcagcagcaggagagctgcccacttagtgtggcagcagacctaggtgtgtccctgagctttacagatccagcgccgggttctgggcagagcaccttagttatgagcaggctctcaggtactcagtctccgctgtatttccgtgttgcgatattggtggaggggacgatggaggacccttactgacaattcccggaaacacttaacatatcttatttcaatttctaaattggtaagtaggattt

SEQ ID NO: 218079 - DNA, 458 bp, Homo sapiens
aaacctctccacttcttgtgtttcatgccaggtagtgtttgtaacttcagaacccgcccttaccttacctacctaccatgttatgctcatttcacctactgtcccctgctgtatagggagtgccttgagggcagagatcatgttagttttgttccctcttctgtacagagggtggagcccagtacctggcacagctgaaggaggaatgtgctgctgctgtctctgtatttccaggtactccttgttgacctctagccaagacaaggaacctccttatgagatgtcatcttctgagctctcttgatggagggaataccacggtgatgattgaatatgaaaagtcttggcacagtggctcacacctgtaatcccaacactttgggtggccgaggtgggaggattgcttgaagccaggcattgagaccatccttggccaccaaacgagaccccatctctac

SEQ ID NO: 218080 - DNA, 250 bp, Homo sapiens
aattctctgtcttctactcctctcaggactcctttattcaggcatctatacctcaaatcttctgcaccagtatgatgtgtgagattttaggtaaagctaacctaccatgaatagagtaaatgattgttcattgctgtattcacagtgcctgatacaggtctgacatatagtaggcacttaacaaatgtttgttcaattaatggatgaaagcaaaatgggaaaatcaattttaagttttgtgtctaacaaa

SEQ ID NO: 218081 - DNA, 385 bp, Homo sapiens
gtagaatgtgctctctcaccaggctatcttttcacgacatcctaaaatgagaattacgatggaactaagaaagtgtataaaagaacttcatgaatttctgtacacacacctaaacataaagtgtttcaatatgtttcacagtaagagaataatacaggccagattatacaatacttctgtgcacaccagatggttgtaaagaaagatcagcgagaaaggctttggaagttttaatccttctttccaccttttttcccccgcatttagtaaatcacaacctacctgactggcatccaattatcagagatattcagtgtttaagctaccctctttaaaagaaaatgatctcttcttattcctaaggtagaataaatgtgcacctgtg

SEQ ID NO: 218082 - DNA, 735 bp, Homo sapiens
ggtgtggtggtgcgcgcctgtagtcccagctactcaggaggctgaggtgggacaatcacttgagcctgggaggtctaggctgcagtgagccgagatcatgccactgcattccagcctaagcaacacaacgagaccctgtctcacacaaaacaaaacatggaagcaagcacggtggaatgatccccacccccactttttttttttccaaaagacagagcctatcacattacatccacatctgtgtggaatatggagaaaagcctggaggccacacacccaaatcccaagggcgcttctctctagctggtgatgtttcctaagcttttacactggctctgaggcagggccactacagcagtggcctcacaccttataatagttccttacagtgtttttaatcataaacagaaaagctaaacttttctaggaatacaacttctccctctgaaacccctggagactagaaagggtttatttttatgagctcccagtacctagaacagggctcggaatacagaggatttaaaaattaaatacttaaggccgggtgcggtggctcacgcctgtaatcccagcgctttgtaatgtggaggcgggcggatcacgaggtcaggagatcgagaccatcctggctaacacggtgaaaccctgtctatactaaaaataaaaaaaaattagccgggcgtggtgacaggcacctgtaatcccatctactcgggaggctgaggcaggaga

SEQ ID NO: 218083 - DNA, 501 bp, Homo sapiens
agagaaggaaataaagggcatccgaattggaaaagaggaggtgaaactattgctgtttgcagatgatatgatcatatacctagaaaatcctaaagactccaaaaaaagactcctagatttgataaaggaatttagcaaagtctcaggttacaaaatcagtgtacacaaatcagtagcactgctatacaccaacaatgactaagctgagagtcaaacaaagaactcaatcctggctggacatggtggttcacacctggaaaccaagcatttcaggaggcccaggcatgtggatttattgagcccaggagtttgagaccagcctgggcaacaagggagatcttgtctctacaaaaaagttacctgggtgtggtggtatgcatccatagtcccagtgactccggaggctgaggcagaaggatggcttgagactgggaggtcaaggctgcagtaattgcaccactgcactccagcctgggagacacagtgagactctgtcttaaa

SEQ ID NO: 218084 - DNA, 462 bp, Homo sapiens
gaggcagaggcttcagccccagtcaaaccctcagatgatggcagccccagccaacgtcatgacgcagcctctggagagaccctgagccagggccacccacccgaacttaccctggatcctgacccacagaaactgcaagtcgataaagcagcccacagggagcagaggttttcattaccatcattctcagaggacacgactggggctcagagaggggaagaaacctctccagcttgcacagctgagtcattccccaaatggatgagaccccagcacaggagaaatgcatgacagccagataataaacccgcatatcagaactgtcagatcgtcttcagagcaaaaggcaacatgctctcccgagaacccatgctcttaaccagtgcattgagctgcctattttctcacacctatagcaacatgaaattgacaaatattttgatcatagccaacttggtaagt

SEQ ID NO: 218085 - DNA, 500 bp, Homo sapiens
cacctagctttattctcaggaccgtccttcccgcggtctaacttcagtttctcctgcttcaactagagtcctctttttattcctctcacagggatatagtgaatggtcagtgcatttgcaggtggggtgatgatctattttggacactggtacaggagagggtcttgcaatataagaaacaagagctgttatgaaccaccaccttctgggtgcattgggcttatagactcagtaatttattttcttcctgatctgacatcctacatggggcagccctcccacaattattaccttattcgaagtatgaaccaacatgtccaccccacccccaacccccatcacgctttgcctcaggaagcgctgcatgctgggtatgtagcttctctcctttctactgttaactcacagccagggagtaggctgttaactgcagctggcagcttgtcctggtcttagcattgcttagccctgttggggaagctatctttggaacctgggga

SEQ ID NO: 218086 - DNA, 425 bp, Homo sapiens
ttctgcatgggggtgatagcagcctgtaccgcagtggtaacagtaggaatggtgagaggtgcctggaaacagcttgcttgtgaagaactgataggacttcctgatagatttgatgcaaagggttaaaaagacagggatcaagaataaaccaatttttttttaccggagcaactgagtaaactatgatgcctcttactgagataagaaacctttggtggggtgtggtggctcatacctgtaatcccagcactttgggaggccaaggcgagtggatctcttgaggtcaggagttcaagactatcctggccaatatggtgaaaccccatctctactaaaaatacaaaaattagccatcatggtggcaggtgcccgtaatcccagctactcaggaggctgaggcaggcagatcacttgaacctgagagg

SEQ ID NO: 218087 - DNA, 385 bp, Homo sapiens
caagaatgtgccgagccactcagctcttcctgagctttgttttgtaactaatggcatatgtttataatatagctgcccggggtaggatgtagtcataggcttggggagttttgagtagagatgggtgactcctatcagaggtgaacgtacctcctttctcactttgtttctgtgttcaagacatgctagtgttaatgtttccctatccggctatactgtcaattaattcatctgacatttttgttctgtaggcctctgctgcttgacactgaactatgtgctttgggtgattccgaaatgaacccttcttccatggcctggctttaaggagcctagtctgatatgggaactaagatagatgaacaaatagctccaacatctggca

SEQ ID NO: 218088 - DNA, 325 bp, Homo sapiens
  misc_feature (20)..(20): n is a, c, g, or t
tcactcggtccgcttggatncggctattggtgggtagggtgctaggagagggataacattaggagaaatacctaatgtagatgatgggttgaaggatgcagcaaaccactatggcatgtgtatacctatgtaacaaacctgcacattctgcatacatatcccagaactttaataaattaagtaaataaaaaagaaaaaaagaaaaaataagctaattatctgttttaatataattgttacattaccaaaataataattaattttgtttattattagtgatgtttgtagttgatatggagctttaaagagtaagtgcactttttgg

SEQ ID NO: 218089 - DNA, 715 bp, Homo sapiens
ctgcggggtgacacggggcttcgccttgggaaggggtcgagggaagcagttagacggctgccgggcggcggctgccgcgcggcacacaatatttatttaattgcccaactaccactgatgaagatatattggagtgactgctgaaattgcctttttgtttttaaccagaggacagtccatttgtttcacttctttttgctttccttactgctatgagctttactgaacggctgaaaaacttggaaaataaaatggacatgctgtagtcttgaacataatttttttaaggaaaacttaaagtgccagagtgaaagccagaatggcatccagagagaggctctttgaactttggatgctttattgtacaaagaaagatccagattacctgaagctgtggttggacacttttgtttctagctatgaacaatttttagacgttgactttgaaaagctgcctaccagggtagatgatatgcctccaggaatatctctgcttcctgataatattctgcaggttctgaggatccagcttctacagtgtgttcagaaaatggcagatgggttagaggaacaacagcaagccttgtcaattttgcttgtcaagttcttcattattctttgcagaaatctatcaaatgtggaagaaattgggacttgctcgtacattaattatgtcatcaccatgacaacactctatattcagcaattaaaaagc

SEQ ID NO: 218090 - DNA, 661 bp, Homo sapiens
ctgcggggtgacacggggcttcgccttgggaaggggtcgagggaagcagttagacggctgccgggcggcggctgccgcgcggcacacaatatttatttaattgcccaactaccactgatgaagatatattggagtgactgctgaaattgcctttttgtttttaaccagaggacagtccatttgtttcacttctttttgctttccttactgctatgagctttactgaacggctgaaaaacttggaaaataaaatggacatgctgtagtcttgaacataatttttttaaggaaaatttggatgctttattgtacaaagaaagatccagattacctgaagctgtggttggacacttttgtttctagctatgaacaatttttagacgttgactttgaaaagctgcctaccagggtagatgatatgcctccaggaatatctctgcttcctgataatattctgcaggttctgaggatccagcttctacagtgtgttcagaaaatggcagatgggttagaggaacaacagcaagccttgtcaattttgcttgtcaagttcttcattattctttgcagaaatctatcaaatgtggaagaaattgggacttgctcgtacattaattatgtcatcaccatgacaacactctatattcagcaattaaaaagc

SEQ ID NO: 218091 - DNA, 166 bp, Homo sapiens
ttccctttctgttgtagggtagatgatatgcctccaggaatatctctgcttcctgataatattctgcaggttctgaggatccagcttctacagtgtgttcagaaaatggcagatgggttagaggaacaacagcaagccttgtcaattttgcttgtcaagttcttca

SEQ ID NO: 218092 - DNA, 308 bp, Homo sapiens
ggtagatgatatgcctccaggaatatctctgcttcctgataatattctgcaggttctgaggatccagcttctacagtgtgttcagaaaatggcagatgggttagaggaacaacagcaagccttgtcaattttgcttgtcaagttcttcattattctttgcaggtatctagtagaaaaaataagctagttttcactcataggtgggagttgaacaatgagaacacatggagatgaggaggggaacatcacacactgggcctattggtgggtagggtgctaggagagggataacattaggagaaatacct

SEQ ID NO: 218093 - DNA, 416 bp, Homo sapiens
aatacatctaaattgttcagcacagtgccaagcatgaagaaaaatcacccttttgaccattgttattattagaagtgtgacatatatgctgtgtaatctacaggagggcacctgtctcttcacgtgagtgctattatccaaagagaggtagaaaagaattctgtctatatcatagagcaatgataagcaaagcaaccccagactgtagctaatatatattttggggcatcactctgtaggttctagtttgcttttcagtctgtcagttgggtggtagctactctccagcctggcatcaggcacccagcagagagggaccggcaatcaccaggctagtgcagcacgaatgtatattggtttatgaaagcagctacctcccacatgcaagagaagagtaaaagagaagaatagaagag

SEQ ID NO: 218094 - DNA, 442 bp, Homo sapiens
gaaaaagttaatttaactaaatgttaagcttgtagtaggaacggtgactatattaccatgtataattgctcacctatgttggaagttaaaaactaaactggaaaaaaggcagtatttttagtagaggaaagggatgaatataaaattatttatggtaagccaggcacagtggctcacgcctgtactcccaatgctttgggaggctgaggaaggccactcacttgaagtcaggagttcgagaccagcctggccaacatggtgaaaccttgtctctattaaaaatacaaaaattagccaggtgtgatggtatgcacctgtaatctcagctactcaggatgctgaggcaggagaattaattgcctgaacccaggaggtagaagttgcagtgagctgagatcatgtcactgcacttcagcctgggcaatagagtgagctccatctc

SEQ ID NO: 218095 - DNA, 1326 bp, Homo sapiens
tgtcttggcaatcctgtggaaaatcagtggccacagacgtatgaatttacttctgtattgtcaattctatttcattgatctatatgtctgtcttgttactggtacaacacagtcttgattactgtagcttcacagtacgttttgaaaatgagaaatgtgagttctccaattttgtttttatttttcaagattcttttggttgtttgtagtcccttgcatttctgtatgaattttaaaattagctcatcaatttctgcaaaaaaataaagaagccagctgatattttgataagggttatactaatctgtagatcagtttgggaagtgtcattatcttaactatttaagttttccaaatttatgaacacaggatgtcttcccatttatttaagtcgtctctaatttctttcaatgatattttgtagttttcaatgtagaattcttctgttgctaaagtatttcactctttttgatgctaaattaaatcgaactgtttttaaatttcatttttagattgttgcttgtgaaaaaatatgccatgatttttgtatattgatcttgtatcctgccaccttgctgaactgatttattagctccaagtgtttttgtgcattcctcaggattttctatgtttaaaaaatcatgccatcttgatggttttacttcttcctttccaatatagatgtcttttctttttctggcctaagcacccttgctagaacctccagtacaacgttgaatagaagtgatgagagtagatatctttgtcttattccttatcttagaagaaaactttttggtgtttcactattaagtatgttagctatttttcacagatgccctttataaggctgaggaaattcctttccattcttagtttattgagtggtttttatcatgaaagtgagtcaaatcgtttttctgtgtctattttcttgtgccctttattcattaaatatggtgctcatgttaatttttctatgttgaaccaacattacatttttgggctaaatatgactttgccatggtataattccttttattagttgctggattcagtttgctagcattttattgaggatttttgcatatatattcacaatggatattggtctgtagttttcttttattgtgatgtccttttttggttttggtatcagagtaggcctggcctcacagaatgagttggggagtgctccatcttcttttattttttggaagagcttgtgaaggattggcattaattcttcattaaccctttggtagcgttcaccagtgaagtcatctggtcctcaacttttctctgtgggattatatcaataactag

SEQ ID NO: 218096 - DNA, 462 bp, Homo sapiens
gttctcagtggaatttttctttaataaaaagcagcccctaaaacatttctaacaaaaagcaccctgagaaatcaagctgcaaacatagataagcaagctagaagtttgcataggtaaatgccggcagctatgtcagaagccaggtacattcaacatggaggatatctcctctcttctctttgtcgcccccgtgtgtgggtgtcatggcaacggccaggtaaaccccatttgcataataaaagattcacgggctatgtaaatggcacacctgacacctggtcaatccaatctcctgggccctatgtgaatcaaatacggcctccttaagcccctctataaaatggaccacatctctccccaaacccagaaatccgcttgaacatccccttcctctgcatgaggaagcgcgctctctctctccctcctttcttttgcctattaaactttacgctcttaaaccca

SEQ ID NO: 218097 - DNA, 212 bp, Homo sapiens
gcatgatctcacgtatatgaaatccccagagggctggggagctacattcattcatttattcaaaatatatttattctaaatgcaacacagtatcctggattgtatgtgtatactggaatagaaaaagaacatcagtgggaaaactggtaaaatccaaaaaataagccaataaaggagataaaatgagacaatcggcaatacttatttaatac

SEQ ID NO: 218098 - DNA, 580 bp, Homo sapiens
agaggcttttacctcacatatgaagcctcttcctgtttattgcagattgcagcttgttctggtgaaaggagccagaattgctagcgcttctaagttcattcgcctgttgggaagaataattttattttgagctaccaaacaaaataactgtgaacctactgatgatgagatcaggccagcttttaacctacaggattctgttggtgtcttttcattctgggctttcattgtattcactattaaatggtttggatacaaaaattacctggagagacctaagatttgtttttgatggtgaatgttggaccaggctgctgaagcggagtgtgcagctgaacatgtgggacaccagtgtccattctgcattgatgctcagactcctctttaaaacactccgcccacatttatgtagctgttaaattacaaataatactctcctcctttaagcagcataaagatggtgttgcaggctgggcatggtggctcatgcctgttttctcagcactttaggaggctgagatgggaggatcacttgctcaggagtttgagactggcctgggcaacacagtgagacttctgt

SEQ ID NO: 218099 - DNA, 321 bp, Homo sapiens
tctttcataaccacccccaatcccctgtccttatctcatttcacttctaagcttccaggcccagctcctccaggcctaccacgtgatcttagagaagccttcccccaccccatctccagttaattacttcccctctctgtaccttggtttcctcatgggcatatttaggagttgggttagatccatggtttgcagactgtgtgcccaggagccctggggtgttcaggaggaggaaggttagaggaatgccaaggcatagggctttgagaggcattattttatctgttttagatattgtgctttggcttaagatgtcatctg

SEQ ID NO: 218100 - DNA, 429 bp, Homo sapiens
ttataaatttaagggataataacagtgcaaaaatgtagcatatgaactctgtatttaaaaagtgtccatttatcttctgcatgattttattttcttatttttaggcaaattgtattttctataaatttaataaacagtacctatgtgccattatgtttacacatgatagtaagtattcgtgaatgtggctaatgagttcttcccaaagactaagcattcattaatagtaaatctcttttccccatgagttatattttatgtgaacatttaccaaacatccaaataactggatttctcttctagaggttttacagtttcgggacttacatttaaatctttactccattttgagtttacacttatatgagataatggtccaatttcattattctgcatttggatagtcagttttctcaatggcatttatta

SEQ ID NO: 218101 - DNA, 737 bp, Homo sapiens
ggagagccttagaatttatctatcctgtttatgtttaagatgaatcttcctaagaaccacacagcttatccagcacattgttgaagtaaaatgaaataactctaactcaaattttctaatctctaaccatgtgtttttttaatcactctataattcagtgtactgaatgatttgtttgtgttgccataagccttttgcaactatctttacattaaaagttatgacatatgcattgaaataaaagtttaaatattttagattggatgattaataaatactttaaaaagtaaaaaatataatttttaaaatgtatcataataaatataacacgaccttatatcccaaaatgactcatgtgattttaaataaatctattaacaaattcaagatgcaagaaatatcagatcaaccggaacaacacttattataaaggaaaccagacaccaaatcaaataaccaaagttatagcactgcctactcagcaaaacaaaaattgcagcacaagtgctgatagcagtaagcctaacaggttatctgagttcatgtggtaaacaaagtattcattcatgttgtgaataaatttgggcactcaatattccacacaacggagtaatctagaaaagaatcaggttcacctttacctttttcttttgttctctctcatttttaattttgtaaagcaccttaaggatacttaacagaaatctctaagaaacaaacaacgtgcaaaacaatag

SEQ ID NO: 218102 - DNA, 566 bp, Homo sapiens
tttatggatcctcaagacagttttagcctccagctaacgcatcagtgtcactaaaccagaggtcaaaaatcagtggtccgtgggctgcacctagtcccacaaatgtgcctttttggcccacattttttctgtgaattggcatttttttaatgcaaatgttttatattaaattccagatttctggcttcctttggaaacctgaaaagtctgacattggattcacatggcagcagtcagtcagagccacacgcctggcccagaaactacttttaacttgtttttagtagccaaaacatgggagcttcatgctgagaaaggcattcttgttcagttaaaagggccaaaataattctcttttatatgaaaaatatttatagatttttttaaacaaattgcacatattatcaccaaatataaagaagaaaaatgtgctgtaactgctacaccttaacagagtgtttctgtactctgttctcccctgcaacttttgcagcctgtgcatgcgtgtgctctttgtaggtgtagcaatactataggagcagttgcaaatctagttttaccaatta

SEQ ID NO: 218103 - DNA, 3349 bp, Homo sapiens
gcctgcgggggcggaaacgctttgtctgtccggcaagccgacggcccgctgctggcctccgtgacgcggcctcctccgcgcctcgcggcatggcgtcggaggggccgcgggagcccgaaagcgagggcatcaagttatcagcagatgtcaaaccatttgtccccagatttgccgggctcaatgtggcatggttagagtcctcagaagcatgtgtcttccccagctctgcagccacatactatccgtttgttcaggaaccaccagtgacagagaatgtttactcagtgcctggctcccagtatctttataaccaacccagttgttaccgaggttttcaaacagtgaagcatcgaaatgagaacacatgccctctcccacaagaaatgaaagctctgtttaagaagaaaacctatgatgagaaaaaaacgtatgatcagcaaaagtttgacagtgaaagggctgatggaactatatcatctgagataaaatcagctagaggttcacatcatttgtccatttacgctgagaatagtttgaaatcagatggttaccataagcgaacagacaggaaatccagaatcattgcaaaaaatgtatctacctccaaacctgagtttgaatttaccacactggactttcctgaactgcaaggtgcagagaacaatatgtcagagatacagaagcaacccaagtggggacctgtccactctgtctctaccgacatttctcttctaagagaagtagtaaaaccagctgcagtgttatcaaagggtgaaatagtggtgaaaaataacccaaatgaatctgtaactgctaatgccgctaccaattctccttcatgtacaagagagttatcttggacaccaatgggttatgttgttcgacagacattatctacagaactgtcagcagcccctaaaaatgttacttctatgataaacttaaagaccattgcttcatcagcagatcctaaaaatgttagtataccatcttctgaagctttatcttcggatccttcctacaacaaagaaaaacacattattcatcctacccaaaagtctaaagcatcacaaggtagtgaccttgaacaaaatgaagcctcaagaaagaataagaaaaagaaagaaaaatctacatcaaaatatgaagtcctgacagttcaagagcctccaaggattgaagatgccgaggaatttcccaacctggcagttgcatctgaaagaagagacagaatagagacaccgaaatttcaatctaagcagcagccacaggataattttaaaaataatgtaaagaagagccagcttccagtgcagttggacttggggggcatgctgacagccctggagaagaagcagcactctcagcatgcaaagcagtcctccaaaccagtggtagtctcagttggagcagtgccagtcctttccaaagaatgtgcatcaggggagagaggccgccgcatgagtcaaatgaagaccccgcacaatcccttggactccagcgccccactgatgaagaaagggaagcagagggagatccccaaggccaagaagccaacctcactgaagaagattattttgaaagaacggcaagagagaaagcagcgtctccaagaaaatgctgtgagtccagcttttaccagtgatgacacacaagatggagagagtggtggtgatgaccagtttcccgagcaggcagagctgtcagggccagaggggatggacgaactgatctccactccttcggttgaggacaagtctgaagagccaccaggcacagagctccagagggacacagaggcctcccaccttgctcccaatcacaccaccttccctaagatccacagccgcagattcagggattactgcagccagatgcttagtaaagaagtggatgcttgtgttaccgacctactcaaagaactggtccgtttccaagaccgtatgtaccagaaagatccagtcaaggccaagactaaacgtcgacttgtgttggggttgagggaggttctcaaacacctgaagctcaaaaaactgaaatgtgtcattatttctcccaactgtgagaagatacagtcaaaaggtgggctggatgacactttgcacacaattattgattatgcctgtgagcagaacattccctttgtgtttgctctcaaccgcaaagctctggggcgcagtttgaataaggcagttcctgtcagtgtggtggggatcttcagctatgatggggcccaggatcagttccacaagatggttgagctgacagtggcggcccgacaggcgtacaagaccatgctggagaatgtgcagcaggagctggtgggagagcccaggcctcaggcacctcccagcctacccacacagggccccagctgccctgcagaagatggccccccagccctgaaagaaaaagaagagccacactacattgaaatctggaaaaaacatctggaagcatacagtggatgtaccctggagctagaagaatccttggaggcttcaacctctcaaatgatgaatttgaatttatgagagttcttgcctgtgtgtctgtattttgggtaaggaggggaggtctgaaaaagactttggggctttttcttctgtttttcatgacaatgtaatttgtgtaactgttgaatctggaaattgatcagcattaaagggcacatgaagcagtgtctgcaggcgttcagtgctgcggagcctgttaaaggtcactcagatgtgcaggtgttaatcttctctaaaagcctggttatacagctctggctttctgagcacactacggatctggaaaatactggaaaatgtgatacttagaatactttggctgctaaggaaacttcctctccattgcagaatagctgagccaagtgagtgagtttgcagaaagcaggtggtgagctcctgcctgctggaggttgccatggagggccattcctgcccggcaacagcaccgtcctgcagggagccacttggcagaagggtgcagggctgctggtgtcagagcaagagggctacagggaaagggccctttctcaggggatgtagcttttttaaaagatttgggaacacttggaggatttgctaaaatgagcctcagaaggaaaattggttttctaacctgtgactttttgaaatgaattattcctttcagtctttatttttcaaagaaacaatgtgtattgaagtacctagatttgtttgataatcaacaaatctttcctttttcaatgaacatattctgaatgtggtttctgtcttagaccaggaggacagagtttgctttcatattttccctgtaagtaagagggcttatttattttaaataaagagtaattatt

SEQ ID NO: 218104 - DNA, 3469 bp, Homo sapiens
gcctgcgggggcggaaacgctttgtctgtccggcaagccgacggcccgctgctggcctccgtgacgcggcctcctccgcgcctcgcggcatggcgtcggaggggccgcgggagcccgaaagcgagggcatcaagttatcagcagatgtcaaaccatttgtccccagatttgccgggctcaatgtggcatggttagagtcctcagaagcatgtgtcttccccagctctgcagccacatactatccgtttgttcaggaaccaccagtgacagagcagaaaatatatactgaagacatggcctttggagcttcaacttttccacctcagtatttatcttctgagataactcttcatccatatgcctattctccttatacccttgactccacacagaatgtttactcagtgcctggctcccagtatctttataaccaacccagttgttaccgaggttttcaaacagtgaagcatcgaaatgagaacacatgccctctcccacaagaaatgaaagctctgtttaagaagaaaacctatgatgagaaaaaaacgtatgatcagcaaaagtttgacagtgaaagggctgatggaactatatcatctgagataaaatcagctagaggttcacatcatttgtccatttacgctgagaatagtttgaaatcagatggttaccataagcgaacagacaggaaatccagaatcattgcaaaaaatgtatctacctccaaacctgagtttgaatttaccacactggactttcctgaactgcaaggtgcagagaacaatatgtcagagatacagaagcaacccaagtggggacctgtccactctgtctctaccgacatttctcttctaagagaagtagtaaaaccagctgcagtgttatcaaagggtgaaatagtggtgaaaaataacccaaatgaatctgtaactgctaatgccgctaccaattctccttcatgtacaagagagttatcttggacaccaatgggttatgttgttcgacagacattatctacagaactgtcagcagcccctaaaaatgttacttctatgataaacttaaagaccattgcttcatcagcagatcctaaaaatgttagtataccatcttctgaagctttatcttcggatccttcctacaacaaagaaaaacacattattcatcctacccaaaagtctaaagcatcacaaggtagtgaccttgaacaaaatgaagcctcaagaaagaataagaaaaagaaagaaaaatctacatcaaaatatgaagtcctgacagttcaagagcctccaaggattgaagatgccgaggaatttcccaacctggcagttgcatctgaaagaagagacagaatagagacaccgaaatttcaatctaagcagcagccacaggataattttaaaaataatgtaaagaagagccagcttccagtgcagttggacttggggggcatgctgacagccctggagaagaagcagcactctcagcatgcaaagcagtcctccaaaccagtggtagtctcagttggagcagtgccagtcctttccaaagaatgtgcatcaggggagagaggccgccgcatgagtcaaatgaagaccccgcacaatcccttggactccagcgccccactgatgaagaaagggaagcagagggagatccccaaggccaagaagccaacctcactgaagaagattattttgaaagaacggcaagagagaaagcagcgtctccaagaaaatgctgtgagtccagcttttaccagtgatgacacacaagatggagagagtggtggtgatgaccagtttcccgagcaggcagagctgtcagggccagaggggatggacgaactgatctccactccttcggttgaggacaagtctgaagagccaccaggcacagagctccagagggacacagaggcctcccaccttgctcccaatcacaccaccttccctaagatccacagccgcagattcagggattactgcagccagatgcttagtaaagaagtggatgcttgtgttaccgacctactcaaagaactggtccgtttccaagaccgtatgtaccagaaagatccagtcaaggccaagactaaacgtcgacttgtgttggggttgagggaggttctcaaacacctgaagctcaaaaaactgaaatgtgtcattatttctcccaactgtgagaagatacagtcaaaaggtgggctggatgacactttgcacacaattattgattatgcctgtgagcagaacattccctttgtgtttgctctcaaccgcaaagctctggggcgcagtttgaataaggcagttcctgtcagtgtggtggggatcttcagctatgatggggcccaggatcagttccacaagatggttgagctgacagtggcggcccgacaggcgtacaagaccatgctggagaatgtgcagcaggagctggtgggagagcccaggcctcaggcacctcccagcctacccacacagggccccagctgccctgcagaagatggccccccagccctgaaagaaaaagaagagccacactacattgaaatctggaaaaaacatctggaagcatacagtggatgtaccctggagctagaagaatccttggaggcttcaacctctcaaatgatgaatttgaatttatgagagttcttgcctgtgtgtctgtattttgggtaaggaggggaggtctgaaaaagactttggggctttttcttctgtttttcatgacaatgtaatttgtgtaactgttgaatctggaaattgatcagcattaaagggcacatgaagcagtgtctgcaggcgttcagtgctgcggagcctgttaaaggtcactcagatgtgcaggtgttaatcttctctaaaagcctggttatacagctctggctttctgagcacactacggatctggaaaatactggaaaatgtgatacttagaatactttggctgctaaggaaacttcctctccattgcagaatagctgagccaagtgagtgagtttgcagaaagcaggtggtgagctcctgcctgctggaggttgccatggagggccattcctgcccggcaacagcaccgtcctgcagggagccacttggcagaagggtgcagggctgctggtgtcagagcaagagggctacagggaaagggccctttctcaggggatgtagcttttttaaaagatttgggaacacttggaggatttgctaaaatgagcctcagaaggaaaattggttttctaacctgtgactttttgaaatgaattattcctttcagtctttatttttcaaagaaacaatgtgtattgaagtacctagatttgtttgataatcaacaaatctttcctttttcaatgaacatattctgaatgtggtttctgtcttagaccaggaggacagagtttgctttcatattttccctgtaagtaagagggcttatttattttaaataaagagtaattatt

SEQ ID NO: 218105 - DNA, 995 bp, Homo sapiens
gcctgcgggggcggaaacgctttgtctgtccggcaagccgacggcccgctgctggcctccgtgacgcggcctcctccgcgcctcgcggcatggcgtcggaggggccgcgggagcccgaaagcgagggcatcaagttatcagcagatgtcaaaccatttgtccccagatttgccgggctcaatgtggcatggttagagtcctcagaagcatgtgtcttccccagctctgcagccacatactatccgtttgttcaggaaccaccagtgacagagaatgtttactcagtgcctggctcccagtatctttataaccaacccagttgttaccgaggttttcaaacagtgaagcatcgaaatgagaacacatgccctctcccacaagaaatgaaagctctgtttaagaagaaaacctatgatgagaaaaaaacgtatgatcagcaaaagtttgacagtgaaagggctgatggaactatatcatctgagataaaatcagctagaggttcacatcatttgtccatttacgctgagaatagtttgaaatcagatggttaccataagcgaacagacaggaaatccagaatcattgcaaaaaatgtatctacctccaaacctgagtttgaatttaccacactggactttcctgaactgcaaggtgcagagaacaatatgtcagagatacagaagcaacccaagtggggacctgtccactctgtctctaccgacatttctcttctaagagaagtagtaaaaccagctgcagtgttatcaaagggtgaaatagtggtgaaaaataacccaaatgaatctgtaactgctaatgccgctaccaattctccttcatgtacaagagatcctaaaaatgttagtataccatcttctgaagctttatcttcggatccttcctacaacaaagaaaaacacattattcatcctacccaaaagtctaaagcatcacaaggtagtgaccttgaacaaaatgaagcctcaagaaagaat

SEQ ID NO: 218106 - DNA, 3220 bp, Homo sapiens
gcctgcgggggcggaaacgctttgtctgtccggcaagccgacggcccgctgctggcctccgtgacgcggcctcctccgcgcctcgcggcatggcgtcggaggggccgcgggagcccgaaagcgagggcatcaagttatcagcagatgtcaaaccatttgtccccagatttgccgggctcaatgtggcatggttagagtcctcagaagcatgtgtcttccccagctctgcagccacatactatccgtttgttcaggaaccaccagtgacagagaagaaaacctatgatgagaaaaaaacgtatgatcagcaaaagtttgacagtgaaagggctgatggaactatatcatctgagataaaatcagctagaggttcacatcatttgtccatttacgctgagaatagtttgaaatcagatggttaccataagcgaacagacaggaaatccagaatcattgcaaaaaatgtatctacctccaaacctgagtttgaatttaccacactggactttcctgaactgcaaggtgcagagaacaatatgtcagagatacagaagcaacccaagtggggacctgtccactctgtctctaccgacatttctcttctaagagaagtagtaaaaccagctgcagtgttatcaaagggtgaaatagtggtgaaaaataacccaaatgaatctgtaactgctaatgccgctaccaattctccttcatgtacaagagagttatcttggacaccaatgggttatgttgttcgacagacattatctacagaactgtcagcagcccctaaaaatgttacttctatgataaacttaaagaccattgcttcatcagcagatcctaaaaatgttagtataccatcttctgaagctttatcttcggatccttcctacaacaaagaaaaacacattattcatcctacccaaaagtctaaagcatcacaaggtagtgaccttgaacaaaatgaagcctcaagaaagaataagaaaaagaaagaaaaatctacatcaaaatatgaagtcctgacagttcaagagcctccaaggattgaagatgccgaggaatttcccaacctggcagttgcatctgaaagaagagacagaatagagacaccgaaatttcaatctaagcagcagccacaggataattttaaaaataatgtaaagaagagccagcttccagtgcagttggacttggggggcatgctgacagccctggagaagaagcagcactctcagcatgcaaagcagtcctccaaaccagtggtagtctcagttggagcagtgccagtcctttccaaagaatgtgcatcaggggagagaggccgccgcatgagtcaaatgaagaccccgcacaatcccttggactccagcgccccactgatgaagaaagggaagcagagggagatccccaaggccaagaagccaacctcactgaagaagattattttgaaagaacggcaagagagaaagcagcgtctccaagaaaatgctgtgagtccagcttttaccagtgatgacacacaagatggagagagtggtggtgatgaccagtttcccgagcaggcagagctgtcagggccagaggggatggacgaactgatctccactccttcggttgaggacaagtctgaagagccaccaggcacagagctccagagggacacagaggcctcccaccttgctcccaatcacaccaccttccctaagatccacagccgcagattcagggattactgcagccagatgcttagtaaagaagtggatgcttgtgttaccgacctactcaaagaactggtccgtttccaagaccgtatgtaccagaaagatccagtcaaggccaagactaaacgtcgacttgtgttggggttgagggaggttctcaaacacctgaagctcaaaaaactgaaatgtgtcattatttctcccaactgtgagaagatacagtcaaaaggtgggctggatgacactttgcacacaattattgattatgcctgtgagcagaacattccctttgtgtttgctctcaaccgcaaagctctggggcgcagtttgaataaggcagttcctgtcagtgtggtggggatcttcagctatgatggggcccaggatcagttccacaagatggttgagctgacagtggcggcccgacaggcgtacaagaccatgctggagaatgtgcagcaggagctggtgggagagcccaggcctcaggcacctcccagcctacccacacagggccccagctgccctgcagaagatggccccccagccctgaaagaaaaagaagagccacactacattgaaatctggaaaaaacatctggaagcatacagtggatgtaccctggagctagaagaatccttggaggcttcaacctctcaaatgatgaatttgaatttatgagagttcttgcctgtgtgtctgtattttgggtaaggaggggaggtctgaaaaagactttggggctttttcttctgtttttcatgacaatgtaatttgtgtaactgttgaatctggaaattgatcagcattaaagggcacatgaagcagtgtctgcaggcgttcagtgctgcggagcctgttaaaggtcactcagatgtgcaggtgttaatcttctctaaaagcctggttatacagctctggctttctgagcacactacggatctggaaaatactggaaaatgtgatacttagaatactttggctgctaaggaaacttcctctccattgcagaatagctgagccaagtgagtgagtttgcagaaagcaggtggtgagctcctgcctgctggaggttgccatggagggccattcctgcccggcaacagcaccgtcctgcagggagccacttggcagaagggtgcagggctgctggtgtcagagcaagagggctacagggaaagggccctttctcaggggatgtagcttttttaaaagatttgggaacacttggaggatttgctaaaatgagcctcagaaggaaaattggttttctaacctgtgactttttgaaatgaattattcctttcagtctttatttttcaaagaaacaatgtgtattgaagtacctagatttgtttgataatcaacaaatctttcctttttcaatgaacatattctgaatgtggtttctgtcttagaccaggaggacagagtttgctttcatattttccctgtaagtaagagggcttatttattttaaataaagagtaattatt

SEQ ID NO: 218107 - DNA, 563 bp, Homo sapiens
acattaccgtatctaaggaatttaacttatctgctatctaataatcaaaatttatgctacaacaccgcttcaagttgcacttcactgcatcacttgtactgtttctgtcccatggttgctccacttaattcatcccataccacttataaggtaattacgtgtatctgtgcatctcacaaaatacgcacatactctgttgtcagtacactgacttcacattatgatcctattttcttcatatggccatttaaataaaactggcttatccaacatcaccttcttcagaacaacaaattaatatctgcctcataccaaacagggtagcgaaacttccacctaccatctattgtttgataaggcaatgccaatgtcaaccaaaccaataataatcctaaatggcagatggaaatccttaacaaggaatcctgatactcaatctctatgcacatcactacatatccttaagaaaaggactccatggtgtgcatacaaagatttcctcatcacaggctgaaaagcaacctagaacaggtattctggaaccgagcccaggggaggcggat

SEQ ID NO: 218108 - DNA, 863 bp, Homo sapiens
gggaagtgtgcacagtaaacacaacaaggacaatggcatcacagggcgatggcatcagtccaagagtaccttgggaagagcaattctgtggatgaaccgcagtgcaggtgcacaggcttctaatggtctcgcctggcagacctagcgtcaccccagctagcctgaccataagactcacctgaacagttcattaaatacacaggttcctgaaggttatggtgaacttgcaactggtaggaaatgtccatatggaagagcccagaatcatagtccacacacaaagctgatccctccctaccctccaccaggccctgtactccccagttcatagaggccagaaatctatgttgttaacaagaatccctggcaagtctcattgggcaaggttagggaatactggcttagtgaagaatgatggcttgcacatctatagtgaagtattacaaaaacctcgcactgtactgtctcccaatcaaaccagccaaactctccactctggccagatggttctcaactcgactgcacatggaataacctaaggagctttaaaaacactgacgctaaacacacagatcaatggaagagaattgagagtcaagaaataaaccacacagttatggctaatttcctcaatgaggaaagcataatcattgcaacaaatgatgctggaacaactggatatccacaggtgaaagaatgaagctgggccctttcctcacatcacacacaaaacttaaccaaaagagatcaaagtcatagctggtagagctaaaactataaagttcactaaagaaaatacaggagtaaatattcattaccttgggctaggcaacggtttcttaaccatttcttaaatacaacac

SEQ ID NO: 218109 - DNA, 696 bp, Homo sapiens
agcccctggcgctgctggtttgaggaccacactgagcagggaggccctgggatgttgggatgggtgtgctgtgcccgctaccatacgccaactggattgaaggaacagaacagtacaggcggttccatcttcctgggaagacagggagttacagatcgttttaagggaatcccaggactctagaagtctccttcatgggtttctctttctgcacctttcctgtgaatggtgtatccacccgggtcccctcctgcctctttgcacactctctgtggtgtaacttgcacccagggcttcagcaaccatctatgcactgagacctttctgttcttggggtggcattcctcgggatttagtgccaggacacacctgtgtgcgcattcactgggaaaagtctgcagaatctacaccaggccttcctggagggcgtgttcctccatctacattcgtgatggaacaaccagttattgtcgccgggacaccagtgcctcatgcacaccatcagccacgggagttttactgttacaagcttgtcctcttaggcacattccctcatcctgaacctgctggcagcagctcctttaggggagcgagggtggctgcttgtcccttccgtccttgggcagccagcgctcagctggatgcatgcagtggaagtcaccttctgcctccactcctgagcaggatgtgctctcc

SEQ ID NO: 218110 - DNA, 521 bp, Homo sapiens
ttgattttggagcatagtgttaataaaggttagtctcttcagatatgagccagttgacttggctatataaatagctgttgtcacgggcaggtcagaggtatgtgtgtggatagactggatctgtaaccaccaatcagaaatcaatcagcaatcatttactgagcatttgctatgtgcctggcactatactaggagtggagctttgaaagattttttaaaaatacatgagctataggctaggtacagtggcttatatctgtaatctcggcacttcgagagaccatgggtggatcatttaaggctaggagtttgagaccagcctgggcaacatggcgaaaccccatctctacaaaaaatacaaaaattagccagaagtggtggcacacacctgtagtccagctacttgggaggataaagtgggaaaaatcacctgaacccgggagtcagggctgcagtgagccatgatcgtgccactgcactccaggctgggtgacagagcaaaactctgtctcaaaaaaaaa

SEQ ID NO: 218111 - DNA, 565 bp, Homo sapiens
gcgtggtcgcggccgaggtacatatcgttttcttctgcttttgaagaactacccctaagacacaaacatgattggtttcataggaaaggttaagtggtttgcctgaaatacacgtcatgtaaactcctagggtcaagaagagaaaaaaaaggaaaaagataaaccaaaacgagtgagagagagaaaaaggagaaagaggaagaaggatgaaggagaaggagaagaaagggaagaagagaaaaaagaagatgaaagcaaaaaaagtcctttactaggaatataattatttcttttttctttcagccacacaaaagtgtaaaactaaaatgatctttaagatctacagtgagttcttccaatttccctttccttaaaacaggccttcacataggagccacatatcttctatggctggaagaccttatggtaatgaaaaagggaggagggagtttcctctgaatcacaggtgcttttcattttcaatacctaaagtaggacactccaatctatgcttgtcactggtgcttttcaaatgaggtgacaactgtcttgctgacttctatac

SEQ ID NO: 218112 - DNA, 437 bp, Homo sapiens
caagatgaatgcaggaaagaagggcttgatcagctctaagaatgcagcaggcaggagacaggacacagctcatgaactggaaaacacctggtctgaagggagccctcctcattcggggataagtaactcaaacgagaaacaaccacagtaccgaggggccggaaaaacaaccccacagtctaaggcagctggaagtctgccccgtggattcggagaaaaggtatgctgtatggaagagtttattaaaggcagccggagagaattttggaaatgatatgcattttgccttgatgtaaaatgtaagaaaatatgccctctttgaaacaagattgtacaaatctgcaggctgagtagaaaggaaagtctttgaagtaagaggagcaaggaaagtgctgatgtatgagcagaattaaaatgtgcatgaaaaggctaggcgc

SEQ ID NO: 218113 - DNA, 496 bp, Homo sapiens
ctctccttgtaagaatctgcattagccaattctgattaattttcctaaagtcgtgtcacaaaatgcaagagtcaacatttcaggacagacaaccccgttgaggattctcaggggaagtgtaaactcagcagggagttcttcaagaggaaatttaggcaaagagttcaggctttgggttcaaactgccttctttttttaaattttattattattatactttaagttttagggtacatgtgcacaacatgcaggtttgttacatatgtatacatgtgccatgcttgtatgctgcacccattcattcaaactgccttcttgcacagccagctctgcctaccctctgggtgaccctgggaacctaacccctatgcacctcagtccctgcctctgtagaatggagatcacaacagccctacctcacagggcttggaggatgtaggagatgatgcttcacaccatgtacacagcaagtgcttaataaatgttggcaaccatc

SEQ ID NO: 218114 - DNA, 455 bp, Homo sapiens
tgtctgctgagatcgccctccagtgtgaacgcctcagcatctatggtggaggaaaatgagctgagccacagggctgctaagtaaaattttacttggaatttctttaagcctttctgcatcaatgggatctcacacttaatcacaagtgaagttctttagattttaatttgtatgaaaagaaataccacgtcacactattcaaattaatactcaggctattcgaaatcatctcatcctgccacatctctctttaagggtatgtaggataccatgacctcggctgtcattcatgtttcccccacaaattatttttaaggtggaagagactgcactagcttcctcacagcaccttaagatttcaagagatcggctgggcgtggtggctcacgcctgtaatcccagcactttgggaggccgggagctggtggataacctgaggtcgggagttcaagacc

SEQ ID NO: 218115 - DNA, 370 bp, Homo sapiens
tggacaaggcagcaaatggtattaaggatacttttggtaagagaatagtttttatcagagcaggctgcaggtagaatatttctcaattactatttacagctgagtaactgttttcctatggacataaaaatatacactctgcaaatgattttttaatgaaaaatgacagcctattttctgcaacttggttttttacataataatcatggacatacatctaagattgcatatgtagatctcctgttttgatgatcacctagaattctgttttgtggttgtgcctttaattgaccaatgtcttgctatttactgtaaatggtgcaagagtgaacatcttgaaaagggcggcagagtggtcttagcaaaaaaa

SEQ ID NO: 218116 - DNA, 561 bp, Homo sapiens
aggatggtctcgatctcctgacctcgtgatctgcccgcctcggctcccaaagtgctgagattacaggtgtgagccactgagcccggcccagttgtcctcatcttaacccattacttctgcaaagaccctatttccaaacaagttctaaagtactgggagttggtacttcaccatatggtttttggaagggacacagctcaccctgggccgcggatgctggctcctgttagaggactgtgctttacaggcagcgcctgtgcccctgtgagaactctcgctgcaatctttgctttctcacttttacagaccaacaagccctaccacagaccaggctgggccttggctctggccacttcgtgtcgcgtgcctgctgactggcgcttgtctcctgtgttgccagcctgcttgttagagctcagaggcagggaccttgcccccacatctcctgaatctcccacctcgggcagcctggcaaggccatagagatatgaacagcctgcccttccagctcctggggtacagcccgatgctgttgacattgcctccacctcccttccttgt

SEQ ID NO: 218117 - DNA, 518 bp, Homo sapiens
gcactggccacacctgataaaccaacctatataattagtatgggttggagtgcttatgaagctcacctagcaccaagtagtgctatctacatcaccttagcactttgggaggccgtagtgtcaggcatatcgcctgagtgtcaaggagttcaaagccagcctgtgggcaactgccttgagaaaagggaaacttagatggaaaaattaaaacttgaacttctgggggaacttactttgttttttaatctttgtatgactttctcccataagcctacccatttcccgaagtgatttgagatggattgttttcatccaggccagtcttggaatagggatgcccagcagggcccagggtctggcaccctctccttggccttaaggccagatacctggggtaagtgttgagtccaggccagaggtaggggtgaggtagggggagaagggatggtaacacctgctggtgctaaaggctctcatctactggccccatagagtttgtgtgtctgtttgcacacatg

SEQ ID NO: 218118 - DNA, 297 bp, Homo sapiens
ctggggacttgaacagtgccttcctattctttaaaaaaatatcctcttaagacatttaacgtggagccaccagcacacaaccaaagaaaatggtcttcaggttgagatatggccaagtgaagcaatttgtgggagaggaagagacccaaccattagcacaaattattctgtcattcaggaaggaagctgtggaggcttccttatttctcatttgtctgggtttaagtatcagtctactaaatgctcgtggagtgaaaccctgtctgtttttgattcttggtatgaatatagataatg

SEQ ID NO: 218119 - DNA, 396 bp, Homo sapiens
gcagagactgcagtgagccgagatcatgccactgtactccagcctgggtgacagggaccctgtcaccaaaggaaaaaaaaaaaagggtctgtgttttggagtaagggagcatcaggcattaggctggaatcccatctctacaacttcctaggtatgtaaccctgggcaggtttctcaacctctctgacccccagtttcatcaattgggattttttgccgaccaggtgtggtggctcacgcctgtaatcccagcatttttggaggctgaggtgggaggattgcttgagcctaggagtttgagaccagcctgggcaacatggtgaaaccctgtctctacaaaaaaatacaaaaaattagctctagcctaggcgacagtgagactttgtctcaaaaaaa

SEQ ID NO: 218120 - DNA, 336 bp, Homo sapiens
agcaggctgcccccatccacctgctcacatgccacctggggcatgtttcccattagattctaacctcctgtgcttgtcagagcctaacctctgagagtctacctcctaagccagttcctggcctggtagggcagaaaggaaaggaagtcaaggagtggccatatctgagtggggctgaccggggaaggcggtctgcgagagtggcgggggcggggcggggggtgctgctgaattgtgcctggtggacttgctgggaggggatgagctccaggttctgacctcttggccatgtagcctcagggaaatgcaaactgaaaattttccctggtttcaagc

SEQ ID NO: 218121 - DNA, 347 bp, Homo sapiens
tttgagcggccgcccgggcaggtacgcggggaatggagtggaatggaaggcaatggaatggaatcatccggaattgaatggaatggaatggaatagaatggaatcaactcgattgaaatggaatggaatggaatggaatggaatggagtggatgggaatggaatgatggaatgtaatgaacccgagtgcaggggaatggaatggaatggaatgcaatggaatggagtcatcctgaatggaacggaatggaatggaatggaatcaacccgtgtgcaatataatggaatcgaaaggaatggaatggaatggaatggattcaacccaaatggaatgaaaaggaatggaat

SEQ ID NO: 218122 - DNA, 245 bp, Homo sapiens
ctttcccctagttgatctcaacagaaaaaaaagaaacgaaacaaacaaccaacgcctgtcattcccagactgtgcctctcttctgtggcagtaagtggagaacctggcctttaagcaaaaccttttacctctctttattaaatgataggattgatgataaaaatcaatttttgagactcgagtgtgtgacagtaatggagtcgttaatgtttgaaatggtacatgtcaagacagatgagatatac

SEQ ID NO: 218123 - DNA, 263 bp, Homo sapiens
aaaccagctgttttgtgaccatttgtgcttagaggtcgtgccagcccatggcaaagacactgtgtactgtatttatttattctgttagtggaaaaaaacaagacttaattcacccctgcctgtcccctcgcctgccccctgtgtagtgctgcatgacactctgtgtatctgtccttctgtcagtctcattccctgtgatgttgtgacctgttctttgtcttacttggcgaataaaagagaacccagcagcccagacctcagtc

SEQ ID NO: 218124 - DNA, 517 bp, Homo sapiens
taaatacctttcagtaatagtttttcattttctccattaaaaggaaatttatgattttatagtatttatgctagtataattttgtttttccccctaaaatgtcgcagtttattttgtgtctagcaatcttattaaacccccttattaatgatgttcccttgtctatatgatcacaattatttcttactttctagtccttatacttcttgtttaatttttttcactggctatgatatgtagcacatggttaaattgaagtattattggtgtacatccttgtcttttttctaatctttaatatttttaagtttcactagtaagtaagatctttgttgtaggtttttgtttttgacatctcctttcctcaccctcacacttgtgaatctcatgttctgttctgaggaaaagaaatgaataggaaaataaatacttgtgtatctagatcctatcactgtgcgtggtacattgtggctctcagtttgttgtgtgaatgaataaatatagcagaactacttga

SEQ ID NO: 218125 - DNA, 830 bp, Homo sapiens
gaggtggaaggagccctggacagagtcccagctgtagccctgactcgctgtgtggccttagcaagctacttgccctctctgggcctctgacttcatttgcaagaagaaaagatgaaatgtgccaggcatggtggcttacgcctgtaatcccagcaccctgcaggcggatcacttgaggtcaggagttcgagaccagcctgaccaacatgataaaaccccatctctactaaaaatacaaaaattagccgggcacgctggcatgtgcctgtaatcccagctactcgggaggctgagccaggagaatcacttgaaacagggaggtggaggttgcagtgagccaagattgtgccactgcactccagtgtgggtgacagagtgagactcttgtctcaaaaaagaaaagaaaagaaaagatggaatgaatgattgctaagggccttgaatctgtgactttaacatcctggggccctgacaccctgttccacctcaggctcttatgacacctggttcacgggcacaattgacctggattcaattcccgtttctgatacctgtccactgcttgacattgggcgggtggccttgcttttttaagctgcaatgttcttatctgtgaaacaggaataaggatagtgccctcccaggatcattaggaagaatgaatgtctgcgcattataaaatgcccggcccagggctggcacacagcaagtgcttggtagatgtgaatcctccccttccccgacgtgtcccggacccatcagttgtagagttgctttgctgtctatatatggtcaagaatgtgtagaaggaaataattctggtaacctgg

SEQ ID NO: 218126 - DNA, 354 bp, Homo sapiens
tatgtagcatttaaatttttaaaaaatactgtttattttctggccacaagtgaaattcagcagtagctgaacaagacagatatgccaggcatggtggctcacacttgttatcccagcactttgggaggctgaggcaggtggattgcttgagcttaggagttcaagaccaagctgggcagcatggcaaaaccccgtctctacaaaaactacaaaaattagcacatacctgtagtctcagctgtgaggctgaggtgggaggattgtttgaaacccaggttgaggctgcaatgagcgatgatcacaccactgcagtccagcctgggcaacagagagagactctgtctcaaaaaaaag

SEQ ID NO: 218127 - DNA, 425 bp, Homo sapiens
agttggcttcttttggaaaccaaaactcactaacttgagcccctaaactcaccccacctccttattttttcctttaaaatacctttttccccacttcctacagtcactagtcttaggtccccttgtaaccattgcaggcagctgctgttcgaaattttaaaaatgaaatttgggccgggtgcggtggctcatgcctgtaatcccagcactttgggaggccaaagagggcagattgcttgagcctagaagttcaagaccagcctgggcaacatggtgaaaccctatctctacaaaaagtacaaaaattagcctgtagtcacagctactcaggaggctgatgtgggaggatcacttgagtccaggaggtcaaggcttcagtgagctgtgatcatgcctgagtgacacagcaagagcctgcctcaaaa

SEQ ID NO: 218128 - DNA, 819 bp, Homo sapiens
tgcctaggtcttatacaatatgttaattgcctttacaaagatgcataaatttgaagacatagaaactgtcgacattttggctggatgtgcccgattcatcgttgtggggcttggaggggtattgtttggcatcgtttttggatttatttctgcatttatcacacgtttcactcagaatatctctgcaattgagccactcatcgtcttcatgttcagctatttgtcttacttagctgctgaaaccctctatctctccggcatcctggcaatcacagcctgcgcagtaacaatgaaaaagtacgtggaagaaaacgtgtcccagacatcatacacgaccatcaagtacttcatgaagatgctgagcagcgtcagcgagaccttgatcttcatcttcatgggtgtgtccactgtgggcaagaatcacgagtggaactgggccttcatctgcttcaccctggccttctgccaaatctggagagccatcagtaagagacggcagggctccagagtctccggtcctgctgcattttcagttctcttattcccttccgcaatgttaaaactggaggactgagtagatgctaactggttttaccggttagggtagactaggaacctggtcgtgagcaggaatcttttctgtttgttccctcagtcagctcaaagtaattagtggttgataaggttctgcattgaagcaaggctggggcaaggagtacttttttttaattgaagaaagaagtttcacatctacctatttaaatataattcagtcaatggaaaaatacatgtttgttactttttatttggagttgcacc

SEQ ID NO: 218129 - DNA, 484 bp, Homo sapiens
agaaagagtattattttagacataactggaaaacaaatctcctgggcaaatcaaagagaaaattgtttctaatatagtaaccaggttttagttagattcaagttaatgcattcaggacaaaattcaaaccatattttgtttacttattcctacatgttgacatagagtaagaattgggtcttttcagttccttttgcaatccaaaagtaaatgaaatctcaataacattaacatatatatccactatacaccagatatttttctaagcattttgcgtatgttgactcattttatcaccccaacaaccctatgaggtgggcagtcttattagccacattttaaagacgaagaattgtggcacacagagtttaaataatctgtccaaagtcatacagcatgtgaaacggcagagccaggatttaaactgttactatgtgactccagaaaccattcttttctatacctaagcagagctggagaggtg

SEQ ID NO: 218130 - DNA, 355 bp, Homo sapiens
aaagtatcaatagtgccaaggctgagaaactgtgatccacaataaggcagtgagtagagatcaatggaacagaatagacaatccaggtatgaatccacatgtatattactgatttttgacaaatatgccagtgtatatcaatgagggaaagaaaagtcttttcagccagtgaggcacaatagctatccaaatggaaaatatagataaatcttgctcccaaactcaaatagcatcaatgaactcaaatggaatcacaggcctaaatataaaagctgaggctatagaacttgaaaaataaggtaggaagaaatgttcacaatcttatggtaggcaaagatttcttagatagcataca

SEQ ID NO: 218131 - DNA, 309 bp, Homo sapiens
gaaggccaaaaaggaggattacgggctgctctgcctatggagtaatcattcttttattcctttactttcttaataaacttgttttcactttaaaaagaaaaaaaatggattacgggacaggttttgactatccagcaactgtcataataaatttttaataaggagataacacactcctctttttatcttcaaataaaatgtaaaagctgataactaatattcataatacttaacatctaaggaaacaaaaaagttaaaatttttctttttttttttctttttttttgagacagagtctcgctctgtcac

SEQ ID NO: 218132 - DNA, 413 bp, Homo sapiens
tagctacttcagttattgatttctaatttaagcttattgtgatcagagaacaaacctgtgtactttcaacccttttaaattctatggcttaaattctaaacttattttatggctcactatatggtttatcttggtgagcttctcatgtccccctgaagattatgtgccctcttcagttgttgggtgtagtattctataaatatcaattagttcaagttggttgataggctttttgaaaattttatattcattttttcttcctttttctgttgagctaatacaaaggattagattgcagatcaaacattcacatatcagataacctacatactgccgagatttatcattaatttcaaggatacagcaggcaatcaagaggctcaaacaaagcaaggagagacattgattgtggc

SEQ ID NO: 218133 - DNA, 455 bp, Homo sapiens
aggggcaaagccggttgacacagctggtagagaaagagaagtagaagaaatgctacagaacaagagaagttgcagcgtcagctggatgagccataactagaacgacggcctcgggagagacacccaagctggcaaagtgaagaaactcaagaatggaacggtcgcggacaggaagtgagtcatcgcagactgagacctccgccatacccagcagaaatgcacgaaggagagagagtgagaagtctctagaaaatgaaacactcaataaggaggaagattgtcactctccaacttctaaacgtctcaaacctgatcctaccagacccaaaggtaatgccagcccctccaccaaaggagaatgcttcggtgaagtgaagttctaacgctcctgctccatctcagagctcagacacagagcagcaatcccctacaagtggtgggggaaaagtagctcc

SEQ ID NO: 218134 - DNA, 138 bp, Homo sapiens
attacaggtgtgagcagcgcgcctggcctccttgaggttttatccccactgtttcctccactcaccctgtgctagaaccagatggaacaactccatccacaatccacttgtctacaataaagctttccttaccatgtc

SEQ ID NO: 218135 - DNA, 1091 bp, Homo sapiens
ggaagtctatgtattgattacatatttgaaagtgacaggcctgttgtgtatgggcagagggttccgggttaaatctcaaaaataataatagcaggggctagtagtaatacattctgaaaaaccagcgtatcaaaaagagagggaatactcccctctcttagatctgctcccctgggtgctgattgtaagtagctttgtatgttttattttagaaaatacatatagaaacacaatattttaaaaaaatagaattgtattcttcttattctgcaacttgttacttgtatttaatagtgtgtcttgggcctcttccttgatcttcattatattttataatggtcttaggattttattgttgaccatcatgcgtgactgcctttcccatatcaatgaaagtttagattatatataacttttgtcttaaaaaaaccaatgttttgaggattgaacatcctggttcgtgtatcttggtacacttattctaagtatttctatagtatgaaatatttgaatttggactgctgattatgaggcctgcatattttagaatttgttaaaactgagaaattataatgatgagagtgtccatttctctgcaactccaccaacatcgttatcaagcttttaattttttctgataggtaaaaacaattcattttattgtatcaattctttgtcagtggagttttgcagcttttcatgtgtttgtttactatgtttctttttgacctttaaaagttgttttgtgggtttttgttgttgttgttgttgttttgttttgttttgttttttttgtctcgctgctgtgtatgcagtggcacaatctcggctcactgcaacctctgcctccggggttcaagcaattctcctgccccagcctctggagtagctgggataacaggcacccgtctctactaaaaatacaaaaaattagctgggcatcgtggtgggcgcctgtagtcccagctactcggtaggctgaggcaggagaatggcgtgaacccgggaggcggaggtttcagtgagctgagatcgcgccaccgcactccagcctgggcgacagagtgagactccgtctcaaaaaacaaaaa

SEQ ID NO: 218136 - DNA, 602 bp, Homo sapiens
cttacttagtattttaacagtgcactaactggaaggcagagtaaagacagacagatcttgtttcggtaactctgttcttgaatggagaagcgtgatatttcattgccctaacagtggagtctgggccaagggcatgtgagtgagagtgtgctgctgactggtgcagttagtggagcaagactagagaaggcaccagcccttctgggcacacatcacaaacacagacctgcctaggttcctctctccttcccatcagtgtgtgcctgccatgtaactcagcaagttggagaacttcttagcttatttaatcttcttaaagtacccttggattttgccttccccatcaagttcctacaacccaaacctgtggaccagccgttctcttcttcacggttgacaatgtgagaagactcttctcgtcctttttttggacaccagacatatattggtggagaatatcagccatttaggcaggtgtattgaggtgtaacttatatacagttaaatgtactgttattagtatgtagttctatgatttaaaaactgcatataggcctgtaactaccaccatcatcaagatatagaacaatccatcttgcaca

SEQ ID NO: 218137 - DNA, 578 bp, Homo sapiens
cttacttagtattttaacagtgcactaactggaaggcagagtaaagacagacagatcttgtttcggtaactctgttcttgaatggagaagcgtgatatttcattgccctaacagtggagtctgggccaagggcatgtgagtgagagtgtgctgctgactggtgcagttagtggagcaagactagagaaggcaccagcccttctgggcacacatcacaaacacagacctgcctaggttcctctctccttcccatcagtgtgtgcctgccatgtaactcagcaagttggagaacttcttagcttatttaatcttcttaaagtacccttggattttgccttccccatcaagttcctacaacccaaacctgtggaccagccgttctcttcttcacggttgacaatgtgagaagactcttctcgtcctttttttggacaccagacatatattggtggagaatatcagccatttaggcaggtgtattgaggtgtaactttttcctaaatatattcaagaatacctgctttcagttcagattttaacaatcataattttccagtggccacagataattgttgtag

SEQ ID NO: 218138 - DNA, 422 bp, Homo sapiens
tatgcctttgacatcacccaatattcaggaaattttgccctgtgattggtaccataaaaatgtaagaactaatcaaaagttcatttctgttaaaaacccttcttttcccttaagtagctacatctggcaagattctcatttacattaagcctgtagtcaacaagtctgttacaaggcatacacactatactttgatcattaaataatgacacaaccagcaaactcctttggtctaacattttttattccctcaaatttgatccgaatttgtcagtattttaaaaagtttttaaaatttggtatttttctcttaagttgactagagacgaatttttgccatgctctccaggctggtctcaaactcctgggctcaagtgatcctcctgccttggtctcccaaagtgctgggattaccaggccga

SEQ ID NO: 218139 - DNA, 234 bp, Homo sapiens
atcatcttggttacttgtctcttgtttttgttttgttttttgtcttgtaagaatttaaattccatgagaataaggaccatgcatgttttgttcattttgtatttccaatgcttggcactggactcagtaaatattgttgattgatcaaatagctggctggatgaaatccattgaatgtatcccttttgttcaacactgacttttagtcttcattaataaactatttggatgatt

SEQ ID NO: 218140 - DNA, 443 bp, Homo sapiens
ttttttttttttgaaacagggtctttgttgctcaggctgaagtgcagtggtgggatcacggctcactgcctcatccttacaagtagctgggaccataggtgcatgccgccacactggactttttttttataaagacactgttgcccaagctggtctcaagtcctgtgttcaagccatcccccggtcttggcctccccaaagtcttgggattatgggtgtgaacactgcccctggcctgtagctggtttctaagcagtgctttgttgttttccaaaattccattttgtacagaatcaaaaatactccaagagccccttctggcttcttcctttcccaatgacctcagcttatactcttaattaccctccttccctccctaatgaccctccccaaattatgctctttcccaaattaattaaaaattaattttaacttttgaatac

SEQ ID NO: 218141 - DNA, 240 bp, Homo sapiens
actgaggagttgaaaagtactataattgacaaaaaattcactagaaggactcaacagcaagtttaagttgacagtagaaaaaaatcagcaaacttgaagctaggtcaatagagactatccagtatgaaaaccagaaagaaaacctgtaagataagacagcaaaagattgataatatatagttagattactaatttttgttattcataattaaaaaaatttcaacgagtaatccatttatt

SEQ ID NO: 218142 - DNA, 348 bp, Homo sapiens
cgcagtggctcatgcctgtaatctcagcactttagcaggctgagacaggcagattacctgaggtcaagagttcgaggccagcctgaccaacatggagaaaccccccatctctattgggaggctgcggcaagagaattgcttgaacccaggaggcggaggctgtggtgagccgagatcacaccattgcactccagcctgggcaacaacagcaaaactccatctccaaagagtatctaattcaaatcacaatgcatttcataataccttaaataattacatcctcttcaaaagatcaaaagtattaaacaaataaaattcacagaatacaatctttgcaattactagtaa

SEQ ID NO: 218143 - DNA, 457 bp, Homo sapiens
caacaaatgagtgcaggcaaaatctgacaaaatcatgctggccagggtgacatgcacctgtattcccagcatgctgagggtgctgagggtgctgagtttgagaggaccacctgagctcagaggttccggaacagcctggacagcaaagctgagaccccatctcttaaaaaaaaaaaaaaaatctggctgggtgcagtggcgtagtcccagcactttgagaggcctaggtgggcagatcatgaggtcaagagatcaagaccatcctggccaacatggtgaaaccccatctctactaaaaatacaaaaaattagctgggcatggtggtgggcgcctgtagtcccagctactggggaggctgaggcaggagaattgcttaaacccaggaggcggaggttgcagtgagctgagccccactgtactccagcctggtgacagagtgagactctgtccaaaaaa

SEQ ID NO: 218144 - DNA, 418 bp, Homo sapiens
gatctatagtactgatttgtaattatattttactcctgggatgcaacaggctttgagtgaagtatagggattgcacatcagtttatgtgtagatttttttaactatacatttcaccttttaattctaaggcaataaacagttaatgaagggattttgagttaatgtttattattgacaataattcctcattctgcaacttcaattatgaacaactctaacttatttccagaaagtaaacatcccgtccttacaccaaatataaacagtagccagatgtggtgaggctgaggcgagaggatcgcttttgagcccaggagttcaaggctgtagtgcacagtgatcgtgcctgtgaatgaatagctactgactgcagcctgggaaacatagcgaggccatgtctctaaggaaaaaaaaaac

SEQ ID NO: 218145 - DNA, 438 bp, Homo sapiens
tttattggttgcacgcacagtcagttatttcatccagaaaatctgaaggccctacaaactaaccagaacagtaagggttgaaactgaaggccgattgtgaatactatccaccgggagcttcttatgaattgactcatgttcctcagataataaataacactaaaagacaccagttagcttctgacctcaaggagtgctactttcatctcctgcaagctttgaaaagggatctgatacctgacaacatcttgacaaaagcacatcccatcttctgatggaagctgaaccaaaattattgatgtcgctagtgattcagggtactctagattgtttggagtcctatataaatacatttaatagacaaaaaaattgctgccttaatctaagcagaaatgaccttagtagatagatactgcttaccccactgatgcattagag

SEQ ID NO: 218146 - DNA, 602 bp, Homo sapiens
ctagttatggtgctgcaggttgaaatccaggtggtcccatgcctgtgccagaccagatggttcctcagccaaaagagcctgcccttcttcatcagagctttttcttttgctccttcaagtgccacacagggacaccacatgattctgtagcttgtaaaagtgaggattcattcctggagggatgagaattcattctcctgcttcaaggaatggtgtcatgtggtgttcacagaatgtgaacaccggcactgacagatttgtacgcatgcatacatactctacactgtgcgcaatggtattactccccatctactaactaggtagcaaaatatttatttcagttctcagtctccaaatctcagcttggtcattttaagcacgtgttgtttcttcagttttaactaactaggctaataacacagcatcttcctctgttcctaagttctgtcgaaactgcccttcattctacaccgcctaactggatgtagagtctggaaaatgggacactaactttcagggcttggtctaggaatctgctcccacgagcaacatcagttatgactctagaggaagctgcagaagtaagggaaagaaggatagta

SEQ ID NO: 218147 - DNA, 611 bp, Homo sapiens
ggttgggagcagaatgttctcgatgacagatcgagcctggtcgcagcaccgcctgcacaaagtgggttttggtcatcagaggctgtggtcgaccacagggtagtcatttcctcattctgcaggctctgtcatccctctcgaacacctcagaggcgtggaagtaaatgttgtctcagtactgagtaaataaagtagccagggagatgatctctatttgtcttattgtatagatgtattttaaaagatttttattgggtctcttatgatgagccaagtgctgtgttgagagttgaagattttcagagataactaccaaggcctcacattgttgttcaataacaagataaccttggcaaattaattcacttctcaaagtctctgttttctcatctataagaccgaaaaaagcatgtatgttattttgcttatttcacctactacaatgacgacaaggattcagtaaagtcaggtagcacaaaataccaccacagagtaaaagtcactaaatagtagttgtgaatcattatttaaatttcttcttattccgaaaatgacttggaacatcttataaattgtttgcaacaaagaaaaaaggaaggaagtgaagaaat

SEQ ID NO: 218148 - DNA, 406 bp, Homo sapiens
caaaataatttacatatgcaaaatgtaactttgaatcttctttatgatttttgttccagaactaataacaacagcaataagtgcaaaaaggaatagattatttttagaaagttgtgcgttttcatttatattatagtaacagattttaaaaacaatctggtcttatccactaaaataagctaggttgtttctttgcacagatggataagaaaggactgctctagaaagtaaaattgaaggcattggatagatcatacttaattttcaatgttgcagagatctcgatttattggttgtagtaatcatagtaatagcaattgcaagaatattttggacaatttcttaattatagtagattattgtatttctgtattaatggatttctatttgtaaatcaagtcgacgc

SEQ ID NO: 218149 - DNA, 390 bp, Homo sapiens
cagtgcactccagcctgggtgacagagggagactccgtctcaaaaaaaaaaaaattgttgttaaagtataaatgtctggtggcttgggtcgaaggaggcacgttagaagtgacaagctccacagaaagcagcgagtctctttcctgagtctgtttctctgagtctcttcttttgggtatgtggtcataacttgaagttcagtggggtgtatacaaattgtggtggtgctggtgaaatcgcaggatagcgactaagggggctgtgaaggattttgcccccaggacactgaggtgtatggggcataacaacgtaaagtcaggagaaacaatgttgtagggccatggtcattagcggctgggataggagacccggatgcactgcacctcaggc

SEQ ID NO: 218150 - DNA, 449 bp, Homo sapiens
aatagtttcttagatttcttaggattttttataccagataatgtcatctccaagtagagatcattttacgtcatcctttccaatctggatgcttttattttttttttcttgcctaattgtgctggttagaacctgcagtagaatattgagtagaattggcaaaagtggacatctttgtgttgttactgataggaggaaagcacattttgtcttttgccatcaagtacaatgttaactgggggggttttgtagatattctttatcaggttgaggaagttcccttttattcctagtttgtttagttttagttttagctttttttttttttttcatgaaaggatgttagactttgtcaagtagtttttccacatctattgagatgatcaagtagtagggtttaagtctttttaaaatcccttcagtgatattttagcagaggttttggaggg

SEQ ID NO: 218151 - DNA, 210 bp, Homo sapiens
gcaggaggattgcttgagcccagaaggttgaggctgcagtgagctatgattgcatcactgcactccaacctgggtgacagaatgagaccctgtctcaatgaaaaaaaaaagaagacaaatgccgcatgattgtgttaacatgtggtagctaaaaaagttaatctcagaattagagaggagaggccaggtacggtggctcacgtgtgtaat

SEQ ID NO: 218152 - DNA, 398 bp, Homo sapiens
aagtagtttaagtatttcttcttagttttttcttctaagcagggaagagcatatttagatgagcatttggggaggtatttgagctgaagcctaaaggatgagaagcaagtagccatgagaagaactgggggaacattttaagcagaggagtgagtaagggcaaaggccctgatatgtacaaaagtcaaaaaaacataaggcaggcagtgtgaccgatgagcaagggggagtggcagggctgaggtcggagaggtgggctgggtcaggtcacttggtatgaattttattctatgttcggcaggaagccattgaaaaattttattataacttcaggcttgcatgatctgaatttcaatacagtggcatttcatttcatgaaataaacatgattcttagtt

SEQ ID NO: 218153 - DNA, 714 bp, Homo sapiens
ggttcaagcgattctcctgcctcccaggttcaagcgattctcctgcctcagcctcccgagtagctgggattacaggcgtgtgccactactcccagctaatttttgtatttttaatagagataggatttcaccgttttagctaggctggtcttgaactcttgacctcaagtgatctactgccttggcctcccaaagtgctaggattacaggcgtgagccactgctcccagccaataatgctttgttcagaacagcagtacttaaccattttctttttctttctttctttctttctttccttccttctctttctttcctcaccttttttatatttatttttatagagacagtgtcttgctatgttgcccaggctggtctcaaactcctggcttaagtgatccacctgccttgacctcccaaagtgctgggattacaggggtgagccaccacacctggccttgggccattttctcacaagacaacagatgatgctcacaatcgacacagacccggaggctctcctgcatgtcaaccataatcccacccttttctcacacactcaataaaacacttcaggctgggcgtaatggctggcctgagtgaagagacaacctatacaataggagaaactatttgcaaactatgcatctgacaagaggttaatatccagaatatacaagcaactcacacaactcaatagcaaaaacaaacaaaa

SEQ ID NO: 218154 - DNA, 488 bp, Homo sapiens
ggttcaagcgattctcctgcctcccaggttcaagcgattctcctgcctcagcctcccgagtagctgggattacaggcgtgtgccactactcccagctaatttttgtatttttaatagagataggatttcaccatgttgcccaggctggtctcaaactcctggcttaagtgatccacctgccttgacctcccaaagtgctgggattacaggggtgagccaccacacctggccttgggccattttctcacaagacaacagatgatgctcacaatcgacacagacccggaggctctcctgcatgtcaaccataatcccacccttttctcacacactcaataaaacacttcaggctgggcgtaatggctggcctgagtgaagagacaacctatacaataggagaaactatttgcaaactatgcatctgacaagaggttaatatccagaatatacaagcaactcacacaactcaatagcaaaaacaaacaaaa

SEQ ID NO: 218155 - DNA, 777 bp, Homo sapiens
  misc_feature (562)..(562): n is a, c, g, or t
  misc_feature (626)..(626): n is a, c, g, or t
actttaacaattcctttattttatccacacatgctttcaatattttgtagtgtaatttctccaaattaatggatttaaactcatttagaatatttgctatcattctacatgctggacctttgttatttttagttttgttctacttttataagtatggatattgttttcttaaggaatggatatgaaacaaaacaagagcagagtagttctgcctgtttgttcatgtactgtgatttgaatatctttatccagtgtgctcttcctatatctaataaaaatgccattatcaccactttatctggcaatcatagcaagaattaaaaggacattttttcttttttttataagcttcaacttattttatgtcttatattttataacactcttcttagagactcagccactattttgtacttctctcaataaagtttattatggattatgcttgtcactgaggaagatacaaagcaaagtttatgacacacactccttgacttgaaggaatttaaagtctgcatgaacaaaaccaagaaatagtctcagaattatacatgtcagcctnccaaagtgctaagccgccgcgcttggcccgatgattaggtttttatgcacgtgtgagaaaacgncctccttaaacttggtgggacccttgcgcattaactgtctatatgataagacccgctcatgttgcttctgcctgtatatcagcattttggaggctatgcaagaggactgctttagccaccagtttagacccctggctaggtcccctttttt

SEQ ID NO: 218156 - DNA, 331 bp, Homo sapiens
gggggttgaaggattccagcgactggggcaagaatctgtgttctgtgtgctcttgctgaaaggatattgctgggatattgagggttgtggatgaagtaaccttccaggggcagaattgtgcagtaaggtccctcagcctaggatgaaaaaggcctctaacgaaaagcccacttgttcatgtttccgttttaactaaatgttcctctctaaattccataccctctggggcataagctgaaggaaaatttggaatcttattatctgaaattgtacgtgcatttgacctatattgctatgtctttaataaaagcatctgaggaatagttcctaa

SEQ ID NO: 218157 - DNA, 313 bp, Homo sapiens
tgcctgatgatctgaggtggaacagtttcatccccaaaccatctacacctgaccactccgtctgtggaaaaactgtcttccattaaaccagttcctggtgccaaaaaggttggagaccactgccttatgggattcatcaaaatttctctttattgtctagaagaaatttcattcctcagcctactgtgctggctttgctaggttgctcatcagcataggaactgatccctatccataaactgatccctcttccacccaataatagcctttgtttgtgctgagcactggctagttatttcaactctttgcttcc

SEQ ID NO: 218158 - DNA, 409 bp, Homo sapiens
acctgggccgtgaaaagcctccctcaagccattctgcaggccctccgtcattagggttaagcctcctctccctgagcaatatcatgcctttcccaatctatttggccttcgtatttggacctgtgtcagtgtttccggtatcagggaggggtggggggagtgaagtctgtgctgcccctcctggagaggtctggggagaaagcagatgttttgaaaaaatgatccagtgtcccactcccgaagaaacaaataaacaaataatgaattgaggccagagtggcaggtggctggagtcacaatgacagggagcagcgtcaggcggcatgtggctggagaagggacttgccctgagcatgagtgtccaccatagcactgtggctgagcctgatgcccacggcaaggtaggggc

SEQ ID NO: 218159 - DNA, 384 bp, Homo sapiens
ccaccgcacccggccaaaagctgtcttctaaggggagcatgggagctggagcgtcagtgaggcccccgccagccatcctaaccaccgctcctgaacaccatccactgtggaaattctgggcaggtcctgcgtgatggggagccccagtgcaccccgtgttaagagctggtgcctgcagcaagggccagaggacaggcctgcccgggttacggctggcacacacttggtgcaggagcacccggtctgactcgcttcaacactggccagttatttgccgcaagcggctgtgacttatgtcatttttacaagatgttttcaaattattataggaagctttgaaaaatgatgggttagggctgtgaggcataaaagttcaatccagga

SEQ ID NO: 218160 - DNA, 376 bp, Homo sapiens
cagaagttccatctcacatttgaaaaaagcagcaagtgaggaaaagcctttaggggttggtgaaatggaagaagaatgcactctagaaccagagttggcagcatttccaaagcaggatggtgggacacaggaatatacagatgccactttggaagaccacagaggtgatgttcaggaagctgacacactccatagacagctctccctgagtcagtgcttcccactcttgatgactgaagaacaacagaatccaggtgaacaaataagtacaaacattcatgcctctggagaagaaaaatgttatgaagaagttcaagttcagaatgaagcttctttctccactttagaaggagaaatgatagaaactagtttttct

SEQ ID NO: 218161 - DNA, 186 bp, Homo sapiens
gggcatcataaaatattccttataaaaaggcagtattaggtttgacagaattgaaccaataagttagactatatcatttctcccctggaattctgcaatatttctcaattaggtctctctttgtttaatcaggcctagacactgcttacccttaccagtaagccttcctaaaagataagtttgatc

SEQ ID NO: 218162 - DNA, 433 bp, Homo sapiens
gtgtctaatttcatcacaccactcactttgctcatctgttcttgtcaatcagttttaaactcctacgaatataatgcaatgtaactatcacaatttttatgtctgtcttacttctcaccttcaaatggacttgaaagcatcatgcctagaattttacggttaaagttgtatgtattatatgaagatctggagcattttgtttccactaataatacctaagaaaatgccatcgtgtcctgtggagagaggatattcctattcgtgtgcctgtttagaacatgcacccattaactttgctatatactgagtcagttgctcaccacaagataagcacaaaactatcatttccttctatcatctcaaagctttgtgcaatgtcacaaatacagcagacctcgatttttcaattaataaagttttatttcattccagt

SEQ ID NO: 218163 - DNA, 484 bp, Homo sapiens
gagtgtcgaggaggagaagagaaataggagcagaagaaatatttaaaatgatacttactcagaattttccaaaactgataaagtacattagccaacagattcaagaagctctctgactctaagctgaataaaaataaaaccactttagcaaaaaatctaactctaagctgaacaaaaataaaaccactcctagcaaaaacaaacaacaaaaacttcaaagaagcaacagtataactgattactgctcagcaaaaaatgatgcaaaccaaaagacaataagaagaaatctttaaaatactgtaagaaaattactgttcacctagaattttatacccaattaatatatccttcaaaactgaatgcaaaatagagatgtattcagacaaaaaccaagaaaactttgcactagcagaccaaacatgcacagaatgagaaactaaaggaaattcttcaagtagaatgaaaataatgccaggtaaaacat

SEQ ID NO: 218164 - DNA, 508 bp, Homo sapiens
cagtgatttcatttttttagatgctaaaacttatgggtgaaagtggattaaatgtagccaaatgcaacatcaaaatcttcaggcacaaaaacccattaactttttcatactctcagaagatgaacctaatttcaaatgaaagctgcctccagaatatattaagcgtattctagatacaattcattttggcaaacatgctgtagaaattcacataacattttactgtactaaaagtaaattgcccatgtaacaaaaaatatcttttcagagcttcaaatgaattttaaaggatgactgatggtccttggaagagaaacagtaaacaaataaggtttctagcaatgatgtatgagttagaaattgcagttccagatgatctctttattaaagagacgatctacacttaatttggtcaactgttatgaacatagttcatgttaagtccccatttaaatacaacctgaaataccaaagttaattttcttttctttcttttttttttttttta

SEQ ID NO: 218165 - DNA, 3034 bp, Homo sapiens
ttaaattctaattagagatgcaggaatcaatgatagggaggttggacagctcagttccccagtgccagcccaatagacggatgagttattgtcatgtaaaaagcgccagcaataagaccaaccgctttgctattgtccaagtggaaagagccaagtttattatgaggactatatgctctagagacctcagacaaggcatctcataggaggctttttcataaaactaggctctgctggtagtaaggaggccagtttggaggcaggcgttgagctgtgcacatctccccactccagccaccttctccatatccatcttttatttcatttttccacttggctgagccatccagaaccttttcaatgtataaaatggaatattcttacctcaattcctctgcctacgagtcctgtatggctgggatggacacctcgagcctggcttcagcctatgctgacttcagttcctgcagccaggccagtggcttccagtataacccgataaggaccacttttggggccacgtccggctgcccttccctcacgccgggatcctgcagcctgggcaccctcagggaccaccagagcagtccgtacgccgcagttccttacaaactcttcacggaccacggcggcctcaacgagaagcgcaagcagcggcgcatccgcaccactttcaccagtgcccagctcaaagagctggaaagggtcttcgcggagactcactaccccgacatctacactcgggaggagctggccctgaagatcgacctcacagaggcgcgagtccaggtgtggttccagaaccgccgcgccaagtttcgcaagcaggagcgcgcagcggcagccgcagcggccgcggccaagaacggctcctcgggcaaaaagtctgactcttccagggacgacgagagcaaagaggccaagagcactgacccggacagcactgggggcccaggtcccaatcccaaccccacccccagctgcggggcgaatggaggcggcggcggcgggcccagcccggctggagctccgggggcggcggggcccgggggcccgggaggcgaacccggcaagggcggcgcagcagcagcggcggcggccgcggcagcggcggcggcggcagcggcagcggcggcagctggaggcctggctgcggctgggggccctggacaaggctgggctcccggccccggccccatcacctccatcccggattcgcttgggggtcccttcgccagcgtcctatcttcgctccaaagacccaacggtgccaaagccgccttagtgaagagcagtatgttctgatctggaatcctgcggcggcggcggcggcggcgacagcgggcgagccagggcccgggcgggcgagtgggcgagcgggtaggcccaaggctattgtcgtcgctgctgccatggctttttcattgagggcctaaagtaatcgcgctaagaataaagggaaaacggcgtcgccctcatttcaaccccactcctacccccttcctcaacccccaaacaaaacaaacaaacttccctggcttcgcacctgcctggggcctcgcagcggggccagggctccgcctgctgatcgggggttgtgagcagcgcggcctggacgcggggcactctcagggggctgtgtctgcgtgtcagtttgtgtctgtctcggggaatgtgtgtctgtggcccaagcaggtgacaggaagagatggggggcctcaaccaacttagtgacttgtttagaaaaaaaagacaaaaaagtaaaaataaaaacaaaaaagttggaaggcagaaaccattaaaaaacaaaaagccaacaacccagaaaggtttaaaaaacataaggaaaaaaaagacaaattaaaggaggggctaggggagaagctgcagctggagctgaaggctcgatcttgtgaacccctaaatccgctccctcctaacagcacggattctcttggggctcttcttcagggaagagtagggacgccgttccagccccccttcctatcgtgtccttgggttcgggtcactgcggcgacgacttgctcagactgtcccggcggccggagtgactttctcgcacccccttgcctgtcccacctcgctgaacaccatcccgccattagcgcatcggaaccccacacagttgcaactcccaaccccgaatctttgcagccgttcggccctgaaagatgccctatccatgagatgccttttcatctgcaaactctgcaaaatgtgtctcatgtttcgcaactctttttttccccctcgctcccgcctaccccgtcggcattttcttcttccaccagcttttactgaactttttggcactgctttggattggggtcaattgcagtccacgtaactggctgcagagaaatctaccgagcaaggaaaaggcacacacacacgtttgcaggggtgtctcggtttgcatttctgttggaatgatccgaactggactcacatcctgtatggtggatggactgtatattgagggttccattcttcgcgcagtttagacatctctgttttgattctttgttgttgtttttattttaaaaggcacaaactctagatattagttgaatgttgaggctttaactttttcggtgtctttctacaactgtgttctgtgactcaattgtatcgtgttaatatcagtgcagactgtctcctctacgtgaccgtataatgtttttctcgtcttgtagtctctatggcgtgtctttatggtgtaataaggttctcacggggtcaatcttttgtgtttagagaggccacggttcagacaatggtatatatttttgttatcaggtgcatgtctgtctgatttctttttttttcctgttggactatgtttgtgaacataattgtcataagttatgtttcagatttttgaatttatttatatgtgttataatgaatgcttctatttaaaagggaaatatttctacatgtgcatatagttttccaagagtgtaccattaacttgattgttgataataaaaaccaaaagcaagtctagcaa

SEQ ID NO: 218166 - DNA, 2837 bp, Homo sapiens
tgctctcacaaacaatgtactaggggcggtcctgggttgtaattttcatcacctggcctggcgtctgtgctgcatcatccccatgtccatgggaccgtctcaattcaatcatccatcttttatttcatttttccacttggctgagccatccagaaccttttcaatgtataaaatggaatattcttacctcaattcctctgcctacgagtcctgtatggctgggatggacacctcgagcctggcttcagcctatgctgacttcagttcctgcagccaggccagtggcttccagtataacccgataaggaccacttttggggccacgtccggctgcccttccctcacgccgggatcctgcagcctgggcaccctcagggaccaccagagcagtccgtacgccgcagttccttacaaactcttcacggaccacggcggcctcaacgagaagcgcaagcagcggcgcatccgcaccactttcaccagtgcccagctcaaagagctggaaagggtcttcgcggagactcactaccccgacatctacactcgggaggagctggccctgaagatcgacctcacagaggcgcgagtccaggtgtggttccagaaccgccgcgccaagtttcgcaagcaggagcgcgcagcggcagccgcagcggccgcggccaagaacggctcctcgggcaaaaagtctgactcttccagggacgacgagagcaaagaggccaagagcactgacccggacagcactgggggcccaggtcccaatcccaaccccacccccagctgcggggcgaatggaggcggcggcggcgggcccagcccggctggagctccgggggcggcggggcccgggggcccgggaggcgaacccggcaagggcggcgcagcagcagcggcggcggccgcggcagcggcggcggcggcagcggcagcggcggcagctggaggcctggctgcggctgggggccctggacaaggctgggctcccggccccggccccatcacctccatcccggattcgcttgggggtcccttcgccagcgtcctatcttcgctccaaagacccaacggtgccaaagccgccttagtgaagagcagtatgttctgatctggaatcctgcggcggcggcggcggcggcgacagcgggcgagccagggcccgggcgggcgagtgggcgagcgggtaggcccaaggctattgtcgtcgctgctgccatggctttttcattgagggcctaaagtaatcgcgctaagaataaagggaaaacggcgtcgccctcatttcaaccccactcctacccccttcctcaacccccaaacaaaacaaacaaacttccctggcttcgcacctgcctggggcctcgcagcggggccagggctccgcctgctgatcgggggttgtgagcagcgcggcctggacgcggggcactctcagggggctgtgtctgcgtgtcagtttgtgtctgtctcggggaatgtgtgtctgtggcccaagcaggtgacaggaagagatggggggcctcaaccaacttagtgacttgtttagaaaaaaaagacaaaaaagtaaaaataaaaacaaaaaagttggaaggcagaaaccattaaaaaacaaaaagccaacaacccagaaaggtttaaaaaacataaggaaaaaaaagacaaattaaaggaggggctaggggagaagctgcagctggagctgaaggctcgatcttgtgaacccctaaatccgctccctcctaacagcacggattctcttggggctcttcttcagggaagagtagggacgccgttccagccccccttcctatcgtgtccttgggttcgggtcactgcggcgacgacttgctcagactgtcccggcggccggagtgactttctcgcacccccttgcctgtcccacctcgctgaacaccatcccgccattagcgcatcggaaccccacacagttgcaactcccaaccccgaatctttgcagccgttcggccctgaaagatgccctatccatgagatgccttttcatctgcaaactctgcaaaatgtgtctcatgtttcgcaactctttttttccccctcgctcccgcctaccccgtcggcattttcttcttccaccagcttttactgaactttttggcactgctttggattggggtcaattgcagtccacgtaactggctgcagagaaatctaccgagcaaggaaaaggcacacacacacgtttgcaggggtgtctcggtttgcatttctgttggaatgatccgaactggactcacatcctgtatggtggatggactgtatattgagggttccattcttcgcgcagtttagacatctctgttttgattctttgttgttgtttttattttaaaaggcacaaactctagatattagttgaatgttgaggctttaactttttcggtgtctttctacaactgtgttctgtgactcaattgtatcgtgttaatatcagtgcagactgtctcctctacgtgaccgtataatgtttttctcgtcttgtagtctctatggcgtgtctttatggtgtaataaggttctcacggggtcaatcttttgtgtttagagaggccacggttcagacaatggtatatatttttgttatcaggtgcatgtctgtctgatttctttttttttcctgttggactatgtttgtgaacataattgtcataagttatgtttcagatttttgaatttatttatatgtgttataatgaatgcttctatttaaaagggaaatatttctacatgtgcatatagttttccaagagtgtaccattaacttgattgttgataataaaaaccaaaagcaagtctagcaa

SEQ ID NO: 218167 - DNA, 474 bp, Homo sapiens
caaagaaaggattagaatctttaatagattgcaggaaataaaggagaaacaacaactgaaggtaatgtgggatcctggatgggatcctggaacagagaaaaatacaggaggtgaaaaaccggtgaaagtcaaaaagggccacagtttagttaatggtattataccagtgaatttcctgataatttttttataactgtgctatggttatataagtggttatcagggaaactgcataaggttatatataattaactctaccctattttgacaactttcctataaatctaaaattatttcaaaataatttttaaagtgcttggctgacttgaattattgtgtcaaattgtagaaacataacaaagaagtgttcaggttttttgagacagggtctcggcctgtcacccaggccaaagggcagtggtgtgatctcagttcactgcagcctgggcaacaagggcaaaactccatctcaaa

SEQ ID NO: 218168 - DNA, 309 bp, Homo sapiens
tgtgtcttcctccatgtatcacataagggggcacgtgatgtcagtctgttcttttattggtgatgttaagtttgactcttttcttaagggagtcaaactttaccttctaaagcatgtgtgtttacgtaagagcggtatacacataaatacgtttttttaaaaagacatttttctaaaacataagatttagctgagtttcatgaaacaacatatacccttactaagtgcaatgaactctaatcttttctgttctattctaaaaatatattttttttaaatgctggttttgacctacttaatctctttggc

SEQ ID NO: 218169 - DNA, 988 bp, Homo sapiens
catggtggcacacacctatagtcctagctactcggtaggctgaggggtgaggatcacctgagtccagaagttggaggttacagtaagccaacactgtactactgcactccagcctgggtaacagatcgagcccctatctctaaaaaaaaaaaaaaaaaaaatcaatgtaaaaacaagaagcttggccgggcttggtggctcatccttgtaatcccagcactttgggaggtcgaggcaggcggatcacaaggtcaagagatcgagaccatcctggctaacatgatgaaaccccgtctctactaaaaatacaaaaattagctgggtgttgtggcgcatgcctgtagtcccagctacttgggaggctgaggcaggataatcgcttgaatccaggaggtggaggttgcagtgagccaggaacgtgctccatctcaaaaaaaaaaaaagctttatgagtgattctgacaccacacccaccgctggttaacccactatgccctagagctctagccgggagcctctgtctattcccatagctcctacaaccagttttgtgagtcccatgtccattttctccagcccagatatacctcccagctagccttcagtcccacatgatggacatcctactgcaagttctccatcagcctctccacctccacatgctgccacaccactgcccaactaatcgtccagcgggaaatgcctcaaaaggccacaaggcctgacattcaagagtctccctgacctggtccaaatctggggccacctactcactaagtttatgcctgtcacacatgtacccaccaaacagaagtatctgcaatttgaggcacaaattctatctccacccactggcccaactcctagtgttcacatgtctatgatccagccactttgcaaagcacagctcaaacatcttctgctacacaaaggctggtaccaccaacagccccagcacttcctcaggacctgtcctctgtactttcca

SEQ ID NO: 218170 - DNA, 928 bp, Homo sapiens
catggtggcacacacctatagtcctagctactcggtaggctgaggggtgaggatcacctgagtccagaagttggaggttacagtaagccaacactgtactactgcactccagcctgggtaacagatcgagcccctatctctaaaaaaaaaaaaaaaaaaaatcaatgtaaaaacaagaagcttggccgggcttggtggctcatccttgtaatcccagcactttgggaggtcgaggcaggcggatcacaaggtcaagagatcgagaccatcctggctaacatgatgaaaccccgtctctactaaaaatacaaaaattagctgggtgttgtggcgcatgcctgtagtcccagctacttgggaggctgaggcaggataatcgcttgaatccaggaggtggaggttgcagtgagccaggaacgtgctccatctcaaaccctagagctctagccgggagcctctgtctattcccatagctcctacaaccagttttgtgagtcccatgtccattttctccagcccagatatacctcccagctagccttcagtcccacatgatggacatcctactgcaagttctccatcagcctctccacctccacatgctgccacaccactgcccaactaatcgtccagcgggaaatgcctcaaaaggccacaaggcctgacattcaagagtctccctgacctggtccaaatctggggccacctactcactaagtttatgcctgtcacacatgtacccaccaaacagaagtatctgcaatttgaggcacaaattctatctccacccactggcccaactcctagtgttcacatgtctatgatccagccactttgcaaagcacagctcaaacatcttctgctacacaaaggctggtaccaccaacagccccagcacttcctcaggacctgtcctctgtactttcca

SEQ ID NO: 218171 - DNA, 322 bp, Homo sapiens
aatgattcataaatgtaagcctttagaatagtgcagtggttctcagttgggcctgattttatacccagaggacagctggcaatgtctggagacatttttgttgaaatgactggtgggtagaagccagggaggttgctaagcctcctgcaatgcccaggacatcccctgagagaactgcccagccggttgagaaaccccagaacaatgcatggcacaaaatgtgaactcaatcaatattcgttattttttaagagctgcagtgaaaattattttccttatcatcgatgtacaagtgtgagagtgtctcacagaaactatcact

SEQ ID NO: 218172 - DNA, 848 bp, Homo sapiens
actagaatatattttcatttggggaagcattttcatttctcaagcattactgacattatctttcggatctccctgtgagaagataagagggcaggcctgggaacatatgctgacttttaattctggaactcagtacctccgctggggatagtgccaggaaccccagagtcttccaacctagtaggtcagggtgttggcaaatcagagtgttagtgagaatgcagccagcagttgatccggcaccaattccagtacacactggtaattatggcaggctgatgtcagttttccaaaatggaagaacgtgaaaggtcttcaagcaacatacaaggtcaacctgatttcttcacatgggcccatttgtgaaatagatcctatttctaatgatcagcttcattatgtgcgttacctacgctcacacctctagaaaaaggacttgcttcatacaggacactgtttctttccacttacatggtgtgagagagacagatcgtctgcttccttaggtcattatggaagaacggggaatgattttctcttttgcctgttgttctgtttatcgccctattttacaaaactgattctgacctggagggaaaaaaatagatgttaagaatgacttggctttcctgtggtcctgttttgaatgtttggcagtagcttatctgtctttttgagatattgtcctctgtaaactcccattcgtgttcctgagaaacctcttgctggagtgccctgcaggagaaaggctctccatgctcattttatgcccagaaagtggaggttgcagtgagctatgattgtgccactgtactcctgcctgagcaacagagcaagaccctgtctca

SEQ ID NO: 218173 - DNA, 224 bp, Homo sapiens
ctaaaaagcagactaacttttaacccctaatatgctaaaacaaataaattttttaaattgaagtgtaccaaatgcttgataggacacaaacaacttcaatgtccagaaatacttttaaaacatggcagggcccaaatagcagaaggtgagagtaaggaaaataattggggatgataaatttgaggtatcaggagcttcaacaggtagttttagataaaggacaa

SEQ ID NO: 218174 - DNA, 360 bp, Homo sapiens
cacaagcttgtagtgaagcatgaatgggtgagtgagtgctcaacaaatgctggacctggaaagagaaaacctctccaaactatttgatttaggctctttcaccctctcaaagcaggctgctatttatccaacatccattctatgccaggcattgcgctaagagccttgcccgggctatctctttcggtctgcacagcaatcctataagtaggtatgatgaggaaactgaggctcagagaggtcaacattctcaaattttcacagctaggaggtggagatgttgagcgactccagtgcacacagttttaaccgtgacactaaaataatccaccaacaaggtaggagtgaaccccatttcta

SEQ ID NO: 218175 - DNA, 403 bp, Homo sapiens
agcacagattgttctggcctgctccttgctaattttagaatgttgcattcccagcacatactatagttattcttgaaaactacaagcaaaacaaagggagaactaggttggtccaaaatccccagaaaatggtcctgcagcaaccacatcccattttatagacaccaatctcatttctctcccactgtgagtaagcaggattacaaggtcctagagcttcagagcttctcagttttaagtatagtatattttagcattcctggccctaggatccaggcttccccagcaattctgtatccatgaagccttaattctgtgactgttataggctacatttactatgtattatgtatttattcatttccatgaaaatgaaacacaaaataaaacaaaaatgaacaaa

SEQ ID NO: 218176 - DNA, 518 bp, Homo sapiens
agcctccaaatgctgatgccccatcatcaccggggaattgtgatctgcggccaggaccgagatccacgggcccagagtgaaatgacagtactgtgatcacgactggaatatgcacttcgccgaacgtggatcacagtcttgagaaagcaagcagctgggtttttgttttgttttttttccaagaagacagggacctaatctggtttgctcgcatttaattcctagtgcctagaatggtgcatgtcccaaaacatgcaccattgattaaataatttctgattacttcccgacctatttggagggttttcattatatttgttttaaaattattatggaaaccttcaagtcatatatgaaaattgaatagtaactgaactcccaattcatgatcaattctgtttcatctgttaccctctcccccactgtagtattttaaagcaaatctgaaatgtaccattccatctgttaccttgttcatgtttataaaacacaataacacctttttaaaacataaagcc

SEQ ID NO: 218177 - DNA, 335 bp, Homo sapiens
taagcacatccacacctcactaccacagtacacacaggctctgctctcacaaggttggctctttctttgtgcctgaagagcacacatgagttctcatcttgtgtccatgccattgctcacatccatgccccgactggaatcctctccctactcctctctgtctacccagatgcttgctattctttaaggagcagcatgggtcctactactatttaagcactgaagctcacattgatctctcccttctctccatttctacaattacctccatgaatggccagtttgtattattcttgataattataataatacattatttcaaagcatttcctctc

SEQ ID NO: 218178 - DNA, 509 bp, Homo sapiens
tcccaccatgttttcactgaatttacaattcacattttccgtttttaggtcttttatgttgtaaacactttggtcaataaaaaataactctcttaattctgtacttggaagggagggattattccagccatatgaacacctactggaaatagatttgcaacaatataaactttaagactctgtttaatttgtcaaataacacttattttctgatagtaataatagaaacttaaaaggtcttttgtttcatttgtcaaataacacttatctaacaacaaaagagtataatctgtgtgggaaattgctaggtgttcaagtagtattatatgtttgcttctagcttggatttcagaagttgcttgctcctctgtgtttagataaatgcaatgtccaacaacttgtggtgatgacaattctagtcttttattactcagcttgtttttgtttgtttgtttgttttaccatttggttttctttgacccgtaatcaaattatcaaagacttggaag

SEQ ID NO: 218179 - DNA, 448 bp, Homo sapiens
caggctggagtgcagtggtacaatcagggttcactgcagcctcaatctcctgggctcaagtgatccaccctcctcagcctcccaagcagctggcatcacaggtgtgcaccactgtgcctggcccaaacttctcttaaattcattttccttatggaacaacaacagcaacaacaacaacaaaaacttttgagagaaagttaggagttacatcccaccaagagagctgccttcagaaaatatcaattgttaggcaatttcacagtattcagtgtcttcttcaaacttaaaaaaaattatacaaattatttttaaaatatagagatggggtctatgttacccaggctggtcacatcttctttaaacttgtttgacattttttctgaccctctcaaacagttaactgttatttataataattaattggaagcgaataaagggcaagtattgg

SEQ ID NO: 218180 - DNA, 359 bp, Homo sapiens
ataaactcctaaggaatataatgtgtgaaaggcaatgaaaatgaataagtaattcatagacattcctcaaggtaacatacattttctatgaatgacagttgacatttataaagtattctttatatgtgattaatgaactgtgattagtaagtgatttcctgctaaacgatttctccctcaaggggcaacacaagaggatttatttccaactagagaagttgaaaatgaaagcacagctgaaggaaatgaagttatctgggtcagcaacagatactgcaaccgaaaacggggataatttttgcataccctgtgctttcaaactgcatgtcatataaaaggtgttgaatgaatagtgatca

SEQ ID NO: 218181 - DNA, 351 bp, Homo sapiens
ttaagaggaaaggcctccaagacgttgggtctacatctctgagtttctttctccagtctactatatccctgtaattcttcacagccctgttcattctccatgccttcaaacgatctcttttttttttcaaatagattttttaaatatttaaaaatattttctaggtttcctagttgtgttccagcaagaggttggtctgaattagatagtctgctattccagaagtgtaaccttttgcttgtaccccataaagagttatttctccccttgcccctttttcttagactaagcccataaaattgaatttgtgtcaattaaatgtgtgtgtgatgcaactccaagagagcttca

SEQ ID NO: 218182 - DNA, 450 bp, Homo sapiens
ttcatagaattacgtctcacggcacacatgtccagtttccagctgttttcattgcattgcatttgactgttttactgttctgttttgctaatacattttaagtggctagtaaataatgttaaagtaaatgttagccattactgcgtgcaattactgttttaaacttatccttattttacaaggttacttgaccaagatggtgacattgtaagatttgaacaaaggaaatgtgacttcagagtcatggttgttaactatgctatgaagtaggaaaactttatgaggtctttttaactcaaacagtcgagttttaagttgagggttagcaatgatgaatgagtggccaaaaaatgtattcatatttttagtctttcttagaattactggtagttgtgcacaactagagggtatttatttgtgtgtgtatgtgtcgtgtgtgtacgagtgctg

SEQ ID NO: 218183 - DNA, 677 bp, Homo sapiens
agctgttggaattttgataggccttgcatgaacctatcacttttggttagcatgcattgctagtatatagaaacactctgatttttgtgtgttatcctgcaactttgctgaatttattagctttagtagcattcctgtggatttttcaggattttctatatataggatcgtgtcctatatatagaattgtgaatgagtagtgatagttttacttcttttcaatttggatgccgtttgttttttgtctaattactctggctataacttccagttatacacttcacaattgagtgtattagctgtgagtttttcataaatgtccttatcatgttgaggaagttctcttctattcccagtgtgttgaatgttttaatcatgagttagattttatcagtgccttttctgcattgattgaggtgatcctgtggttttcctttctttgatttttctaatgcaatatattacattgattgattttctcatattaaaccacccttgtattcctgggataaatcccatttggttataatccttttagatgttagatttggtttgctcgaacagccaatcctcattattcatggattccatatttgcctatttgctaaaatttatttgtaacccaaaaattaataatgcagtggtttcatggtcatttatacatacacctagaatgg

SEQ ID NO: 218184 - DNA, 187 bp, Homo sapiens
gggtctcccatcaaattatatttccattctaaccactgctccccaaggagcaggctcttctccaagacccatcatctctgaatcaatcaatcattgccgaggcctcatcactagtcttcctccttgtaaccttgtccctctacaacgcccaaggtattccttttaaaatgtcaagtcccaaaaaaaa

SEQ ID NO: 218185 - DNA, 545 bp, Homo sapiens
agagggttcctgtctacaccctctcctccacactcagtgaggttttaagtactcagatgtggaactcatgaactactgaaagaagaaacacaatcttgtgaataaacacagcatttctaacctgcagagctgctgagacatgcaaggaaataatgaaatcagcattttaagtagatcgtttgtcatctttcgaccataggttattaataaaggcaaattactagatattttaattgcttagcacttttaatcattcaaataagaagcaaaactagtgaggaatgtttatgttatagtttaatatactttttttttttagtttaatataattgagtaaaattctaagaatagctagaattttctaattgcctacctccttttctagttgcttctgtcctgggttctcattctagtctagaccatttgtccagaaccacaaattgattcttaaaagctacctgtggttgcagtatgggagcagagtgggaactctattaaactgtgtgtggtttcgtctttctgcagctaaatccttaatgccttta

SEQ ID NO: 218186 - DNA, 732 bp, Homo sapiens
attgtttctatatgaaattccaaacttgaataacttctctaatttttccaaactctaatttattatcatatgtttaaaagtatttcagaagctactcgtattttaatggtaaatatggtacagatgcatatgtgtgatctgttttaaaacagcaatcacatttttccatattcttgattttcagagttgagtgattgttataaatatataaaaatgagacttgtgaatacagaaagatgtgaataactatattcactgcatttaattttattgacattagctatgatgttaaaagtcataaagtaacatttaacctaatctcaactgtatttctagttatgatcctatattattctccggaataccagaatgagaaaacttaccattactggtaaacaagagagactcaattaagattaccatgagacttctcatcttgaatctcctgagcaggcatatttatatttataatgttgttattgaaatgtggctattaaattcaacacagagttttaaatgaatagtaatagtttgtacattcaagtctggaatgagtagcataggttggtcatatgggttgtttttaaagcgtgctgctttgtaaggcaagaaaaaatatatatgtaaaatatgtcttctttgtatgttagaactattaaagaaaaatcacagaattttagagttcatgaatggcaattcctttaattatatagaaatccagagagatgattg

SEQ ID NO: 218187 - DNA, 297 bp, Homo sapiens
aaataaaaatttagatatatatgtgtaaaaatgtttattgtgttatttataatagtaggagggaagaatgaaaaggaagaaagaagaaagaaaaggggaaaggaagggagaggaggaggaaggagagagaaaaaagaagaaaaataaaaaataaaattagaaacaatctaatattcagtaaccagggaataattcattaagttttgatgccctcatatgatggacaattttgcagccatgaagatgattttatttatctatagttatggttgacatttttcaggcataaaaacttct

SEQ ID NO: 218188 - DNA, 272 bp, Homo sapiens
gtattagggtgatgctggcttcacagaatgagttaagtaagagtacttcctcctggatttttgaaatagtttcagtagaattggtaccagatcttttttgtacatctgttagaatttgggctgggcacagtggcgcacacctgtaatcccagctccttgggaggctgaggcaggagaatcacttgaatccagaaggtggaggttgcagtgagccaagattgtgcccctgcagtccagcctgggcaacagagtgagagtccatctcaaaaaaa

SEQ ID NO: 218189 - DNA, 786 bp, Homo sapiens
gttaggacattgcctcatctttgctttttgttttcaaatgtttcccatcaaagttgttgcatatgtcaattgaatgcaaatgaaagtggaaccagtatgtgttgcctagagggagatgagtaagaggtaacttcctaatgatttcccagaataatcactgttgctgaatgtttttgaagatgataccactgaaggtgctagctgtttgcatgtgtgagtgggggtgacttgaagggctcacatgtgactatcattttacttcccccatcccatcatcctcacggaacatctgacctgtgaattgggcttgtggtcactcttgcagaatcaggtaccacattgagttttatctgtacattaaagcctgctaatttgtggaggacatatgttgttttccatagccactgaagacctagcaggagaaactgggcttaatattccaccagagagaatggaactagacataaattccagataggctaattggatgctataggttactaagagtgacattttctagaatcttcattagatatctcatggctttagcaagttctacatgaaggcaggagaatggaccttccaccatgggccttcccaactatatgcttttgagatttgctaatataataaaagatattataataagagcagtgaatgtttaagatggcccagtttaatcctcttttctcagtagttatacttctaaggatatcactcataagatgaaagtgctaggtctaaacatagtcaccctgttacttagtatattgccataagatgatg

SEQ ID NO: 218190 - DNA, 685 bp, Homo sapiens
tctacttttctatccttgagcggccagtaccacactctctgaattattatagcatttgttgttgttgagaacagggtcttgctctgttgcccaggctggaatgcagtggcaggaggatggctcattgtagcctcaacctcctgggctcaagcaatcttcccacctcagcctcctgagtggctgggactacaggagtcagctgccatgctcagcctagtatagctttttaataagccttaataggcgttctgtattgttcttcatgaatgttttggttattcttggccctttataattttatgtgctttatgtgaaattaaacttctgtatcttagtccgtttgtgttgctataaggaatacctgaggctggataattttgctcctggttctgcaagctgtgtaagaagcatggtgcacagcatttgcatctggtgagagcctcaggttttttccacttacggcacaaggtgaagaggacccagtgtgtccagatgacatgatgagagaaaaagcaagagagatgggaaaggaggtgccaggctgtttttaacagctagctctcagggaactaatggaatgagaactcactcagtgctggaaagacagcaccaagccattcatgagggacctgccctcatgacccatgcacttcccattaggcccacctccagcactgggtgtggt

SEQ ID NO: 218191 - DNA, 294 bp, Homo sapiens
aggtaaaccaccagctgtttcctgttctcccaagatttagtggggaagaaagggaagagaatctctaggggagaatcaagctagaattgctcaccactctaggcagaattcaatacttatcagaggcaaagacactctgagagcctgtgagtcccaaaagaaactggatccagctggacatggtggctcacacctgtaatcccagcttttagggaggccaaggcaaggcgggaggatctcttgagcccaggagttaaagacaagcctgggcaatacagggataccttgactctt

SEQ ID NO: 218192 - DNA, 389 bp, Homo sapiens
ggctctttgaggtcttttccagtaaaacagttacagtaaagctgcttggcagtgattttcctagacactttggctagtcatctcctgtgactgctgttaattaaatatggtttgtagctaagcagcctgtaaggagaagactatggaagtatttgcatattctctccttgaaaatactacctggtctttggctttaagttatacttttattttcccctgtagaataactattaaagtattacctatggtgattagactaagaagtaaaacatgaaatcagtcattgttggtgccctggtgccttcttttttttttttttgagacagagtctcactctgttgcccagatcgccccactgcacaccagcccgggtgacagtatttcatctc

SEQ ID NO: 218193 - DNA, 434 bp, Homo sapiens
cagcaacatgatgaacaaacaatgggagattctagcacaaaaaaagtgattggaggctgggcgcggctcacacctgtaatcccagcactttgggaggctgaggaaggtggatcacctgaggtcgggagtttgaggccagcctggccagcatggtgaaaccccatctctactaaattagcccagcgtggtggcacgtgcctgtaatcccagctactcgggaagctgaggcaggagaatcacttgaacccgggaggcggaggttgcagtgagccgagatcaggcccttgcactccagcctgggcaacagagcgagactccatctcaaaaaaacaaaagtggcccggctcagtggctcacgcctgtaatcccagcactttgggaggccgaggtgggcagatcacgaagtcaggagttcgaccaacacagtgaaaccc

SEQ ID NO: 218194 - DNA, 287 bp, Homo sapiens
gtagaacgtgcaagaaaagggcaaaggagtgaactgggagagagtcggaagatggtgttctgtactttgagaattttttgagattttaaattatttcttgagaaccaacttcgtccttgttcaagcatggaacgggtatgttcattctttgatttgttcaatcattcatttaatagatctaatttttgggaaggagaagcacatagggagccataagaatgttgaatgggaatccaaacatgcaggtgacttcagaaggtttccttgaggtcatgtttgaagccagt

SEQ ID NO: 218195 - DNA, 757 bp, Homo sapiens
caaccttgttgcgactccacatgggacatcctaattcagtccaggacagatatttttaatcaattactatagagctgaaaaacagagagagagagaaagcagccgggttgggcaagccgtcgacagtctgcgacatttttgcgcttcctgggagggaattcctccaagaagaggggtaaatgagaggcccacacgctggatggcaaacacaaacactgtcagatcagatggcaacctttagggttcctttacgatcagatcagtttaaatgaaaaaaaaatcgggtgtaatttttatcaccagggagcactggcctggagtatttccatttctaaagagcggttcccgctgtggtttcattagcatttggggctcatcctccctccccctcccttgacccacccccctccccccgccggacctctgccaggggcagaagagaaaacagccagttattatacaaacatcctcagtttggagctggagtgtctgctctggatacagtcgattctgacatcaattaaatatataaccagacacgtgcagtggcggggagggtcccctcacccagggtgcatctccagaaacgccgcctgcccttcccctctctttagctcagtgttgggagtttgaagatggcctcttcccgtcctgtgtgtattttccccttagcaattatactcctccactgaaatctatatgttccataccgctgctgcctgttactaataaaaaccgtctaccttgcactattaaa

SEQ ID NO: 218196 - DNA, 458 bp, Homo sapiens
attttggaatccccgaaagccttaagagggccagcgttaacatagtttcaaggaccagaatatgttgctagacaacaaccccacttgattcatttttgtctttaagtaacagggtgttttcctgtcatccagagtggagtgcagtgaaacaattatagctcacttcagcttcccaagtaggtgggaccacaggtgtgtaccatcatacccacactttgggtggctgaggtgggcagatcaccaggtcaggagttggagaccagcctggccaatgtggtgaaaccccgtctctactaaaaatacaaaaattagccgggtgtggtggcgggcacctataatctcagctactcgggaggctgaggcaggagaatcgcttaaaataggaacgtggaggttgcagtgagtccagatcgcgcagctgctctccagcctgggcaacaaatcgagattccatctca

SEQ ID NO: 218197 - DNA, 181 bp, Homo sapiens
aaaagaataataagacagaattagggagacataacttgctcaaaagtccttaatgcgtaggaaaatatgggaaaaacagactcagtttctcctgctttgcttccataatacaaatacttctgtgattttggatgtattgggttttcctctacacatcaaataaacaattctgcaacagaca

SEQ ID NO: 218198 - DNA, 210 bp, Homo sapiens
tgtgagaatctgatgccgccaccggcctgacaagaggcagagctcaggtgttaatgaggatggagagtggctataaatacagatgaagcttcactcactcacctgctgctcacctgctgctgtgtggcccggttcttaacagaccaaggacgggtactggtctgtggcccagggattggggatccctggcctaccagatctgggtttaaa

SEQ ID NO: 218199 - DNA, 449 bp, Homo sapiens
tcttaacaactgcatcgttttccattcagtcctctgttgacattgaggtttccagttttccacattcgtgaatgatggtgtgcatctttgaacatgggtccttgcctgcctaagtatttttgtaggttgatcattgtaaacttggaaagcacaaagacagaagccaggcttgctgactcttgactgatgttgccccagtgatgtcactcctgcaaaatgcaaagcctgcgtcctggctgtcggagcatgtgtggacatttggcagcttctttctcttccctcctgctcttctgtttgttttgattgggaaggatatggagtggggatggagaagggtgttgagtaattatcgatggtttctgtatgtttattgctcctgactagcagtgctgggtttcttctctcagaggaaagctgaaagagattgctttgcttttttccagagtttt

SEQ ID NO: 218200 - DNA, 462 bp, Homo sapiens
tgggaacgaggatccctgctgctgactatttgttgtaaatctaaaacttttaaaaaagaatgtctattaattttcaaaaatattgtaaatatgctgaagagacatgaacatattttagaaaactaaacactgacaattcagaaaagtcttcagaattaactccgaaagttcagaaacacattaaaattatataaaaggtaggtcacaaaacaaatctgaataaatttaagactgaaatcataccaactatcttctctaatcacagtgaaatgaaactaaacaccaataacagaaggaaaacaagaaaatccacacatgtggaaattaaaaaacttactcttacccaaccaatgggtcaaagaaattacaaagaaattttttaaatatccggagacaaaaacaaaaacacaacaaaccattacgttatgagatgcaacaaatagtcagcagagggatcctcta

SEQ ID NO: 218201 - DNA, 466 bp, Homo sapiens
atagggcataggggcgggtgcctgtagtcccagctactggggaggctgaggcaggagaacggtgtgaacctgggaggcggcatttgcggtgagctgagattgcgccactgcactacagcctgggtgacagagcgagactccatctcagaaaaaaaaaaaaagaaagaaagaaaaagaagggaaattcccaatcagtgaaagaaaaaccccactgaaacagcagcaaaaaggacaaaatacctcagacgaaacattacaaaaaatgtacaagacttttaagaggaaaacttaaaaacactactaaaggttataaacaaaaagagatgctatgttctcggataggaagatttaatatcataaagacataaatttgttaatttaaaactaggccaatttaaacagaaagttttgtttttaacccagccaactcaatttgaaagtttatttaatgagagtaggaagggga

SEQ ID NO: 218202 - DNA, 772 bp, Homo sapiens
aatgccagaattaggaggacactgaccccccaacaggcatttttcccctcaaacgcttagaagtacctttctgaatacatctgtattatttgcatcaggagtttcagttacttcggctcatcacagcctgatagaaggaaatcgaaagcaaataattctagcactatccatcacgattaccttaggtatttacttcaccctcctacaaatctcagtactttgaggccccttttactatctctgatgggatctatggctcaacattctttacagccacaggctttcatggatttcatgttattactggatcaacatttctcactatctgcttcctccgccaattaaaatatcactttacaagatgtctgaataggaatagctccagtctgcagctcccagcatgatcgacgcagaagatggtgatttccgcatttccaactgaggtacctggttcatctcatcgggactggttggacagggggtgcagcccacagagggcaagttgaagcagggcggggcatcacctcacccaggaagcacaaggggtcaggggatttccctttcccagccaagggaagccatgacagactgtacctggaaaatcaggacacttttgcccaaatactgtgcttttccaacagtcttaccaaatggcacaccaggagattatatcccatgtctggcttggcaggtcccacacccacggagccctgctcactgctagcacagcagcctaagatccacccgtgaggcagcagcctggcaggcggag

SEQ ID NO: 218203 - DNA, 528 bp, Homo sapiens
ggttctaggacctcccaaggataccaaaattcacagacactcaaatctattatataaaatggggtagtatttgcatgtaacctgtggatatccttgtatatatttgaaatcatttctagattacttataatccttaatacaatgtaaattctatgtaaatagtggtcataccatgtttagatataatgacaggaaaaaaggctatatatgttcagtatagttgctgttttttttccctatgtatatttaatttgcctttggttgaatccatagatgtggaacccagagatatggagagtcaactgtacttatttccacagccccagtctgtaactccctgtgctgtttcttagcctaatgcttttatacgtggttcagaatgggcaatatgttctatatccttaggtgtacaaataagagtatgcactatgtgaggatatgtgttcatgtgtgcatgtgtgtgcacacaaacggtgtatatgggagtcagggagctgcctaaaacagattgacagtgggagttgggca

SEQ ID NO: 218204 - DNA, 168 bp, Homo sapiens
gaggatcccgtgctttcttggaggcagcaagtcacctgcagaatccttggatcaggggccctcatcctttttgctgagttcttgagcaagaaaaccctccagccaagtgtgccttgagccatgtggttgtccccaagggctccccttcttgttccagtctggctctgt

SEQ ID NO: 218205 - DNA, 528 bp, Homo sapiens
gggctcaagccacctcagtctcatgagtagctgagattacaggtgcacaccaccatgcctggctaatttctaaaattgttttttgtagagacagggtctccctctgttgctcaggctgttcttgaactcctgggctcaagcaggccacccatctcggcctcccaaagtgttgggattacagacatcagacatggtgccctgcttcatcctctttaagtttttatcagttttctggtatgagtatgatactttttcccaatttttaaccaaaacctgaaagttcttctattgccatattggtggccattgccacctcctttatagagtaagtcagtgtgccaacctcattatcagaagttggatttgtgctaggatagaatttgaccacactgaaaatcacaaatgagttctaactactattaaggaaaagaacaggaaaaagtattggcagggtaaaatatatctgaaacagttttttaataataggggtggctattattagattggttggggtgggagaaatggggg

SEQ ID NO: 218206 - DNA, 415 bp, Homo sapiens
aggaagaccaggatttacaccgtcttgtgcctaacgggagagaagagagggagccaggtcttccactcattttccatgtgctttccgtgggctgaaggcctaaccacgtgtggtcacaaaacccagcactgaaacagctgtcccctttcatctcggtccccacatgtcgaacactagattgtgtgtgtgttttcaatactctcttccagggagttcagaacacacgtgttccttttaactcctaccagaccctgagatctgcaggccaaaaggaccattctggaaggagtttggaaagatcaggggtcagctgttgagcaacagcctgagaatcaggaagcgcaggtctcccaggtcagcccctaactcactcaccctcagctgtgggggctccatgaccttgatgtatcttggt

SEQ ID NO: 218207 - DNA, 722 bp, Homo sapiens
cgagatggctcacacctgtaatcccaacactttgggaggccaaggcaggcagatcatgaggtcaggagatcgagaccatcctggctgacactgtgaaaccccatctctacaaaaaatacaaaaaattagccgggcgtggtggtgggcgcctatagtcccagctacttgggaagctgaggcaggagaatggtgtgaacccagggggcagaggttgcagtgagccgagattgcaccattgcactccaccctgggagacagaccaagactccagctcaaaaaatctcaataaacttaggctagaaggaaactttctcaacctaataaagggcatctactaaaaaccaactgtgattatgcttaatggtaaaagacaaacactttacctccaccccctgccaagatcaggaacaagggaaagatgtgtgctcttatttcttccatttaacacagtccaggttgagtaccctttatccaaagtacttgggaccagaagtgtttcagatttcaaagtctttcagattttggaatacgtgaattatatctaccagctgagcatcctaatatgaaaatcaaaaattctaaatgctccaatgagcatttcctttgagctttgttaactttcaacaaagactttgttgatgctcaaaaatgttttgggttttgcagcatttcagatttttgacttgggattctcaatctgtcctggaggttctacacagtgc

SEQ ID NO: 218208 - DNA, 406 bp, Homo sapiens
gaattgattcactttgcttggggtttttacccattgttatgacttctactcttttcctgagtagaaataattcaatcaggagttcaggaattttctgcccaagccagttcatccctcagtggcaaagcagactcccagaggcactcatttcatcccacacttgccttgaaattaaaagctccaacccctgagctttgtttgtgttttttgttttgcagaattttctctttttgtcatttcattaagcacactgaaaaaatgaggagggaatttttgaggcaggtggtttcagtcattgatgccatctgctcctgtgggcagacctgataagatttgcccacgtcgtcctcattgagtacgtgcccctttttttcagtccttgcagtgaaacatacttcttaaagga

SEQ ID NO: 218209 - DNA, 966 bp, Homo sapiens
ggtgacctggtcacagcacaggcttcttttgtgttctgatggtgatatttgaccaacaataatcacaaccactctgcacatttactatatgcaaatttctgttcatctctgatctcctttcctgcttcaaacacccagtgagcttggagttttaccaaaggggaaaccaggacttaggaagtaatgagggatgttgttgaagacttcttgtcattagaccaggttattggtccaaagtaatgaaggtaaatctagtccctgaggacaggctcactaccaggctataatgggaatttgtgctaattagagaaactttccctttctgctgcgctttgtcccaaggacccaaatttggccagtgttccccctctctataaccaaaatatgtcttatttccctctcttttaataccaggaggggtccctctactccagtcgaaagacaatctttgagtgctttgacccgaatacatcctcccacatctcagggtcccacaacttccccatcagggcccaaccccagcatagaagccattaaagctgacattcaacatcctttgtgattctgctactcttctaatgatggctggggcccaatcttctattctttctgccctgaggctccaggaaataagaataaggactcaggttccttccaaaacaccctatgatgtttgcgtcatctcctgggtcagtgctgagtcacggatttgttcatgtccctgcctgccagaagaggaaagacacgaaatagaagacaaacaatgtccccaatcatcagagatgtgtggaaggtgcatagtcacgtccactgaaaacttgctcacgcatgcacctgcagttgcacattgagggatcatgtgatcaaggacatttttcacaaaaccagtgtcattgtccacttaaattttaagtgttcaaatcactaaatttcataaagttattaaaataatttcctcatatcatc

SEQ ID NO: 218210 - DNA, 351 bp, Homo sapiens
caattttatgctattttcaagttaaaccttggtaacaacctcttcccaccttctacttacttctctcaatatattgctgtttaacatctactataccactttttgttctcatcaaagagcagatgtacatctcagaatttgtaaagataaatcagcagaaaagcaaaaagtcccttgaatgaatttccactacaaaatcaaaaccttataaatacatggttatgaaaagcactggagaaactaaatagacttggttagcttttaagaattatgggatttctcaagaccatcctggccaacatggtgaaaccctgcctctactaaaaaaaaaaaaaaaaaattagctgggtg

SEQ ID NO: 218211 - DNA, 519 bp, Homo sapiens
tcacccaggagagccagcagagcatttgtgtatgacataggacccccctaccaccacccttgactgttcaaactggagaagggctgaaaacacgtgggcagccaagcaccttttatgggtttctggaaggtcatctcagccacagcatcaagtacaccacgtgatgctcactcacagtatgagcccccatgaggaaagcaatgaccccaacactgagagcatggtagggtcccatctgctcccacatggcagacaggccccgaggaatgagcatgactgggtctgccaaccagatgcagatgcagggtggtatggttgaatcaggcagatggctgtaggatcaattctccatctcaccatttttttgttgggtaattctgattaagttagtgaacttccttagcttgctttgtaccatggagacaaaacatccacctcacacaattgctagagcatgcaggcgaggaaggacttgacatctattgtagctgataataaagacacactagtgctctcttc

SEQ ID NO: 218212 - DNA, 434 bp, Homo sapiens
atgtattcaaatgtgtgaatccatctaccaagaagaaatactacaaaattgaattgttcattttaaaaagccactgtgcactgttgttcttagtggtcataaatctctcaaaacaagactttgcatctttttatgatcaaagttaaagttttgctgtcagttcagccagtgacaggtttaatgtttttccttgttccttttttggggaccacctctttgactaggatctcttagagtatcaggatggggaaaaaggagggataaattaaatatgtgcttatatgttaaggaccaaaattgtaaacaagtcaaatctaagagtcggtatgagttatttcttctcttgtaattttgtttatttagataatcttcaattaatagattggtaggcaggatttgacaatccttttgtcatataaaagtgatattaaatt

SEQ ID NO: 218213 - DNA, 386 bp, Homo sapiens
ctctggtttctccttcccgagggcgggtgggactgccgggctgcactagggatccccgctccacgtcgccctctgcagccctctggcccctccactctccgggggttcctttccagcctcctctctgaccagctcctcccctcggaggataagtagcctctgggaacggacccggcgggaaggagacgcggagggaaactgagcgggggcgcagtccggggtgatcgcacgggtccttccagaagcctcccctcctctgaagcccacagtccacagccccccacggttggcctccgccccgcttaggctccatccccgaactcaccggccagcccggtcctgcaccagctggacagcaggagcagaagcgggaggcgtagaaggaa

SEQ ID NO: 218214 - DNA, 470 bp, Homo sapiens
gggcctactttttataaacactgtatccaggatagctttctttttgcctttggttgggatatgtgtaaggaaaataaatcttaggaccccaaatcactgagccaagggaaaagtcaagctgggacctatgtcaggcaccctgcctcccatttcattcctaaataagatagctacaaagataaaaagtgacatacctccctcacaatttgcccacaaggaaattcttggtggacaacggaaagatagaactccaagtctccttctgaggctcaccttagacaaatgcatatctgattgcttcctctgccctattgtttatgtaaaaatgaagattcactgagccagactatattttgtatccagtggaaggctcatcaaggactcaaaataatgcaaccttttgttttatgacctggaagcccccacctcaagttgttccgccttaccagaccaaaccaatgtacatctta

SEQ ID NO: 218215 - DNA, 562 bp, Homo sapiens
agattaacacacgtgaccatgtgtttgctttagtctgagtgtagaactcaaatttctgcagtatttaatttctacagtttccttctgagcagaaaaagaataccataaaaatatttgcaaacattatatatggtgatctagggtcacgtctccaagttctaagcttctgtggctccacgcacacaggttccctaatgtttactatgcatctgtcactgttctgttctattagattgccttaactataggcttgtcctaacgtaaccatccaaacctaaggaaggagaaacttaagtgactctgtgaacttagtgaagtgaccagatttaggaaggctaaaacccagaggaaataaaatggaaaacttgaaggtgacaaattaaagtggaaaaatagattaatttttttaaactttattgtcctgagaaacaaatctataaattcattaattttattttagagactatctctagattcctggaaatgaaggattcattatactcttagatcagatataatactgatttctgtgtatacgttaataaacttttttagaacaagt

SEQ ID NO: 218216 - DNA, 656 bp, Homo sapiens
acagaatttgatagaataatttttgacattttaatttgacaagaaacaattcagggaaacgattttagtcttgggcctgaagtggagtcttctcttgctgtttgtgatacttagtgtggggaatgcctttgaaacagcactttataaaccctgtgatccatttaatgtgatagttcaagctgcttggctgtttttttcataggagcctcacctaaaatagtctaacacagtggaaagatttttctgtattttagagggtaatgcagtaaattctaatctttgtgagaaaaacatagctttccagaaggacaataaatttaggtgtaaaatgtgtgaattgtatgctcctttatcctttaattgtattatagtctacatctttctaactcaaaaagtactctttgttttaaaaatatcccttcccacacttgaaaatggtagaataagactaattttagttacaggttctttgtgtgtttgtgtgtatatctctatataacagaaaacttacatttttaaataatgaagttaaagctttaaacaagtagagtatatacacacataaacatgcgtgctaatttgtttctgaaaaattatcttagaaatctgtgtttctccaagtatttggggggatatttaaatagccaaactagaaa

SEQ ID NO: 218217 - DNA, 433 bp, Homo sapiens
gagactcttaagagtgtttttgcagagttaaaatattaggtgtcgatcctcttttaaaatgtttgcctctaaggaccttgaccattccaattccagttccatccctacacttgtctaagctagcagggggaaaaatttttttgtttttggaggaatattttaattaacataactctgtgtgtttgtatatgtgtgatttttaataattcacaatagtgcatttagattgggggacagtaacctatattattaaaattcttttgcagttgtatataattgtaaattttattctttttcaattaatctgattttagttaaaataattactggagcattttagttacactaaacatatttcactagtacaactacatgattgtttaaatatactcctacgaacttactgggaaattcaaggaccatatgtttttct

SEQ ID NO: 218218 - DNA, 535 bp, Homo sapiens
accttgagctgcatccatgttgctgcaaagagtattacatgattcttcttcagtggctgcatagcattggatggtgtgtaattacctaatttttaaaatccatctgaagatttatgagcacatggtttcattccacatttttgctattgtgactagtgctgcaataaacatacaagtgcaggtgtatttttggaagaaaaacttatttgtatttgggtatatgcccagtagtgaggctgctgggtcaaatggtaactttagttttagtcctttgagaaatccccaaaatgcattctacaggagctgaactaatttgcattcccaccaagagtatatcagggttctcttttctacacaattttaacatctgtttttttttttcactttttaataatagtcatttagactggggtgagatggtatcacattgtggtttggatttacatctctctaatcattagaaatgttgatcaattttccatatgtttgatggctgctttttttgtcttttaaaagtatatgttcacattttttg

SEQ ID NO: 218219 - DNA, 704 bp, Homo sapiens
aaatccccaaatttttcataaactcagttttaaactaactttttttcaaaccacaatctgatttaacaatgactatcatttaaatatttctgactttcaaattaaagattttcacatgcaggctgatatttgtaattgtgattctctctgtaggctttgggtataatgtgttcttttccttttttgcatcagcgattaacttctacactctaacatgtagaatgttactacaatattaaagtattttgtatgacaattttatttgaaagcctaggatgcgttgacatcctgcatgcatttattacttgatatgcatgcattctggtatctcaagcattctatttctgagtaattgtttaaggtgtagaagagatagatatggtggatttggagttgatacttatatattttctatttcttggatggatgaatttgtacattaaaagttttccatggcagaaatcttttcaaaaactttttttttccgggatggattgaaggccctgatttcaccacaatgcaatatattaatgtagcaaaattgtacttgtaccccatgaatatatataatcttaagaaaatttttttagccaattattattacttactagatattaggctgtgttctgaatcttaatttaattcctccaaagaatcttatgaggtaggtaggagctattgctgctattctgttatgcttatgt

SEQ ID NO: 218220 - DNA, 341 bp, Homo sapiens
atatacaacacttaagtgcactatttaattttccaatggactttctaagcaatctaattttaaaatccatggtgtcacctgaaacaaaatcttatgtaatttttaataaaattatttatttaaaggaaatttacctgaatagcaaagaaaaattttcactcaaaggaagtatttaatactaaggcaactattaaactcataatatttattttaatttgaaagaaaaacataaaggcatgtaaaataaaagcatctaaatcttgcaagtccttcatactatcacataggtagtctaacatatatctcaacaaggcaataaacacttttcttgaaaactgata

SEQ ID NO: 218221 - DNA, 230 bp, Homo sapiens
cgcttgctgctgcatgtcgaatctatatgatccccctgctcacggtactcaaaggaagtatttaatactaaggcaactattaaactcataatatttattttaatttgaaagaaaaacataaaggcatgtaaaataaaagcatctaaatcttgcaagtccttcatactatcacataggtagtctaacatatatctcaacaaggcaataaacacttttcttgaaaactgata

SEQ ID NO: 218222 - DNA, 447 bp, Homo sapiens
gtatatcttcttgcatgagtggattcagaaacttcttgacagggccaaactgcaggatacaagcaatgtagacatagcagtagcctacctaggaatgaaaaaaatgaatagttttattaaattttattctacaactgtctatctaagctgattaattttaaacagtttctctgatgagaaataaattatatatttattggaagtgtcctcacaactttgtacttcctaaataataggaaaaatagttggacatgataaatgcttgtagtataatggtgtaattggatctgaagtactgcattaaagataggccatagcatcctcccatcagctttgacacttactctctcaggatcatgatttgctattctttataaggatcatttttcttattatcagtcaacatgtttacattggaatagacacactcttctattttagttatag

SEQ ID NO: 218223 - DNA, 285 bp, Homo sapiens
gcctgcgtctgggtccctcaacctgcctgcctatgtaaggacccagtggggcacaggacaggagatctggggcaccagtatttgccttcagcgtcagacgatctacacaggacaggaggcaggtgggaggactgaaggaaacagcctctgaaacggtcagtctggaggcagcaggttgagtgaactgtcacgctccaggggagtctttttctcttgcttctaaggggtggtggccaccaccccttagaagcaagagaaaaagaaaaaaggcaaataaatgcagaa

SEQ ID NO: 218224 - DNA, 91 bp, Homo sapiens
aataaagaatgtggtttatacccagttgatgaggaaaaactcttctttactataggatgccagctaataagtataaaataaaatatagaat

SEQ ID NO: 218225 - DNA, 545 bp, Homo sapiens
agaggaatttcctcatcagagctcacactgcagtcatgttaaggctaatccagtttcacccccattctttcttgggggcagtggttggagttggggaaacctcaggatctggcttcaatatttttcttatcatacacagggactatgcattacatatttttactctctgagtgaagtgatagaaaacagaagtaggttctcaaacagttaattgattgatacgcttggtcacaatgctttttaatgggaaacctgggagagctgtgaggcattgtttaatttagtttcattatggaagctcttgttctttttttgggtacttactatagttaacttttcctattttctgagattaaacttgaattaaatgcttaaaggagttctgttaggaagaacagagtaaaagaaacttctaatatgtatgggctgttgttgaatgaggcagaatataaatactttatgggttttaatttgttaatatataaattttactattaactgaacagttgcctattctctgttctgcttttttaattttatttaaa

SEQ ID NO: 218226 - DNA, 132 bp, Homo sapiens
acctaattgcctttccattactttcaacaaggagtgaatgtaggagggagaccaaaatttcaaaaacttggagaaagaaaaaggtatcccttttgtgttccgattaaaaaggcaaaacaggttcaatcccga

SEQ ID NO: 218227 - DNA, 605 bp, Homo sapiens
aaaggatgacgtggaaactcctgggtggggagaattgagagggcttagggtccatctgaatgtaggaggcacaggaggggaaggagttcaagtgatagcataaggctttccagatggttttaggagcagctgaaaggaacaacttgacaaaaatgtcctacttttagaccaacaatgaaataggttctaacctccagcaaagccttcagaagccactagcttatccttctgaaagaaatctattctacctaggttcttgagaaaagagccctcatttaacattaactctgacttaaacttgggtaaaatatagttttatcataggaatttttccgtggaaaacataatctttttagtaactgctgtacccatcccactgtccccaccttttaacttaagggagtgacttgggtttttatttttcaatctgaaaacttgggataacaacaccttcctcaaagagctgcttaagcttctggaaaacaatgaaatatgaaccacacacacacagctagaagaaggaaggttattaaggtttctgtactaatcaaatatgatgttagtggataagaaggaggtcggtgggtagacgttacagggacaca

SEQ ID NO: 218228 - DNA, 496 bp, Homo sapiens
taaatgtctcaaaacattctggcggaaaaaggtacagatgatatggaatgataataggccatctatccatgatatggcattcagagtttttcttgtttttcttttccatattggtaaaaattatggactttattcataatatccaaaaaatagaaacaaccaaatgttcatcaatgggtagatggataaacaaaatgtggtctacccagacagtgggatagtattcagccatgaaaagaaaggatgttatggccggcggccatggctcatgcctgaaattccagcactttgggaagctgaggcaggtggattgcttgagcccgggagtccgaaaccagcctgggcaacatggtgaaaccctatctctacaaaaaaaaatgcaaacattagctgggcatagtggcacaatccctgtggtctcagctactcaagaggctgaggtgggacaatggcttgagcccaggaggtggaggttgtagtaagccacgactgcacc

SEQ ID NO: 218229 - DNA, 432 bp, Homo sapiens
atcaattagaaccaactcttctttcattttttcacttggagcaagaccagatccgtaggaacaaaggtcctcatttccttctcactggagatgcctaggccactgctggttccatggtggactttaattcagctaggcctcatgctttcttccttcacatgcatgcaccacagtatttgtcttgaacttgagcctctggcttcagaattcagagaagacgcatgtggaccaatcacggtcacatcaaccctatggccattgtggattcaaagcagagttcctcttcttttatgtgtttttctgtatttgccaaattttctacagttatcatgtgttacttttgcaattagcaaatgcaaaccccaaaatagacaggatgaaagcacatactcaaaatgcagacccaaaccatgtacctaacattgtgatggg

SEQ ID NO: 218230 - DNA, 332 bp, Homo sapiens
  misc_feature (1)..(1): n is a, c, g, or t
  misc_feature (27)..(27): n is a, c, g, or t
ntaccgttatgtataaagaactatggntttaattgtgtcttaaatataatgcaagctatcacggtaaaattttgagttacttactaattcctaaaagtaagccaagtacagctttaattatttttcctaactttggtctaaaaatgacagtcaagatttaggtaggttttacataaaattctacagattcagtaaaatacactcagtaaaataaacctttggggaataaaacttgtttttcactgtaatacctttaacatgacttgtgtactttttgccaggctcaatactaactggtttatacggattgcagacagatgtcgatatataac

SEQ ID NO: 218231 - DNA, 321 bp, Homo sapiens
gatctagaggatcccagtcgaggttgtcttaaatataatgcaagctatcacggtaaaattttgagttacttactaattcctaaaagtaagccaagtacagctttaattatttttcctaactttggtctaaaaatgacagtcaagatttaggtaggttttacataaaattctacagattcagtaaaatacactcagtaaaataaacctttggggaataaaacttgtttttcactgtaatacctttaacatgacttgtgtactttttgccaggctcaatactaactggtttatacggattgcagacagatgtcgatatataac

SEQ ID NO: 218232 - DNA, 377 bp, Homo sapiens
agtaaaacccccactctcagggcaggtgccccatgtatagctgccttgccaagctggcctcagccttgcatcacaggcctgcatcagaggatgcaatgtgatactcactatcatgttccctgcagagctgtgtcgagaacagtgctgtctcctccagcacattgccttggcccctgtataagggcctgtaggagaaaagcccttcacacccaagaaggctggacttcccttaagctcttaatttattttcaattttgggtcagtgagaatcttgaaattaattggttctctttttgctctggccactaggaagctcagagccaaatgtatgtcccacttctgaaagtagtgtgctttaatatgggtatcattcggga

SEQ ID NO: 218233 - DNA, 1836 bp, Homo sapiens
  misc_feature (232)..(232): n is a, c, g, or t
  misc_feature (502)..(502): n is a, c, g, or t
  misc_feature (885)..(885): n is a, c, g, or t
actaatcatggaagcccagaggcgaaatcagcttcccggggacccagaaaattgctggagtctggcgaggggcaaatcaggaagtgtctttgtcggagatgggacggaacccggctttggggcgcaaccgggctctgggggagaccgcgtttgtccaggtggcaggccgcgccttctgatggctgtgaagagaaggagcgggggttttaagagccacagcgccaccgagagngtggaaaggagtagattagctcgcgcctgctatgcgaggcgactccccccgagacccacccgcagcccagcgcccttggccaggaggcccggaaagccaccgaggcggccgaaaggggccgcggggcacccctcagcccctcctgcggcggctccggctgcccctgctcagcctcccgctccccgcccggagtcccagctctcagatcggccgcagagctgggaacagaagccgcggggtccaggccgttccgcccgctcagccggagcngcagcgccgcctgccgggggcctcgcgcaggcgagacaggccagacgccggaggccgcgggcggctgcagctttgacgggccgaacacaccagcgctcccgttccgccttttgaaaatcaaatcccttgggcctggtgccaccatcgctcagcccaggtcttcgacgacgggtcgaaggccagtgctccaggccttcttcaccgagtggcttcggcgcttgcggcccaggttccccgcacctccgcgccgtagttgcgcgcaccttttgaaaagcttggcgtcttcaggtataaggacaaaaacaaccgcggacatcacaccattccaaagaagaaaaagaaagtgcccggaatctcagggcgcgacttccggggcgacgggnggcggcggagaggcgctcccagggcttcctacccggcaggaggccgcggcgccgggacctcgcctgccctcaccgcgcgccacctctcgggagacgccgcgaatctctccagggaatcccgggcagcggcgcagacccagcaaggaccggcagcaggccgagaccggccgtcttgggcgagagcagcgggacacgagcccccgggcgcccgctgggagcgcggggaggctctgggctcagggaagctgcgctccgagtggccttggaggacggtcaaggagcccgggccccgcggcggccgggagtggacgcgactggtccgcgccggccgcaggggaaggggcgggtcggcgctgcctgagctctatctgctctaatggctggggtagatccgcggagatacttgaataccaggccgaacgcttccccaaggcgtgttgtagacaacgggcccatttgagcatgtgcaaagaacaaatttcatccatttttctgtctaaaacattcaaagactcaaatctagacaatagtttctctgaggtagaagtgttgggggtgggggtgggtgggaataaactaaaagttggggtaatgagcttgtttcttgtctattttgtctgactatagatttacaaaaggagcaccctgctttactcagtaataccaggccctcctagaaacttacccaccagcttcacatggcatgatcatttgatgaatcgctttttagtttcccattccggacaaatatccacccaagagaaccaatcataacactggatgtattaacgcatgtcaagactctcacttctctgtagaaatgagaaataaatgtcgattgttggttttctgtagacttgtgatcacgcccaggaactgtcattttccagttaccagaatctgaatcattgtctaatgtgccacgtatataacaatatatcactaacagcg

SEQ ID NO: 218234 - DNA, 414 bp, Homo sapiens
tggcagtgaccctgcacctggctgtgaccctgcacctggctgtgacctgccctctctcagaggctcagccaccaccagggggcactcaggacatcaggagctgctcagaatcaccagacggcggctgggcgcggtggctcacgtctgtaatcccagcactttgggaggccgaggcgggcggatcacgaggtcaggagatcgagaccatcccggctaaaacggtgaaaccccgtctctactaaaaatacaaaaaattagccaggcgtagtggcgggcgcctgtagtcccagctacttgggaggctgaggcaggagaatggcgtgaacccgggtggcggagcttgcagtgagccgagatcccgccactgcactccagcctggggtgacagagcgagactccgtctcaaaaaaaaaa

SEQ ID NO: 218235 - DNA, 255 bp, Homo sapiens
gctagtcacttaggaaggttaggttatttatataagatttttttttaacgtaggcatttaaaagtataaatttccctctgagcactgctttcattgtatctcatagattttggtatgttgtgttttcatgttcatacatctctattttctaaatccccttgtgatttcttctttggcccattggttatttaagagtatgttgtttaatttccgcatatttgtgaattttccagtttcccttctgttatagatttc

SEQ ID NO: 218236 - DNA, 498 bp, Homo sapiens
aggactgtctgcctttagtttgctgcatgtctttgagagacagattccatctgttcatgagtcccactggcggattgtttaaactttcttatgaacattttcaaaagcccatacaaataaagagtatgtcaaccagcactttttaagatgaactgtaaccaactagcttctcacatgcttctcatatggtaagagttaattttagctcatgaaacttttggttctgtgaaacacctgctgaacagactcctgggaagggggtctgtgggagtcgacatttatacaaccttccaggtgattctgagcttatcagagctggagaggcacttgctacccaggggcttggtgtggaacgtgagatgccaaagccaaattcaggcctctcagctcaaggcaccctgaagcacagctagtcactccagcacatgttgaagctgtgcatgtttacttcatgttgaactgttcatgttttatttttggaacactggggattggcaa

SEQ ID NO: 218237 - DNA, 346 bp, Homo sapiens
ccaagcaaagatggccttgctgttgagtgagtgaattgcagctcatctctctgttgtgaccttgtccatttcatgcgaagcaacacttatgggtgggcccagtgcctgtttgctttcagggaaacagcacagaaatcaggatcagtaaatttgatgttgaagtctttttatcccttggactctcccatatcccactcaggtccccatcagcacattgtcacctcatccctgcaatggtctggcagctctgctgtgcctcaaagaggctctgacaagcctcgctgggatgtgcaagccactgcgcaaggctaataatttggtgattctttgaataaatattaaaaat

SEQ ID NO: 218238 - DNA, 485 bp, Homo sapiens
cagccattactgattcccaagttcatcactgatagcagtgatgagacctgtcttgctcacttggaggtaaagatactaccctcggcaatgatatttctttggactgctgcagacatttaattgggcactaagcctgatgctgttgtgaaggaagataaactaaagagcctttgtttatgaaaatattgtcaaagattatatttaaagtgagctttcattagggattgaatattttctaactctctataggatagaaatttccattgaaatacgtaaagctatttttaaactttcataatttgacttttttgtatattttcaggaaaatattatacattgaatctttctttccaggcattaaaatccttgaggactagatagtcacctatttttttctcatttctcctagtaattcacatatatactgtagaagagctataaatatactataaatatattgaataaaacgcgttctctctcatgat

SEQ ID NO: 218239 - DNA, 403 bp, Homo sapiens
tgattgggaacatgttgaccaaatgataaaaaatttcagctaaacaggaggaacaagttcaattattgtataattgactgtaattaataacaacatattatatacttgaaaattgctgagagagtagactttcagtgttcataccataaaaaatgataagcatgtaaggtaatagatatgttaactagtttgatttagccatttcacaatatatacatatttcagaacatgttatacactgtaaatattgtgtcagtttaaaaataaaattaaaaggtacttttacccctaaaatcaaatttattttacaatgatattacgaggaacttaactattttctgagtatcggtatcaccaatcccttgttgttaacttgagaaaaaaaataaaggtggaataatgc

SEQ ID NO: 218240 - DNA, 559 bp, Homo sapiens
agtactacctgtactactagtagtagtaattactgaatacttttcattaatttgttagatcctcacgaccaccccctatggtaattatattagtatctccattttatagatgcgaacactgaggcatatagatgtggcttatctgcttttatgtggtcacatagctgctgagtgatggagtgaagacttgaacccacactggtaactatcacaacaacccaaactttgcatctgtcagattgttggcagttggtaaggaccagggaaacagaaagcttcatgccctgctggcagaatataggctggtgcaggtgtcctggagataagcctgggaaagttgagctcaactaaggatgctttgacctgaggactgaagccctggtcaccaggggatgcgaacaagaaattgggtgcagatgaggtacatatccccacgggtatggtaagacaaaaggaggcatgtggaccacagaacaccaggcagctgcagtcaaaactgagacttagagggtcatacagcatcacaagcaagtctttaaaacataaggtaagttttttg

SEQ ID NO: 218241 - DNA, 502 bp, Homo sapiens
tgcagagcggagggcaggtataacagctgctttggaaagcactgagcccagagatgatagctgtgtgaggaggtcccttgatcccccagtctgggttcttaattatctagggcagggatgctatacaaagtgagttgttcctgaccccagggaatttttaaacaaggttcacctgcccagccacctctcctgagaagcctcatagacagagtcgactcaggagtacttaggctcttagtgaagatctcttctagaaaacggcctctggttttccttctttccaaaccaatcatttttttgtgaacaggaaaagacagagttattcccagtcccatctctccctgctgttacctgagcggaggaagtgatatctaagtggctgagttagcaaaggggaaacagctgtggtttctgccactccactgggctgctttctctgtccctgtgctgtcatttccctttggctggcgaggaagccaccctccccaagcctgggcggagg

SEQ ID NO: 218242 - DNA, 210 bp, Homo sapiens
ctggtttgtaatattggagagccatttgctaactacaggagtatgaaacagcatgactggttggagaaaaatcccataattaagagagatgagggctgggcacagtggctcacacctgtaatctcagcagtttggaagaccaaagtgggaagatcgcctgggcccagaagttcaagaccagcctgggcaacatagcaaggctccatctct

SEQ ID NO: 218243 - DNA, 170 bp, Homo sapiens
tgtacattatacaaatcaactctcctcccctgcaaaagtaacctctatactgctttttatagtaataacttcctagagttcatcacagctttatcacccaagtgcataccactagacactgtaattgtccatttgtacattcatttttttactcaatgtattttttagta

SEQ ID NO: 218244 - DNA, 470 bp, Homo sapiens
ctttgaattgatctctttgttatgagcttggaataaagaaaaaaatgatatgtgaggaccaatttaaatagcacttggtatctgtattttaaacttataaaccatggtgttaactttcaaatgtgactgttcagctgccgtcctttatgcttatcatgtgtcttgggctttctaagcttgggtctgcatgctcctcggtgttttcccaggaatttcagtgacgctttttatgttacctaattgacgttgtcaaccatttaactgtgtagcgcgtgtgctttaacattccacttatgtttatacctggggtctgcaaagaggaaaacattcaagcttttaagaattaaatcacctagaaataatgattacagttcgatcatgagaggagggtgtgatggtagcaattcatctttaatgctctagtggcagtcattaaattttgtgaatagcaagtatttggcaccactttt

SEQ ID NO: 218245 - DNA, 382 bp, Homo sapiens
atttccccatgttggccaggctggtctcgaacttcctacctcaggtgatccgcccgcctcggcctcccaaactgctgggattacaggcgtgagccaccatgcctgaccctgcctagctccttttaatatcccccacaacttgtcacacactttatccaaaccagttccctgctctgagtctatagccatgactcactactgcctgtatttccagatgactggaattactgctccattccagactgctgccagaattaatgctattgctttctctgtaatactttgtacttttcaaaggatcataatttatctcatttgtgcttacaacccctttctataatgagagctgttcattcctatgctctcattcctatttcattgg

SEQ ID NO: 218246 - DNA, 473 bp, Homo sapiens
gaggtggcggagggattgcttgagcctgggacttagaggttgcagtgagccacgattgtaccactgtactcggcctgagtgacagagtgagaccttgtctcaaaaaaaaaaaaaaaaaaaaaagttaatggaataagaactgccaaaagcacatattatcttgtgggaaaatgttcataacattatcagatgaaaaagcaggttataaagcatagagtatggactcattctgtttgtgcaagggaaatacacacagaggaagaatatacgtcaacatggtgacaaaatgtagcagacgtctttggttgttggatcacggatgaatttctctatgcctttttgtctctcaggttttaggcattgagaatataatacttttattcttaaaaaattgctttggttttgtttcattttgaaaaggtgaaagggtatatagccgctgctggtaatttagccttgggggaggggaggaa

SEQ ID NO: 218247 - DNA, 438 bp, Homo sapiens
acaacaggttgtaggaatgctttgctgggattcccaatttgggatatattagaagtgaatatgtctttcaccaaaaaagaaactaaaaggttaaaaaagtggaatacaattacacactaaggtagtgtcaaagccagaattacaacttaagtctccaaaccaattccattttggaggcaaaagtcttcatatatgagtagtaagtacaaattgtttcatgtgctttgttcaaattgcaagaaacagagctgctgtcttcacactgccttaaggccaagtccaagggtactcctggagtcaggccttgcccctactgaagcacagggcccacttagggccatattctgcctcctttggcttggagagtcacagttcctcctactggccccaaatctgggtttctatcatggcaatggcatgatccggcactgccaaaaa

SEQ ID NO: 218248 - DNA, 431 bp, Homo sapiens
ctaatttttgtattttttgtagagacaaggtctcaatatgttgcccaggctggtctcgaactcctggcctcaagtgatcctccttgccttggccatccaaagtgctgggattgcagacgtgagccacagtgcctgacagtaatatttttttttttattagaaacataagaacccacctcaaagcttgggcttggaagtctatggaggctttatttattttagccacagacatggataagaggcaatctaagttaaatatgtgcactttggtaccaggccaacctgagttctaaccaaatttttcatgttttagatgtgagacaagttaatcttctaggccttacttccttcatgtataaagtagttattattacttaattcaacaaatattattagtcactcttctatgtgttggggtattccagtgaata

SEQ ID NO: 218249 - DNA, 224 bp, Homo sapiens
tgggcactctcaaaatctagaaaacactcaataattcacaaggccataaggcaatgttattatgaacagagcatacaaaatcagagtgacagattctcatatcaagggaagtagagaagaattttgatttttcagaagcatcaaggaggagtgaattcaataagaacggctataaaattcaggatccatatgtataactgaggttggatcagtgggcaagttca

SEQ ID NO: 218250 - DNA, 339 bp, Homo sapiens
gcactaaaatctcagaaatcaccattaaacaacttatccatgtaacaaaagaacacctgttcccccaaaactattgaaataaaattaaaaaaagatagcctcttctccattgtccaataacatgttcctcatttccatctgagatctcatcagagtggtcttactatctatatatttaccaactttctgtatgtaattacttttatattctctaagaagatggaagctttctatccagaaatcttttctttctgagcctttaccagaatcatcttcaaaaatttcttcatggcatcactggctttatctagcatgcacctcaaaactcttccaacttct

SEQ ID NO: 218251 - DNA, 491 bp, Homo sapiens
taatgctattgcacacttaataaactatagtataaacataacttttatatgcactggaaaccaaaaaattcatgtgactcacttattgcaatatttgcaaattggggtagtctggagcaaacccacaatatcttagaggtatgcctgtattatattctttaatcctctcaactcagtgaggtaggtactcttactagccctgctttacagatgagggaaacctctacagagaggttaagtgatttcccagaggactgacagctagtctgtggtggagctgggatccaaacccacatagcaggcttcagagtgtatgttcttaatcataattatacagaaaatctcaaattaatagtttcaatccattattttggatttttctcaagagataaacatatcatttgcaaataatgatatgtttcattctcacttttctttgccaatagtgttactactacttatcttggctaattatattggctagacatttg

SEQ ID NO: 218252 - DNA, 672 bp, Homo sapiens
ctggaatcaagcgattctgcctgcttcagcctcccttgagttaactgagacttacagagcacccgccccatgccccactgatttcggtattgttagtatagacagggttttgacatgttggccaggctggtcttgaactggcctcaagtgatccacctgcctcggcctcctgaagtgctgggattacagatgtgagccactgctcccggcctaggctagatttttaatcacagtcaaaattttcttctcaatctactgtgacttactattttaaaattccttttggattattatcagacactgctctgaaagttcatataatcacatttgttccctcccattgcccacaggtgtatgtgtcccttaaagaaccctgatgaatgagatgtaaaagccccttatcacagctgtgcctttccccagtgacggtgtacttctgcatgtgtgagtgtttccagtatgatcctctcctgtgcactctaccagccgtgaacctaggagccaccaggctataataggccaggagccaggcctccacctttctggtaaatcaaagtcacggtggccacccagtatccacaaccgaacatggtggtggtctatgtatgggagacccagaacaggaaagagaaagggaaaggagaggaagtggggaagtttggggcaggatct

SEQ ID NO: 218253 - DNA, 232 bp, Homo sapiens
tgtgccactgcagtccagcctgggtgtcacagtgacactctgtctcaaaaaaaaaacaaagactaagggtataggggaaaccattgtaggagaataaggggatcagattggtattttgaagttagaaggattactttggttttagagtggagtctagattggtttggtcaagactggaggaggattgagtaataatagaaaaactaggctggctgggtggctcatacctata

SEQ ID NO: 218254 - DNA, 162 bp, Homo sapiens
tatttcagggtaaaaaggaaacagatctcttcttatttctgcaactcccagcacagctgcaaagaatacatcaggtgggatatgaaagttaggaaatgctcaatggagcagctgctttttgcttaaaatctccacctctgtgttgcttagatttgaacccaa

SEQ ID NO: 218255 - DNA, 417 bp, Homo sapiens
ttgtaacactattatggctcatctaatttcatgcttttctggcttctgaaaatttcatttgcgaggcatacggccagagtcccagctacttgagcagctgaggcaggaggaacccttcagcccaggagttcaagcccagcttgggcaacatagtgagagactccctcccttttttaaaagcacacaaacctgatttgtggttgctcttccctttattcgccattgctcctgttgcttcatggcaactcatatgtttctaactgcaggagattggaagtccttgtggcctctccacatcactgctgcattgaccactctgtcctgttttaaacacactcttcctttgccttctggtttctttcccccaacccccagcccttccctgtgttccattaaaggctgttctcctcagcatgg

SEQ ID NO: 218256 - DNA, 321 bp, Homo sapiens
ctggtctttgaggggagggagactgaggggtcattttctcacctgcaccaacgtgtttattaaagctggcttgtggatcatttggaggaaaacccgcatctgtgactttcagatgaatggaagtcattttaaaaaacttttttttgtctattatggagaagttttgtccttgtgatctgtgaatacagtcactggagagcagaatgttgaccgtgtgagtgcttacagtgtacatacaaagtcacatcttcacaagtattacattaaaaagtgacaaataatagaaaactatttttctcattacaacctcggtaagaagct

SEQ ID NO: 218257 - DNA, 517 bp, Homo sapiens
taggatgaggtataggatacaaatctagttcttaggttgtattaagcatgatgggtacaagatactaggttgaggctcagtgtttacccaagatttatggagtgaagaattcagacaagcatttttctaaccctggactgtgaatccaaagatcctgatctacatttctaccaaaatgaatgcctgagactcaggttttttgtaaatatttgatcagttctcaaggaaatcttagaccaaaaaggagatgggcgtgagagagtaaagaggagcagtgacccagagtcagataaaggaaggtagagacatggaataggctcttcttatataatctatgtctgatttatgactctaagtattttgtaaggtattccagtataaaaacttaatctcttttactattgtgtatcttaaagaatgttttaaaatatcttttcataaattatagatattttggctaagataccctttgaagccaatatcatctccttttaaaatggaaaatgagcctcaaaaa

SEQ ID NO: 218258 - DNA, 484 bp, Homo sapiens
gctaattttgtattgttagtagagatggggtttctccatgttggtcaggctggtctcgaactcctgacctcaggtgatccgccctcctcggcctcccaaagtgctgggattacaggcatgagccaccacccccggccagcgagccggctgctttgtcctcagcgacagcctgtttcctctttgaatttatctttcaattcttttttctttttattttccccctttccacaggtgttaaagaatttctctttaaattcaatgtgacttgtagtatggtttatttatttatttatttatttatttattttttagacggagtctcactctgtggcccaggctggagtgcactggcgcaatctcacctcactgccaccgccacctcctgggttcaagtgactctcctgcctcagcctcctgagtagctggggttacaggcgcctgccaccacgcccagctaatttttgtatttttattagagatgggg

SEQ ID NO: 218259 - DNA, 941 bp, Homo sapiens
atgcagggggacctcaagaccactgacctccgcattcaggccccttccgccgacctggaggtccaggctggccaggtggacttgaaacttccagaaggccacatgcccgaggtagccggcctcaaagggcacctgcccaaggtggagatgcccagtttcaagatgcccaaagtggacctcaagggcccccaggtggacgtcaagggccccaagctggacctgaaaggcccaaaggcagaggtgatggcccccgacgtggaggtgtctctgcccagcgtggagacggatgtccaggccccaggatccatgctggatggtgcgcggcttgagggggacctgtccctggcccacgaggatgtagctgggaaagacagtaagtttcaaggaccaaaactgagcacgtctggttttgaatggtcgtcaaagaaagtttccatgtcttcctctgaaatcgaaggaaatgttacattccatgagaagacttccgcatttcccattgtggaatctgttgttcatgaaggtgatcttcatgatccatctcgcgatggtaacttggggcttgctgttggagaagttggaatggattcgaagtttaagaaactgcattttaaagtgcccaaagtttcattttcttctaccaaaactcctaaagatagtttagtcccaggtgcaaagtctagcataggtctttccacgattcctttatcatcttcagaatgctcaagttttgaattacaacaggtttcggcttgttcagagccatccatgcagatgcctaaggtgggttttgctgggtttccatcatcccggcttgatctcactggtcctcactttgaatcttctattctctctccctgtgaggatgttacacttacaaaataccaggtgactgttcccagagctgccttggcccctgagcttgctctggaaattccttctgg

SEQ ID NO: 218260 - DNA, 309 bp, Homo sapiens
agcagcaactgccacgatgacacttgggctggccctgtgttacacgtttcacgtgttttatttatttcatttaattctacaaccccctttgaagacaggtattctgttacccacatttgatagctgacttggcacccaaagagccagctcacagcaacccacattgtgtcagactaagaatcaaaaactatgggacctagaagtagactcccatcttgcagatcaaaaactgaagccgacagtgaagtggttgcctgatgtcctatgcaacgcataatttcagtatctcccctaatttccctctttctc

SEQ ID NO: 218261 - DNA, 570 bp, Homo sapiens
aagattatttattagattaatcagatatagaagagattcagatataagaggtcaaatcagtttcccagggacataatacatggctaagagagacagaacattaaaggacagcagggctggcaaatgttttctgtaaagggccagaataataaacattttaggcaatgtaggtcctatggtctctgtggcaactacacaactttgccatttttatcgtgaaagcagccacagacagtatgtaagcgaatgggagtgaccatattccagtatattgtattttaaaaaacaaacagatggtgggctgcatttggcccataggccctggttggtcaactcctgagacagaggcttgtccttttgccaaggaagatttataacacaaaaagccaaaagtaaaaccaggtggtggcatgaaatggaaaagctgaaatcaataagtaaaagtaaagctctccactaagtttcaaaaaccaaaggtaaacagtatgtaattggagagagaagaggtttcacataaaatgtctgctgaactggatcagggcaaattttattctgtaaatttaaaaagaa

SEQ ID NO: 218262 - DNA, 191 bp, Homo sapiens
agtttgagaccagcctgggcaacatagcgagactccatctctacaaaaaataaacaaaattaggctggtgtggtggcgagtgtctgtagtcctgtctactcaggaggctgaggtggaaggatcacccgagcccaagaggtcagggctgcagtaagccatggtcacgccactgcactccagcctgggccaca

SEQ ID NO: 218263 - DNA, 250 bp, Homo sapiens
cactttatccccctcgctgcgtggagggtggaagactgagcccagcagcttgaagctcagaggaccccaccccacctcttaagggcaaaaacgggataccgcccaggaaggtcccccaggccacccctcactgagctgagtcagatggcccagggacagatcctgggtctgctacttaagccctgtgcctcagtttccagaaccaccatacggggactggctgccatctggggaagtcggtgtcatgagc

SEQ ID NO: 218264 - DNA, 529 bp, Homo sapiens
gtcatttttagaatgttcctagtccatccaagaaaggctaaaaaatgttctgtgtgattctggacttaagaagtctttttcactgaattctggccctagatgctcactcaactagtaaccataatgccctgtttttcccaaatgctgaaatggaacatttactgcattggcaatgttttctagtgggattggttacagaaactgtcattcattcttactgtgcaatattacacagccataattaatgatgtagttaaaaacatttgatggcatataatatatacattgaatacattgtaagtaagaaaatatacaggttagaaaactgtaggtatagcatattgtaaaaagaaaatatatatacacgcatagcgaaaaatgtcaggaagaatataccaaaatgttaacgattatctttaagtagtatcatcttttttacttcttgtctttctgtctctcctaaaacttctaaaataaaaaggtattatttttcatgtaaaagtttaataaacttatgtgtccatttaaa

SEQ ID NO: 218265 - DNA, 969 bp, Homo sapiens
ctctatgaggatccgctagtgaacaaacaggaaacgactacatagaggaatgacatctaagccaagatgtaaagaacagataggatttggctagagaaggaagggccgtaagaatgttccaggtagaaggaagcctcagaggtttaaaagaatatattacatgtaggggtcctggaagctcagtgtaacaggaggagtttgagggaaggagaggcatcagatgactctggatggggaaacagggactaggtaatgaagagctataatgaaatataattccacttttctttttaaaacagatttattgaggtataattcacatcatacagtttacccctttaaagtgtacatttcattgtttctttagcatattcacagttatacaatcatcaccacagttgattttaaaacattttgtcacctcaaaaagaaaacctgtaccttttagctagcacccctccaactaccctagtcctaagtaactactaatctactttctgtttcatacagtttacctatttggatatttcatataaaggaaatgataacgtggtcttttgtgactggcttctgtcacttagcataatgtcaaggttcatacatattgcaacatgtatcagtacttcatttttattaccaaatgatatttcattgtatagatataccacattttatttttccattcatcagtaagtagacatttgggtcctttctactttttgtgactattacaaataacgcctctgtgaaccatgtacaggtttttgcatggacatacattttcatttcccttgcatatatacttagcaatgaaattgctgagtcatacagtcattgtatctttaactttttgaggaactatcagactgttttccaaagtggttgtaccattttccatttctgttaccagtataggagggttccagtttctccacatcctcaccagtacttgttatttgtgtttttgat

SEQ ID NO: 218266 - DNA, 1816 bp, Homo sapiens
gagaagtatactcattcaagtaaaggatcagtttcagggttcaggctgaagtgtcttaatgactagaattcaggttccaaggagaagcccacaaggctaagggtattggatataacggaaagtggaagctatacctgacttccagagaatgtggaccggatataagatcttaatcttctcttatcttactacagaaatctggatggagaagcagtatttatctcaaagagaagtggacctagaggcttatttcactaggaatcacaccgttttgcaaggtactcgattcaaaagagccattttccaagggcaatactgtagaaattttggctgttgtgaagacagagatgatggctgtgtcactgagttctatgcggcgaatgcgttgtgctactgtgataaattctgtgacagagaaaattctgattgctgtcctgactacaagtccttttgccgtgaagagaaagaatggcctcctcacacacagccttggtatccagaaggttgcttcaaagatggtcaacattatgaagagggatcagtaattaaagaaaactgcaactcctgcacatgctcaggacagcaatggaaatgttcccagcatgtatgccttgttcgtccagaattaattgaacaggtcaataaaggagactatggatggacagcacagaattacagccaattttggggaatgactttagaagatggttttaaatttcgccttggcactttgccacctagtcccatgctcctgagcatgaatgaaatgacagcttctttacctgcaacaactgatcttccagagttttttgttgcttcttataaatggcctggatggactcatggcccattggatcaaaaaaattgtgctgcatcctgggcattttccactgcaagtgtggctgctgaccgaatagcaattcagtctaagggtcgatacacggccaatctatcccctcagaatttgatctcttgctgtgccaagaaccgtcatggatgcaatagtggaagcatcgatagggcttggtggtacctgagaaaacgtggactggtatcccacgcatgctacccacttttcaaagaccaaaatgctaccaacaatggatgtgccatggcaagcaggtctgatgggcgaggaaaacggcatgccacgaagccatgtcccaacaacgtagaaaaatctaacaggatctatcaatgttctcctccatacagagtctcttccaacgaaactgagataatgaaagaaatcatgcaaaatggaccagttcaagccataatgcaagtccgtgaagatttcttccattataagacagggatatacagacatgttaccagcacaaataaagaatcagaaaaatatcgaaagcttcagacacatgcagtcaaactcactggatggggcacactgagaggagcacaagggcagaaagaaaaattttggattgctgccaattcctggggaaagtcatggggagagaatggctatttcaggattcttcgaggagtaaatgagtccgacattgaaaagttgattatcgcagcttggggccaactgacgagttctgatgaaccataacatatcattaaatttccataaggtcatgcctttaagtaaccccctaaattgaagtttagcaatatgacattcttggtgacagtggaatctttgtctcttcaccgtgttaacataatctatctattttcttattttcccctctggtctatgcttctgcttccttcatattactgagcattaacaacaccaataaaggacagcagagtccctaaatgtctttaaagttcccaggttgcc

SEQ ID NO: 218267 - DNA, 2471 bp, Homo sapiens
gagaagtatactcattcaagtaaaggatcagtttcagggttcaggctgaagtgtcttaatgactagaattcaggttccaaggagaagcccacaaggctaagggtattggatataacggaaagtggaagctatacctgacttccagagaatgtggaccggatataagatcttaatcttctcttatcttactacagaaatctggatggagaagcagtatttatctcaaagagaagtggacctagaggcttatttcactaggaatcacaccgttttgcaaggtactcgattcaaaagagccattttccaagggcaatactgtagaaattttggctgttgtgaagacagagatgatggctgtgtcactgagttctatgcggcgaatgcgttgtgctactgtgataaattctgtgacagagaaaattctgattgctgtcctgactacaagtccttttgccgtgaagagaaagaatggcctcctcacacacagccttggtatccagaaggttgcttcaaagatggtcaacattatgaagagggatcagtaattaaagaaaactgcaactcctggtaataaatttaagtggcacagaactgagttctactgtgtgtgtatgttttcttcaaataaaagaaatatttgtgaaccaaagtatacatttatgtacatataggcagaatcatacatcataagacatcatgtacctgtaactttgtataagcatatttaattttaagggattttgaaaatttaatcatgaatatcttttaatgtttgaggttgatgttcttggacaatgggtcttcatcatacaacaggtcttcattaaatgtacctcttaattataatattctgataccctaaggcaaattgtgttttttgagcacagtaactatataaaaacaggctgctttaaaaggactagcctgcagaaagtttccaaatacaagtacattgaatctactgtccaatttggcttgttttcaaacttcaacagatgtgtgatcatatcatttgttaattgcctggagtagaggattacagcatattgagtggtagctaacgtatgttttacaatttatttttgccaagaatcaaataaccatatggctaacattaatcaagaaattatgttttatgccttaacaatgtacaactctttttactaattgaaatatacttcataaagaccaagccacttttgtaattgtcatatctttgcagcacatgctcaggacagcaatggaaatgttcccagcatgtatgccttgttcgtccagaattaattgaacaggtcaataaaggagactatggatggacagcacagaattacagccaattttggggaatgactttagaagatggttttaaatttcgccttggcactttgccacctagtcccatgctcctgagcatgaatgaaatgacagcttctttacctgcaacaactgatcttccagagttttttgttgcttcttataaatggcctggatggactcatggcccattggatcaaaaaaattgtgctgcatcctgggcattttccactgcaagtgtggctgctgaccgaatagcaattcagtctaagggtcgatacacggccaatctatcccctcagaatttgatctcttgctgtgccaagaaccgtcatggatgcaatagtggaagcatcgatagggcttggtggtacctgagaaaacgtggactggtatcccacgcatgctacccacttttcaaagaccaaaatgctaccaacaatggatgtgccatggcaagcaggtctgatgggcgaggaaaacggcatgccacgaagccatgtcccaacaacgtagaaaaatctaacaggatctatcaatgttctcctccatacagagtctcttccaacgaaactgagataatgaaagaaatcatgcaaaatggaccagttcaagccataatgcaagtccgtgaagatttcttccattataagacagggatatacagacatgttaccagcacaaataaagaatcagaaaaatatcgaaagcttcagacacatgcagtcaaactcactggatggggcacactgagaggagcacaagggcagaaagaaaaattttggattgctgccaattcctggggaaagtcatggggagagaatggctatttcaggattcttcgaggagtaaatgagtccgacattgaaaagttgattatcgcagcttggggccaactgacgagttctgatgaaccataacatatcattaaatttccataaggtcatgcctttaagtaaccccctaaattgaagtttagcaatatgacattcttggtgacagtggaatctttgtctcttcaccgtgttaacataatctatctattttcttattttcccctctggtctatgcttctgcttccttcatattactgagcattaacaacaccaataaaggacagcagagtccctaaatgtctttaaagttcccaggttgcc

SEQ ID NO: 218268 - DNA, 2477 bp, Homo sapiens
cagtttccttcacaacaccctccccccatagttcattcacaccgagtactgacttttcttgactataagctgccttcaagatactgaaggttcccagtgtttgtgctaagcagggactcaggtggagagaactaaggtcaccctcagggaatttcttgctgaattaggttccactaagccttgaaatcaaaacgcttctgaaatctggatggagaagcagtatttatctcaaagagaagtggacctagaggcttatttcactaggaatcacaccgttttgcaaggtactcgattcaaaagagccattttccaagggcaatactgtagaaattttggctgttgtgaagacagagatgatggctgtgtcactgagttctatgcggcgaatgcgttgtgctactgtgataaattctgtgacagagaaaattctgattgctgtcctgactacaagtccttttgccgtgaagagaaagaatggcctcctcacacacagccttggtatccagaaggttgcttcaaagatggtcaacattatgaagagggatcagtaattaaagaaaactgcaactcctggtaataaatttaagtggcacagaactgagttctactgtgtgtgtatgttttcttcaaataaaagaaatatttgtgaaccaaagtatacatttatgtacatataggcagaatcatacatcataagacatcatgtacctgtaactttgtataagcatatttaattttaagggattttgaaaatttaatcatgaatatcttttaatgtttgaggttgatgttcttggacaatgggtcttcatcatacaacaggtcttcattaaatgtacctcttaattataatattctgataccctaaggcaaattgtgttttttgagcacagtaactatataaaaacaggctgctttaaaaggactagcctgcagaaagtttccaaatacaagtacattgaatctactgtccaatttggcttgttttcaaacttcaacagatgtgtgatcatatcatttgttaattgcctggagtagaggattacagcatattgagtggtagctaacgtatgttttacaatttatttttgccaagaatcaaataaccatatggctaacattaatcaagaaattatgttttatgccttaacaatgtacaactctttttactaattgaaatatacttcataaagaccaagccacttttgtaattgtcatatctttgcagcacatgctcaggacagcaatggaaatgttcccagcatgtatgccttgttcgtccagaattaattgaacaggtcaataaaggagactatggatggacagcacagaattacagccaattttggggaatgactttagaagatggttttaaatttcgccttggcactttgccacctagtcccatgctcctgagcatgaatgaaatgacagcttctttacctgcaacaactgatcttccagagttttttgttgcttcttataaatggcctggatggactcatggcccattggatcaaaaaaattgtgctgcatcctgggcattttccactgcaagtgtggctgctgaccgaatagcaattcagtctaagggtcgatacacggccaatctatcccctcagaatttgatctcttgctgtgccaagaaccgtcatggatgcaatagtggaagcatcgatagggcttggtggtacctgagaaaacgtggactggtatcccacgcatgctacccacttttcaaagaccaaaatgctaccaacaatggatgtgccatggcaagcaggtctgatgggcgaggaaaacggcatgccacgaagccatgtcccaacaacgtagaaaaatctaacaggatctatcaatgttctcctccatacagagtctcttccaacgaaactgagataatgaaagaaatcatgcaaaatggaccagttcaagccataatgcaagtccgtgaagatttcttccattataagacagggatatacagacatgttaccagcacaaataaagaatcagaaaaatatcgaaagcttcagacacatgcagtcaaactcactggatggggcacactgagaggagcacaagggcagaaagaaaaattttggattgctgccaattcctggggaaagtcatggggagagaatggctatttcaggattcttcgaggagtaaatgagtccgacattgaaaagttgattatcgcagcttggggccaactgacgagttctgatgaaccataacatatcattaaatttccataaggtcatgcctttaagtaaccccctaaattgaagtttagcaatatgacattcttggtgacagtggaatctttgtctcttcaccgtgttaacataatctatctattttcttattttcccctctggtctatgcttctgcttccttcatattactgagcattaacaacaccaataaaggacagcagagtccctaaatgtctttaaagttcccaggttgcc

SEQ ID NO: 218269 - DNA, 2690 bp, Homo sapiens
gagaagtatactcattcaagtaaaggatcagtttcagggttcaggctgaagtgtcttaatgactagaattcaggttccaaggagaagcccacaaggctaagggtattggatataacggaaagtggaagctatacctgacttccagagaatgtggaccggatataagatcttaatcttctcttatcttactacagaaatctggatggagaagcagtatttatctcaaagagaagtggacctagaggcttatttcactaggaatcacaccgttttgcaaggtactcgattcaaaagagccattttccaagggcaatactgtagaaattttggctgttgtgaagacagagatgatggctgtgtcactgagttctatgcggcgaatgcgttgtgctactgtgataaattctgtgacagagaaaattctgattgctgtcctgactacaagtccttttgccgtgaagagaaagaatggcctcctcacacacagccttggtatccagaaggttgcttcaaagatggtcaacattatgaagagggatcagtaattaaagaaaactgcaactcctggtaataaatttaagtggcacagaactgagttctactgtgtgtgtatgttttcttcaaataaaagaaatatttgtgaaccaaagtatacatttatgtacatataggcagaatcatacatcataagacatcatgtacctgtaactttgtataagcatatttaattttaagggattttgaaaatttaatcatgaatatcttttaatgtttgaggttgatgttcttggacaatgggtcttcatcatacaacaggtcttcattaaatgtacctcttaattataatattctgataccctaaggcaaattgtgttttttgagcacagtaactatataaaaacaggctgctttaaaaggactagcctgcagaaagtttccaaatacaagtacattgaatctactgtccaatttggcttgttttcaaacttcaacagatgtgtgatcatatcatttgttaattgcctggagtagaggattacagcatattgagtggtagctaacgtatgttttacaatttatttttgccaagaatcaaataaccatatggctaacattaatcaagaaattatgttttatgccttaacaatgtacaactctttttactaattgaaatatacttcataaagaccaagccacttttgtaattgtcatatctttgcagcacatgctcaggacagcaatggaaatgttcccagcatgtatgccttgttcgtccagaattaattgaacaggtcaataaaggagactatggatggacagcacagaattacagccaattttggggaatgactttagaagatggttttaaatttcgccttggcactttgccacctagtcccatgctcctgagcatgaatgaaatgacagcttctttacctgcaacaactgatcttccagagttttttgttgcttcttataaatggcctggatggactcatggcccattggatcaaaaaaattgtgctgcatcctgggcattttccactgcaagtgtggctgctgaccgaatagcaattcagtctaagggtcgatacacggccaatctatcccctcagaatttgatctcttgctgtgccaagaaccgtcatggatgcaatagtggaagcatcgatagggcttggtggtacctgagaaaacgtggactggtatcccacgcatgctacccacttttcaaagaccaaaatgctaccaacaatggatgtgccatggcaagcaggtctgatgggcgaggaaaacggcatgccacgaagccatgtcccaacaacgtagaaaaatctaacaggatctatcaatgttctcctccatacagagtctcttccaacgaaactgagataatgaaagaaatcatgcaaaatggaccagttcaagccataatgcaagtccgtgaagatttcttccattataagacagggatatacagacatgttaccagcacaaataaagaatcagaaaaatatcgaaagcttcagacacatgcagtcaaactcactggatggggcacactgagaggagcacaagggcagaaagaaaaattttggacggagtctcactcactctgtcgtccaggctggagtgcagtgtcgtgatcttggctaactgcatcctctacctcccaggttcaagcagttctccctacctcagtctcccgagtagctgggaatacagacacccgccaccacacctggctaatattcgtatttttggtagagacgggtttcgccatgtcgcccaggctggtctcaaactcctgacttcagattgctgccaattcctggggaaagtcatggggagagaatggctatttcaggattcttcgaggagtaaatgagtccgacattgaaaagttgattatcgcagcttggggccaactgacgagttctgatgaaccataacatatcattaaatttccataaggtcatgcctttaagtaaccccctaaattgaagtttagcaatatgacattcttggtgacagtggaatctttgtctcttcaccgtgttaacataatctatctattttcttattttcccctctggtctatgcttctgcttccttcatattactgagcattaacaacaccaataaaggacagcagagtccctaaatgtctttaaagttcccaggttgcc

SEQ ID NO: 218270 - DNA, 981 bp, Homo sapiens
cagtttccttcacaacaccctccccccatagttcattcacaccgagtactgacttttcttgactataagctgccttcaagatactgaaggttcccagtgtttgtgctaagcagggactcaggtggagagaactaaggtcaccctcagggaatttcttgctgaattaggttccactaagccttgaaatcaaaacgcttctggtaggtaaatggagtacagatgggaaatcaaaccagtgtgtgactgggcatgatttagagcaactgttattgatatgacagatcctagcaggcaacctcatgagagcctggatgttcgtttcaatgcaggcagaaatctggatggagaagcagtatttatctcaaagagaagtggacctagaggcttatttcactaggaatcacaccgttttgcaaggtactcgattcaaaagagccattttccaagggcaatactgtagaaattttggctgttgtgaagacagagatgatggctgtgtcactgagttctatgcggcgaatgcgttgtgctactgtgataaattctgtgacagagaaaattctgattgctgtcctgactacaagtccttttgccgtgaagagaaagaatggcctcctcacacacagccttggtatccagaaggttgcttcaaagatggtcaacattatgaagagggatcagtaattaaagaaaactgcaactcctgcacatgctcaggacagcaatggaaatgttcccagcatgtatgccttgttcgtccagaattaattgaacaggtcaataaaggagactatggatggacagcacagaattacagccaattttggggaatgactttagaagatggttttaaatttcgccttggcactttgccacctagtcccatgctcctgagcatgaatgaaatgacagaatgattgaatgggctggcaagatggccgatcaagaacagctctggttggcagctcccagcgagaccaa

SEQ ID NO: 218271 - DNA, 915 bp, Homo sapiens
cagtttccttcacaacaccctccccccatagttcattcacaccgagtactgacttttcttgactataagctgccttcaagatactgaaggttcccagtgtttgtgctaagcagggactcaggtggagagaactaaggtcaccctcagggaatttcttgctgaattaggttccactaagccttgaaatcaaaacgcttctggtaggtaaatggagtacagatgggaaatcaaaccagtgtgtgactgggcatgatttagagcaactgttattgatatgacagatcctagcaggcaacctcatgagagcctggatgttcgtttcaatgcaggcagaaatctggatggagaagcagtatttatctcaaagagaagtggacctagaggcttatttcactaggaatcacaccgttttgcaaggtactcgattcaaaagagccattttccaagggcaatactgtagaaattttggctgttgtgaagacagagatgatggctgtgtcactgagttctatgcggcgaatgcgttgtgctactgtgataaattctgtgacagagaaaattctgattgctgtcctgactacaagtccttttgccgtgaagagaaagaatggcctcctcacacacagccttggtatccagaaggttgcttcaaagatggtcaacattatgaagagggatcagtaattaaagaaaactgcaactcctgatggacagcacagaattacagccaattttggggaatgactttagaagatggttttaaatttcgccttggcactttgccacctagtcccatgctcctgagcatgaatgaaatgacagtaagtgttccttctgattcacgtatgtgcatgtatttgtaaaagtgtgtttgtgtgtgcattaaaagcaattataaatcactaaaaaaaaaag

SEQ ID NO: 218272 - DNA, 866 bp, Homo sapiens
gagaagtatactcattcaagtaaaggatcagtttcagggttcaggctgaagtgtcttaatgactagaattcaggttccaaggagaagcccacaaggctaagggtattggatataacggaaagtggaagctatacctgacttccagagaatgtggaccggatataagatcttaatcttctcttatcttactacagaaatctggatggagaagcagtatttatctcaaagagaagtggacctagaggcttatttcactaggaatcacaccgttttgcaaggtactcgattcaaaagagccattttccaagggcaatactgtagaaattttggctgttgtgaagacagagatgatggctgtgtcactgagttctatgcggcgaatgcgttgtgctactgtgataaattctgtgacagagaaaattctgattgctgtcctgactacaagtccttttgccgtgaagagaaagaatggcctcctcacacacagccttggtatccagaaggttgcttcaaagatggtcaacattatgaagagggatcagtaattaaagaaaactgcaactcctgcacatgctcaggacagcaatggaaatgttcccagcatgtatgccttgttcgtccagaattaattgaacaggtcaataaaggagactatggatggacagcacagaattacagccaattttggggaatgactttagaagatggttttaaatttcgccttggcactttgccacctagtcccatgctcctgagcatgaatgaaatgacagtaagtgttccttctgattcacgtatgtgcatgtatttgtaaaagtgtgtttgtgtgtgcattaaaagcaattataaatcactaaaaaaaaaag

SEQ ID NO: 218273 - DNA, 1387 bp, Homo sapiens
gagaagtatactcattcaagtaaaggatcagtttcagggttcaggctgaagtgtcttaatgactagaattcaggttccaaggagaagcccacaaggctaagggtattggatataacggaaagtggaagctatacctgacttccagagaatgtggaccggatataagatcttaatcttctcttatcttactacagaaatctggatggagaagcagtatttatctcaaagagaagtggacctagaggcttatttcactaggaatcacaccgttttgcaaggtactcgattcaaaagagccattttccaagggcaatactgtagaaattttggctgttgtgaagacagagatgatggctgtgtcactgagttctatgcggcgaatgcgttgtgctactgtgataaattctgtgacagagaaaattctgattgctgtcctgactacaagtccttttgccgtgaagagaaagaatggcctcctcacacacagccttggtatccagaagatggacagcacagaattacagccaattttggggaatgactttagaagatggttttaaatttcgccttggcactttgccacctagtcccatgctcctgagcatgaatgaaatgacaactggtatcccacgcatgctacccacttttcaaagaccaaaatgctaccaacaatggatgtgccatggcaagcaggtctgatgggcgaggaaaacggcatgccacgaagccatgtcccaacaacgtagaaaaatctaacaggatctatcaatgttctcctccatacagagtctcttccaacgaaactgagataatgaaagaaatcatgcaaaatggaccagttcaagccataatgcaagtccgtgaagatttcttccattataagacagggatatacagacatgttaccagcacaaataaagaatcagaaaaatatcgaaagcttcagacacatgcagtcaaactcactggatggggcacactgagaggagcacaagggcagaaagaaaaattttggattgctgccaattcctggggaaagtcatggggagagaatggctatttcaggattcttcgaggagtaaatgagtccgacattgaaaagttgattatcgcagcttggggccaactgacgagttctgatgaaccataacatatcattaaatttccataaggtcatgcctttaagtaaccccctaaattgaagtttagcaatatgacattcttggtgacagtggaatctttgtctcttcaccgtgttaacataatctatctattttcttattttcccctctggtctatgcttctgcttccttcatattactgagcattaacaacaccaataaaggacagcagagtccctaaatgtctttaaagttcccaggttgcc

SEQ ID NO: 218274 - DNA, 1335 bp, Homo sapiens
gagaagtatactcattcaagtaaaggatcagtttcagggttcaggctgaagtgtcttaatgactagaattcaggttccaaggagaagcccacaaggctaagggtattggatataacggaaagtggaagctatacctgacttccagagaatgtggaccggatataagatcttaatcttctcttatcttactacagaaatctggatggagaagcagtatttatctcaaagagaagtggacctagaggcttatttcactaggaatcacaccgttttgcaaggtactcgattcaaaagagccattttccaagggcaatactgtagaaattttggctgttgtgaagacagagatgatggctgtgtcactgagttctatgcggcgaatgcgttgtgctactgtgataaattctgtgacagagaaaattctgattgctgtcctgactacaagtccttttgccgtgaagagaaagaatggcctcctcacacacagccttggtatccagaaggttgcttcaaagatggtcaacattatgaagagggatcagtaattaaagaaaactgcaactcctggtaataaatttaagtggcacagaactgagttctactgtgtgtgtatgttttcttcaaataaaagaaatatttgtgaaccaaagtatacatttatgtacatataggcagaatcatacatcataagacatcatgtacctgtaactttgtataagcatatttaattttaagggattttgaaaatttaatcatgaatatcttttaatgtttgaggttgatgttcttggacaatgggtcttcatcatacaacaggtcttcattaaatgtacctcttaattataatattctgataccctaaggcaaattgtgttttttgagcacagtaactatataaaaacaggctgctttaaaaggactagcctgcagaaagtttccaaatacaagtacattgaatctactgtccaatttggcttgttttcaaacttcaacagatgtgtgatcatatcatttgttaattgcctggagtagaggattacagcatattgagtggtagctaacgtatgttttacaatttatttttgccaagaatcaaataaccatatggctaacattaatcaagaaattatgttttatgccttaacaatgtacaactctttttactaattgaaatatacttcataaagaccaagccacttttgtaattgtcatatctttgcagcacatgctcaggacagcaatggaaatgttcccagcatgtatgccttgttcgtccagaattaattgaacaggtcaataaaggagactatgggtgagagaaatcttgctttgtat

SEQ ID NO: 218275 - DNA, 2425 bp, Homo sapiens
gagaagtatactcattcaagtaaaggatcagtttcagggttcaggctgaagtgtcttaatgactagaattcaggttccaaggagaagcccacaaggctaagggtattggatataacggaaagtggaagctatacctgacttccagagaatgtggaccggatataagatcttaatcttctcttatcttactacagaaatctggatggagaagcagtatttatctcaaagagaagtggacctagaggcttatttcactaggaatcacaccgttttgcaaggtactcgattcaaaagagccattttccaagggcaatactgtagaaattttggctgttgtgaagacagagatgatggctgtgtcactgagttctatgcggcgaatgcgttgtgctactgtgataaattctgtgacagagaaaattctgattgctgtcctgactacaagtccttttgccgtgaagagaaagaatggcctcctcacacacagccttggtatccagaaggttgcttcaaagatggtcaacattatgaagagggatcagtaattaaagaaaactgcaactcctggtaataaatttaagtggcacagaactgagttctactgtgtgtgtatgttttcttcaaataaaagaaatatttgtgaaccaaagtatacatttatgtacatataggcagaatcatacatcataagacatcatgtacctgtaactttgtataagcatatttaattttaagggattttgaaaatttaatcatgaatatcttttaatgtttgaggttgatgttcttggacaatgggtcttcatcatacaacaggtcttcattaaatgtacctcttaattataatattctgataccctaaggcaaattgtgttttttgagcacagtaactatataaaaacaggctgctttaaaaggactagcctgcagaaagtttccaaatacaagtacattgaatctactgtccaatttggcttgttttcaaacttcaacagatgtgtgatcatatcatttgttaattgcctggagtagaggattacagcatattgagtggtagctaacgtatgttttacaatttatttttgccaagaatcaaataaccatatggctaacattaatcaagaaattatgttttatgccttaacaatgtacaactctttttactaattgaaatatacttcataaagaccaagccacttttgtaattgtcatatctttgcagcacatgctcaggacagcaatggaaatgttcccagcatgtatgccttgttcgtccagaattaattgaacaggtcaataaaggagactatggatggacagcacagaattacagccaattttggggaatgactttagaagatggttttaaatttcgccttggcactttgccacctagtcccatgctcctgagcatgaatgaaatgacagcttctttacctgcaacaactgatcttccagagttttttgttgcttcttataaatggcctggatggactcatggcccattggatcaaaaaaattgtgctgcatcctgggcattttccactgcaagtgtggctgctgaccgaatagcaattcagtctaagggtcgatacacggccaatctatcccctcagaatttgatctcttgctgtgccaagaaccgtcatggatgcaatagtggaagcatcgatagggcttggtggtacctgagaaaacgtggactggtatcccacgcatgctacccacttttcaaagaccaaaatgctaccaacaatggatgtgccatggcaagcaggtctgatgggcgaggaaaacggcatgccacgaagccatgtcccaacaacgtagaaaaatctaacaggatctatcaatgttctcctccatacagagtctcttccaacgaaactgagataatgaaagaaatcatgcaaaatggaccagttcaagccataatgcaagtccgtgaagatttcttccattataagacagggatatacagacatgttaccagcacaaataaagaatcagaaaaatatcgaaagcttcagacacatgcagtcaaactcactggattgctgccaattcctggggaaagtcatggggagagaatggctatttcaggattcttcgaggagtaaatgagtccgacattgaaaagttgattatcgcagcttggggccaactgacgagttctgatgaaccataacatatcattaaatttccataaggtcatgcctttaagtaaccccctaaattgaagtttagcaatatgacattcttggtgacagtggaatctttgtctcttcaccgtgttaacataatctatctattttcttattttcccctctggtctatgcttctgcttccttcatattactgagcattaacaacaccaataaaggacagcagagtccctaaatgtctttaaagttcccaggttgcc

SEQ ID NO: 218276 - DNA, 780 bp, Homo sapiens
cagtttccttcacaacaccctccccccatagttcattcacaccgagtactgacttttcttgactataagctgccttcaagatactgaaggttcccagtgtttgtgctaagcagggactcaggtggagagaactaaggtcaccctcagggaatttcttgctgaattaggttccactaagccttgaaatcaaaacgcttctggtaggtaaatggagtacagatgggaaatcaaaccagtgtgtgactgggcatgatttagagcaactgttattgatatgacagatcctagcaggcaacctcatgagagcctggatgttcgtttcaatgcaggcagaaatctggatggagaagcagtatttatctcaaagagaagtggacctagaggcttatttcactaggaatcacaccgttttgcaaggttgcttcaaagatggtcaacattatgaagagggatcagtaattaaagaaaactgcaactcctgcacatgctcaggacagcaatggaaatgttcccagcatgtatgccttgttcgtccagaattaattgaacaggtcaataaaggagactatggatggacagcacagaattacagccaattttggggaatgactttagaagatggttttaaatttcgccttggcactttgccacctagtcccatgctcctgagcatgaatgaaatgacagtaagtgttccttctgattcacgtatgtgcatgtatttgtaaaagtgtgtttgtgtgtgcattaaaagcaattataaatcactaaaaaaaaaag

SEQ ID NO: 218277 - DNA, 1058 bp, Homo sapiens
actaagagaaattgtctcgttagcaccagagaaatggaacaagaaatagagatggccgggcacggtggctcacgcctgtaatcccagcattttgggagaccgaggtgggtggatcacctgaggtcaggagttctagaccagcctggccaacatggtaaaaccccatctctactaaaaatacaaaaattagccgggcatggtggcaggtgcctgtaatcccagctactcggggggccgaggcaggagaatcacttgaacctgggaggcggaggttgcagtgaggcgagattgcgccatcgcactccagcctgggagacaagagcaagacttcgtctcaaaaaaaaaaaaaaaaaaaaaaagagagataaatcaggggtgttcaatcttttggcttccctgggccacattggaagaagaattgtcttggaccacacataaaatacactaacaatagcttatgagcttacaaaaaaaatcacaaaaaaagtctcttaatgttttaagtaagtttacaaatttgtcttgggccacattgaaagccatcctgggcctcatgcagcccatgggccacaggttggacaagcttgagataagtggtagtagagccagcaggatggcagaatgccacatttcatgacatgactctgtctttactcaccaaattcttagaagttttctctagtaaaattgatttgggagttgatttttatttacttattttttggtagatactggtgagacaattaggtttggggttcaaactgaggtaggacagtagtgaggcaacttctgtggattccaatgtctggaagcagaaatatgaggaaacatgccctggaactcaataggaaaagctctgaactttcacaagactgaaattatggttcaggttaaattaaacaggtctctagttgtgactgggtaatccaggactctgatcaagagaaaacaaaagaaatcagaaaatactattcagaagtctaacaactttcatgccttggcattcccaatcttttatttcagctagctattgctgtcgattttttgttctgttctca

SEQ ID NO: 218278 - DNA, 621 bp, Homo sapiens
ctacactctacctacaggaggctttacgacttatccctgcactgatcactaggtgatgtaacacttgtcttggctctgtctacacgggaattttcacatatctctacactgatcacctaagtgatttaacccttgtctaggttcagcctactggggatttctgacatacctatgcactgatcaccgaggtgatgtaaatcttttccaggctttttgtacaggggacattgtgatatatctctgcactgatcacccaaatgatgcaaatcttctctaggctccacagggagggggcattgtgacatatttctgaactgatcatccaggagatgtaactattctccaggctttgactaaagagcgtcggaatgtgctgggagagcctcagtcggaatttcatggatggacaagggcacagagaggccagcgagttcccttgcatgtcagccacggtgcgcaatgagcgcaggtctagccaggaggctggaaaagagagctagaggtctgcgttccacaaccaggcactccatggtggtagctggcaggctgcagggtcacgggcgtgctggcgacggtggcggggaggcgcagaaggggcgagccgccagaggggtgtcaggc

SEQ ID NO: 218279 - DNA, 439 bp, Homo sapiens
taattcagtggctcagcaatattatcagggacccaggttctttccactttctccctccaccatccttatgtgtgttggttttgctcccaagttgactctgttttcccctgagtcataagctggctcacactattccaggcatcactcagggaaaaaaaatctccagcaaaagaagagtttttttcttcctgtgtgtctctttgtaacagaaaggaagccttttctagaagtctctccacagaattgcacttacatgtcattggacagaattttatcacataagcaaacttctgggtgtaactgataaatatctttattattttgattatagtgatagtttcacagctgtgttcatgtgtcaaattgtatgctttaaatgtgcacaagatattgtatgtgtcaatcatacttcaataaagctgtttcaataatttttgca

SEQ ID NO: 218280 - DNA, 346 bp, Homo sapiens
aatacaagattgaaccttagtgtaaactatggactttgggtaataatgatgtatcgatgtaggcttatcaattgtaacaaatgcaccactcttgtagcaaaggttgataatgaaggaggctaatcatgtataggtgggtaggagatatgtggaaaatctttgtacctttctcttaatttttctgtaaacctaaaacagattttaaaaacagtctttcatggggctgggtgcggtggctcacgcctgtaatcccagcactttgagaggccgaggcaggcggatcacaaggtcaggagatcgagaccatcctggctaacacagtgaaaccccgtctctactgaaagtt

SEQ ID NO: 218281 - DNA, 532 bp, Homo sapiens
attcgttatctatgaatttcatttaagggtaacaaaaaaatgaattacaaaatgcttcttctaaaaagaaatattaggtattccaggactgagagctgctgagttttcctagcctgttcaggctgctagagcaaaataccataaactggtggcttgtcaacaacaaacatttatttctcccagctttggggactgacaagtccaagataaaggcaccaccaaatgtctggtaagggcttggttcctggttcacggatggcaccttctcactctgtcctcacagggtagaacaggctagctagctctccaaaacctcttttataaggccactaatccactcatcagggctctgcccctgtgacctaaccacctcccagaggctccaccacctgataccattgcactgctgattaggtttcaacatactcattttggggagacaaatattcagaccacagcctggtttaattaaatgactgatgatgatgatgatgatgatgatgatgacgatgataaagccaaacaatgggat

SEQ ID NO: 218282 - DNA, 293 bp, Homo sapiens
attttctaggtcataggttatacatatcttccaaagcggttgtaccaatttacactcccatcagtagggtatgggagttttcccagttgctctgtgtcttcacttacacttggtattgttattaatattatctttaatgttttttgttagccattctgttgagtataagtggttttatttacattttcctgatgactaatgaagttgagtgcctttttatgtgcttattcaatatttgggtatctttttttggtggaattcctggttatttgcccaattaaaaaaaaaagctc

SEQ ID NO: 218283 - DNA, 530 bp, Homo sapiens
tagatggcgcaaggtgctggcaaagcgtaaagcagcagaccctgcgaggactatgaattggtacctcctctttggatggcaatgtggaagccatctaacacaatttaaaatgcaggcaccctttgagccaaccactgctcctctacaaattgattctgtgatattcctgctcatttgtaggagtgtttgttgtagcgttgtctttagcagtgagactagaaactgcttaaacgtacctccatagagggctggttaagtaaattaagggcacatacagaggaaaattatgcagccataaagaatgatgtgggctggcatgaaatatctccaagataaacttcaaagtccaaaaaggaacatgcacaacagagcagttagtgtgtgctgttgcatgtgtattagaaaacacatggttgggtgcagtggctcacgcctgtaatcccagcactctagaaggctgagacaggaggatggcttgagcccaggagttcgagaccagcctgggcaacacagagagacctcatatctac

SEQ ID NO: 218284 - DNA, 209 bp, Homo sapiens
agaaagagcctcactccccacactgcaacttgaaagacccaggacatccctcccacccccaggacagacagggttctcaccagctgggaacgcacagagcccgtgacaacaggaggatctgttgggctgggaacttcacatcccacccaccctgcctccaacttctttttttttctggccagattaaaagtcaagcttaaagtgctgtt

SEQ ID NO: 218285 - DNA, 399 bp, Homo sapiens
ggagatggatctatgaattttctcccctgagaaaccagacgggaccacctagagtcggtctccttcccccaaacgccctggacctaccatgggcacaagctggggctcagggaatacctctgtgctccaccactcagcagctgcttttcaagagaaggaaaacactactacacgccatccacagccaccgcacaatactgtatccctttgtcagggataataaaacagacgggaagtcactctggaacttactatggccttgggtcaaaggcaggctgaccggggctggcagaagaaagctaaaacttacttctctgggattctaggaatttcaacaaatgagaccaacagcagatagtttcagattaaagaaaggcaatgtgttcccaaactttgacc

SEQ ID NO: 218286 - DNA, 338 bp, Homo sapiens
aaaggttaattgactcactcaaggtcatgcgacgatctcctgaatcctagagctgggtgcttttcactgcccctaatgttgcctaatggttcgcttagctatccattcacaggaggtcagaaactgaacacggacctcagattccagtatcattttgactaaattatatataaaaattgatgtactgaataggatttgctttcaatctcactgttccagaaatagtcattcattcaacaaatatttattaagcactatgtgccaggaactgcacattttgcagtgatcaagatatggctgcacagaagactgacaataaaattagccttaaagagatc

SEQ ID NO: 218287 - DNA, 1047 bp, Homo sapiens
  misc_feature (267)..(268): n is a, c, g, or t
  misc_feature (277)..(277): n is a, c, g, or t
  misc_feature (287)..(287): n is a, c, g, or t
  misc_feature (345)..(345): n is a, c, g, or t
  misc_feature (387)..(387): n is a, c, g, or t
ttttatctagaatctagatatcaaacttttataatgatagttataacttagtcttggcaaatcaaattcagaattaaccaaaattcctttttgacctgaaatcaaaaacaaattagtttactaatttgtaaaaacatctttgtttttacttctctgaaacaaatgaagatagctggatttttttttcttttaagagatcaaagcaagattaagcatctcatacctatcttaagctgctcagaaccccatatcttttctttcattttnnttcctctgntaacatttgncaagaagattttataagtttaatatgtatacatgactacagtcatttattctcattantatcactagctataagtagtggactggttctgtgggagtttnttatatgatatcagagtttaaatgattcgtaattggtatctgagaatctcattccataggtcttttactcgtgtacagtgttgtcagattggggatatttgcttgatttttacccagattccttactaatatattttaaacaagtagggtaattattattattattttttttggtggggggtggttgagggggcggtaacttttgtcaagtatttgtttccttattgacaactcattgggttgttgtggaaattcaatttttaattatttttttttagcggagtctcactctgtcactcaggctggtgtgcagtggtgcaatctcatctcactgtaacctccacatcccagcttcaaaggattcttgtgcctccttctcccgggttcaagcacttagcctcctgagtagctgggattacaggtataagtcaccaggcccagctaatttttgtagttttagtagagacagtgttttgccacgttggccaggctggtcttcaactcccgggcttaagagatctgtccgaatcagcctcccaaagtgctgggattacagacgtgagctaccccagctggcccgaaattgaaattaagtagcacctagtacagatcttgggtatgtagtagctactataatgatttatgaaacattttatgaag

SEQ ID NO: 218288 - DNA, 3058 bp, Homo sapiens
  misc_feature (267)..(268): n is a, c, g, or t
  misc_feature (277)..(277): n is a, c, g, or t
  misc_feature (287)..(287): n is a, c, g, or t
  misc_feature (345)..(345): n is a, c, g, or t
  misc_feature (387)..(387): n is a, c, g, or t
  misc_feature (2171)..(2171): n is a, c, g, or t
  misc_feature (2316)..(2316): n is a, c, g, or t
ttttatctagaatctagatatcaaacttttataatgatagttataacttagtcttggcaaatcaaattcagaattaaccaaaattcctttttgacctgaaatcaaaaacaaattagtttactaatttgtaaaaacatctttgtttttacttctctgaaacaaatgaagatagctggatttttttttcttttaagagatcaaagcaagattaagcatctcatacctatcttaagctgctcagaaccccatatcttttctttcattttnnttcctctgntaacatttgncaagaagattttataagtttaatatgtatacatgactacagtcatttattctcattantatcactagctataagtagtggactggttctgtgggagtttnttatatgatatcagagtttaaatgattcgtaattggtatctgagaatctcattccataggtcttttactcgtgtacagtgttgtcagattggggatatttgcttgatttttacccagattccttactaatatattttaaacaagtagggtaattattattattattttttttggtggggggtggttgagggggcggtaacttttgtcaagtatttgtttccttattgacaactcattgggttgttgtggaaattcaatttttaattatttttttttagcggagtctcactctgtcactcaggctggtgtgcagtggtgcaatctcatctcactgtaacctccacatcccagcttcaaaggattcttgtgcctccttctcccgggttcaagcacttagcctcctgagtagctgggattacaggtataagtcaccaggcccagctaatttttgtagttttagtagagacagtgttttgccactttgggaggctgaggcaggtggattgcctgaggtcaggagttcgagaccagcctggccaacatggtaaaaccctgtctctcctaaaaatacaaaaattagccgggcatgatggcaggcgcctgtaatccccgctacttgggaggctgagccaggagaatcgcttgagcctgggaggcagaggttgcagtgagccgagattatgccactccagccttggctacagagcgagactccctctcaaaacaacaacaacaacaaaaacccaaatctcatccatttacccatatgtagcaggcaagaactgaatggcaagataccagggaagtggcatgatgacatggctgtttatttcaatacagttttgagacacaggaagtgttgaacctggctttgggtttgccacagaatactgagtctctatagataatatgggtaaaatttctttaggtgtatgtaacatgacctacttgctcagctaagagtgctgattaagtccatgttttcctagttattcaaaataatatatttctaagtcttatcctgtgtgaaaatggtttaaagttcttttttcttcaagttctcttcatagatatttccaaggagtttcctggattgtattcagtttacagggttctttcttagttattactataggagaaaagtgtgtttctgctactgcaggacatgggtgggaaggagtgagtacggacaggtgacacatcagagcccaggggatgtgagggggaaggaatgggtctgtgcagctgtacagcgtgatgataaggggtcggattcatgttgggtgagaagggaatccatggtgcagtgaagttccttagtgtggagtttcagagcccaagtgggatgaggttgacatctacaccagggaggtggtagctgcagagatagaagattggttacatatggaaggagagggattgataaatacagtgagggtgatgagagcaggtttctcatagtaataagagagttccaaatatggaaaggaagaaaactacaataaaccttgtggtattagataggaatattgtggttgtttcaattttaaaatattttaaattatcgaagtaatttataaataattttgaaacaatatagcttaaaatgaaggtatataagtttataaatggagccaaatattatgtatatactcctgaagtgttgccagactttgctgagctttgaaaagaaccatatggtccatggatttcctcggattatatgtaaatttgcatgtgtgtgaattttttttcgggagaaagaatgcatagttttcattaanttctcagaggggtttgtgatgcaaaaaatgttgaacttttttttatatatatgtaactgaggggactctgagtttatttttagaaatcctcctgcagcttacgttaatagagcatgtgtggcctaattaaatgtaggttttaaancagtcttcatatatatgaggaattaacattttattgaataccttttaatgcctagaagaaaaagtactattatacattgattcattttcacagcaatgatttattctcccaacaatgatacaaagtaattattatcctgttgtgctgatgaggaaactgagattgggattaaaaaggttgcccaatgttaaaaaactagcaagaggccaagtaaggtagtaggtgttctttctgctcctccacactcttatctccagtggagtgcctgctgtgttcagggcattgcacagggtgctggtgatgtaatactgaacacaacagactcttaccccaaccttgtaaagaatataggggaattaggtatagggaattttaaactattgagaatgcatttatttcagatattccttatattgctccatttgctcttttaagaatgctagcaatgtttattgtatttccttaagccacccaatacctttaggggaaaacacctattattcaaatgcacaagtgaggcagagtataaatgtgacttggctcattatcaccaagtttacttgcaggatcaaatttagaaccatggtttgtaatactttatattacacagtagtcatcagtctgcatagttaaaaaaaactaaacctgtaatcctagcactttgggaggccgaggcgggcggatcacgaggtcaagagatcaagaccatcctggccaacatggtgaaaccccgtctgtactt

SEQ ID NO: 218289 - DNA, 427 bp, Homo sapiens
cgtgtattagtgtctgtgtttgaaaaaaatcattcacacatggttttatatgtagggactgcctctgaagggatgtacacgaaactgaaaacagtagctgccagagaagtgatcagcaatccggctgggagatagagtaggaaggagacaggctttgtgccttatactattttgtaccctgtgaattttgcatcacgttggagatgcaaaaagcaactaccttgaaaagggcagtcgagatcaagtggagtaagatatttattcagcgcaatgttaattataaaaagtaaagtaagtagaaagaccagggtaggaactaccgaaaaacaaaccaaggaacagaaaagaaaaccaaaaaaacccccagaatttcatgtctggttttaggttgccacaatttaataatgaagaagggacagattataga

SEQ ID NO: 218290 - DNA, 462 bp, Homo sapiens
agagcaatgtggagaagcttttcaaggtgggagttctggtttggtttttaacttgagtaattcacagtgcacacccttatagactacatagacccaggtgtgctccgtggcagcacacacctcatgcagtagattcaacagacatgttgagcacctgcagcttgccacacgttgtctttgacatgttcaaacacattatcttacttaatcctcagaatattttacaacagaaattgcaagctgtgttttacagatgaggaaactgagtcagagagagctaaagcatgttggccaaaggcacaaggcaataaactagattccaagtctattacaggacagttgtcaggtcattgaaaaattgtgcttgatcagtattctgtttctgttcagtactatgataaattagcaatctttagaggtcatttagattgtgtttattccctacagagcaggttggtgaaa

SEQ ID NO: 218291 - DNA, 487 bp, Homo sapiens
tacccaggctcccccacctccctccactcctttttttccccctctttctttctcaccaggtggaggggaaataaatattgaggctggccttcattttagtacttaggactctggggatccctagtagaggttttagtttacctcttttcactgttgatttaatttgaagatactgtgcagttagccacagcgtgatgaggaagttgctttggtggtgcgcgggtgagggtgtttggtctgattagacctgcccaccttatttggagatcacagaattcaactgtggatttgccccttatctgggtcattctttcttctgatagcccacccaactgtcatttgcattctacctatatgtcataaatgtcccaccatgatggtggaaaaaactctctttatagtaaaacaataggcaaaactgacttattctaagctccttaaacacctttttctttataacttcaaaagtaagacttggctcttttta

SEQ ID NO: 218292 - DNA, 430 bp, Homo sapiens
tcttgactctcacctcctcctgagtccatgattcttgccctccattagtactgtttatgcctgcagcatggctgcctgctaccttctctgctttgctgggacttcctctttcaccttttacttagtcatgtgtactgaattgatgagaataagtgtccagttgctttagtttagttagctgtggttgatgttagatgggcagtggggtgctttaaagaaagagtgggtttgtagaaggtaaatctcttgcttgaaactccgtggcccttttgtttgaggccttatgttcacttagtagattattgctgcttcattatagttgttttctgtgtacattttggcctttgatcttacaaagatcaaattacttacaaagagactgagcagatatcttaatagtcagacaacaatacttcactcttggatttta

SEQ ID NO: 218293 - DNA, 465 bp, Homo sapiens
gttgcccaaaagcgtgagctgtgttaaagagtgatggcagaagcagccacaggcagggtgtgtcagaggagacctgttatggactcagccagtgtggcctgtgccagtgaacttcaatggccattctcagttttaacctgcattaagacttgagttgactttttatcacaagccttgaaattttggactatgtatatattataaatgtagacactagccacctaccttcagtgtagaataacattcttgaattgtttttccacccacagttgatccttgaacagcgtgggggttagagcagtcaacactccacacagttgaaaacccgcatataacttctgactccccaaaaacttaactgctaatagcctagtgttgactagaagcctgacccaataacataaacagccaattaacacatattttatatatgtattatatatggtattcttacaataaaatgag

SEQ ID NO: 218294 - DNA, 570 bp, Homo sapiens
gaccgtgtgatgctgattgggacaacctcccggccacagctggccgagatgcggggtctgtgccgggtctacgagcggatcctcttcatgccccggcctgactacgcatcccgctatgtgctctggaagcgtatgatagaggcccggggcatccagccgacccagcacctggacatcagtgccctagccaaggtctccgatggctacacgccgggtcacattctccaagccatccaatcggtgctgagtgagcggcggttcctgcaactgtccaagcggcccctggtggcctctgagttcctgggacaactggtgaagctggatccagtgtacagggaggaggaggagtccctgaaggactggtacttcaagaccccactgggcaagaagagcatgaaacacaggatggaccagttggaggccgaggaggccaagctggacaaggagaagaagaaaaggaagtgatggctaaggcttgcgggcacctgagattagtggcgtgggacagggcagtggcccaagggtaaagggatggggcagaggcataaatgcccagatgacttgggaaca

SEQ ID NO: 218295 - DNA, 573 bp, Homo sapiens
tgggattttgaagaacaaaaagtttttttcttacccatcctagtgagttttgaaagtgggcctgaccagaatgtctctttcccattttgccccgtttgaattaaatataatgtctactctttaaaggctgaaggggtgggtgaggggattgtttctcattttgtctcccaagtcatttttctgctgtgaaatatgaccaggcttgtaggaagactcatcttggagaaaatgtgaagtaatcaaattgcttgagattagtctcctattgtatattagagccaaaacacataataactttggcaacagggagttgtctagactcaattttcagaggtcccattgtagtgagttaatattgctaatcatgtcaatcacttgacatggaagtcagtggcaaatctttaaagtatgcatttgatactggcaaatatatactactgatgtttcacaaaagaatcttagaatctgtagaaaacattaattacttccatgaattatttctaaagtataactttaaagttttgatttttctatttaaataaaaagctattgatgtgttttagcatgtcctca

SEQ ID NO: 218296 - DNA, 496 bp, Homo sapiens
gaagcagatgccggggctacacttcctgtacagcctgcagaacggcaagccaattaaacttcttttctttataaattagccagcctcagttatttctttatagcaatgcaagaatggactgatgcagatcccaaaccaccttgtgtgtgtcaacattggcaagatgggttgagtggaagaaatatgtcagggattcatgagctcagaggtaaatgggggctgaagggaggtgcacaaagattgaaggtggaggcaagatcagcagctagggaagggaatacagagaacagaggcctgaccaggcagaagtttgtggtcctccatgtggccaggaggccaaatctcaactcaatgggccaggtattagtcacagaaaccagccaggtagccactacctacgttttccaggaaggtactttgaagctttctgttgggatagggacaatcccaagaacccaggctgtggcaagcttatgttttgcacatgggaagtagt

SEQ ID NO: 218297 - DNA, 403 bp, Homo sapiens
gcatccctctccctcttaggagtagtatcagagaagggctagtggggagcttaaactttcatcctcgcccaaaagtagaggagctcctcccccttcagccagtgtggtgtcagtgatcaacagatatcaacaaatgttggtgttatcatgcaaagattttaagacagttatcataaaaacactttaacacacaattacaatcacacttgaaactaatgacaaagtagaatgtaagtcttagcaaagaaactgaaaatacaaagaactgaatggaagttttaggactgaaaaatataataactgagatggacaactcactagataggcccagtagcagaatggagacaacagagtgaagttgaatacagaactgtagaaatcacccattctgaacaacacagta

SEQ ID NO: 218298 - DNA, 473 bp, Homo sapiens
cctgcttctagccaggactgtcccaagtatcctaacactctagttcttaaagtgctgtaaggaaggagtttctgcccccttagcttgctactccttcatgcatctcgtagaaagtcattatccactggcttcctgagtccattacctcttgttggatgagatggaggagatggagcggcaggccagccattgagtggaccttcatgttgtgcagtgcctgaagatggctgacaaagctgccatcagcttcctctgcagctaagaggaagggaagtcctcctggccttttaaaacctgtcctgtggtccctattgctgttttctaattgggctttccattctcattccctctgctccccaccccacttctgatttttctccatgattttccagctctagaagacaaaggaatgaatcactgcaatttactgggtttccaccttccttgcccagaatgtaggacagccacttttc

SEQ ID NO: 218299 - DNA, 520 bp, Homo sapiens
acagagacagggtttctctatattgccgaggttgatctcaaactcctggcttcaactgattctcttgtctttccaaaatgctgagattacaggatgaaccagcatgccagccaaaatgcctttaaacaattgtccctgactgggcacggtggctcacacctgtaatcccaacaccttgggaggccaaggcaggaggatccctcgagcccaggagttaaagaccagccggggcaacaaaagccatgatcatgccactgaacttcagcctgggcaacagagtgagaccctgtctgaaaaaacaaaaaacctgataaagggcacgttggctcatgcctataatgcgagaactttgggagaccaagaaaggaagattgcttgagcacagcctgggcaacatggtgagaccacatcttcacactcacacaaaaattagccagacatggtggcatgcacctgtagtcccagctactcttgaagctgagtggggagaatcacttgagccagggaggtcgaggctgca

SEQ ID NO: 218300 - DNA, 1100 bp, Homo sapiens
caggcaacgccagcgatgtggttctgcgggtgcaggctgcgggcaccgatgaggtccgggtattccacgcccaccgcctgctgctgggactgcacagtgagctgttcctggagctgctaagtaaccagagcgaggcggtgctgcaggagccacaggactgcgccgctgtcttcgacaagttcatcaggtacctgtactgcggggagctgaccgtgctgctgacccaggccatccccctgcacagactggccaccaagtacggcgtgtcctccctgcagcgcggcgtggccgactacatgcgcgcgcacctggcgggaggcgcgggcccggcggtgggctggtaccactacgcggtgggcaccggggacgaggccctgcgcgagagctgcctgcagttcctggcctggaacctgtcggccgtggcggccagcaccgagtggggcgccgtgagccccgagctgctctggcagctcctgcaacgctcggacctggtgctgcaggatgaactggagctgttccacgcgctggaggcctggctgggtcgcgcgcggccgccccctgccgtggccgagcgggcgctgcgcgccatacgctaccccatgatcccaccggcacagctgttccagctgcaggcgcgctcggcagccctggcgcgccacggccccgcggtggccgacctcctgctgcaggcctaccagttccacgccgcgtcgccgctgcactacgccaagttcttcgacgtcaacggcagcgccttcctgccccgcaactacctcgcgcccgcctggggcgccccgtgggtcatcaacaacccggcccgcgacgaccgcagcaccagcttccagacgcagctgggcccgagtggccacgacgcgggccgccgggtcacctggaacgtgctcttctcgccgcgctggctgcccgtcagcctgcggcccgtttacgcggacgccgcgggcactgctctgcccgccgcgcgcccggaggacggccgaccgcggctggtggtgacgccggccagcagcggcggcgacgcggcgggcgtgagcttccagaagacggtgctggtgggggcgcgccagcagggccgcctgctggtc

SEQ ID NO: 218301 - DNA, 484 bp, Homo sapiens
tgaaaggaaaacactgggaagcctcagggtggggcttccactgtgtttgcacccggacaatgaagctccaactcgatggccggtcccctgtggactctaatgtggactctaaaaaatctatcctgggaggtgggtaccgccctgaccccgccccacctctcggtctctcccgcaggtacctgtactgcggggagctgaccgtgctgctgacccaggccatccccctgcacagactggccaccaagtacggcgtgtcctccctgcagcgcggcgtggccgactacatgcgcgcgcacctggcgggaggcgcgggcccggcggtgggctggtaccactacgcggtgggcaccggggacgaggccctgcgcgagagctgcctgcagttcctggcctggaacctgtcggccgtggcggccagcaccgagtggggcgccgtgagccccgagctgctctggcagctcctgcaacgctcggacctggtgct

SEQ ID NO: 218302 - DNA, 954 bp, Homo sapiens
gcataaagatgcctaggagaggctactccaagcctgggtcctggggcagcttctgggccatgctgaccttggtgggcctggtcacccatgcagcacagactggccaccaagtacggcgtgtcctccctgcagcgcggcgtggccgactacatgcgcgcgcacctggcgggaggcgcgggcccggcggtgggctggtaccactacgcggtgggcaccggggacgaggccctgcgcgagagctgcctgcagttcctggcctggaacctgtcggccgtggcggccagcaccgagtggggcgccgtgagccccgagctgctctggcagctcctgcaacgctcggacctggtgctgcaggatgaactggagctgttccacgcgctggaggcctggctgggtcgcgcgcggccgccccctgccgtggccgagcgggcgctgcgcgccatacgctaccccatgatcccaccggcacagctgttccagctgcaggcgcgctcggcagccctggcgcgccacggccccgcggtggccgacctcctgctgcaggcctaccagttccacgccgcgtcgccgctgcactacgccaagttcttcgacgtcaacggcagcgccttcctgccccgcaactacctcgcgcccgcctggggcgccccgtgggtcatcaacaacccggcccgcgacgaccgcagcaccagcttccagacgcagctgggcccgagtggccacgacgcgggccgccgggtcacctggaacgtgctcttctcgccgcgctggctgcccgtcagcctgcggcccgtttacgcggacgccgcgggcactgctctgcccgccgcgcgcccggaggacggccgaccgcggctggtggtgacgccggccagcagcggcggcgacgcggcgggcgtgagcttccagaagacggtgctggtgggggcgcgccagcagggccgcctgctggtc

SEQ ID NO: 218303 - DNA, 472 bp, Homo sapiens
aaggacttttatttgagtgcataactctggtcaatgttcctttccttttctggttttgggtaaggttagggattaacttaatagcataccttatagaaaagtacagagttttgccaaaaacaactgcaagtgtaacagttacagcctataaatcagtccattcattggaaatccattttttattttgttttgctttataaaaagaaagattggacaaggatccagccctgtgcaatatagctgtgaacaacatagttattttatcaatcgtttgctcttgtggactcagtggtatgtccttgtagaattggaagtgtgtctgtgggttcctggtttcctaggcttccgttgcccccctggcctttggagagtttccagatgacatattcttgactcgtgttaatggcctaaatttgtctactgtgcaatttactagctggattaaaagtaataaaggtttttttttgtcgtt

SEQ ID NO: 218304 - DNA, 384 bp, Homo sapiens
gatgaattggcaaaagtacaaaaaaatctctgcagaggaccatttattccagcactattgtaacagtaagactggaagtaacccaaatatcatcaattaaaggcttgttgaataaactatggtttatctgcatatagaatactatgcagctgttaaagaaatgggaaatacatttacatatcattaatggtctccaaaacgtattgttaagtgaaaaacaaaactatcatggagaaaagggtgtatgtgtctttatttaaaaaaagtgaacatatcaataaaaattatatttcatgaagatatgcagggatatacttttggaaatgaagaataatccaaaatataaaaaataaaataataaaaattacattagctggaggaaga

SEQ ID NO: 218305 - DNA, 382 bp, Homo sapiens
ggctttgcaggccacacaatctgtcacaacaactcaactcagctttgtagtgtgaagcagccataggcaatatgtaaatgaaagtggctgtggccaagagtggtggctcatgtctataatcccagtactttgggaggccaaggcagaaggatcacttgaggccaggagttaaagaccagcacgggaaacatagcaagaccttgtctctacaaaaaatgaaaaacttagccgggcgtggtggtatgcacgcccagctagttctttttcttcaaaaagacgctgaagcaggaggatcattttaacccaggagtttggggctgcagtgagctgttgactgtgccactgtgttctagcctggacaatagagtgagaccctgtccta

SEQ ID NO: 218306 - DNA, 167 bp, Homo sapiens
actgccgatccaacaggttctctgtcctcatcacttttctctggacctgtttcccagattgtaaaatggggaagggaaggagttgaactctcgtccagacctagaatgtctttctccagtgctcaagttaggagcgtcttgctcttaaataaaatactttagggaaa

SEQ ID NO: 218307 - DNA, 424 bp, Homo sapiens
gcctccagagtagctaggattacaggcgcccaccatcacgcctggctaatttttgtatttttagtagagacgaggtttcaccatgttggacgggttggacaggtctatatttctttccgtgcttattttacaactggtatggtctgaatgttctccaaaattcatgtgttgaaatgtaatcgtcaatgtgatagtattaagaggtgaggcctttaggaggcgattaggtcctgagggcagagccgttaaggatgggattaggactcataaaatggtttgagggagtgggttcattttcttccactcttctgccatgtgaggacacagatttcattccttccctagcatacaacaataagccaccatttcttggaagcagagtagccctcactagatgtacaatctgctggtgccttgatctttg

SEQ ID NO: 218308 - DNA, 481 bp, Homo sapiens
agcaccgaatttacacatgaaatgatttaaggaacgaagagcactaggctttttaagccagaaggataatagccattattttaaccttatcaattggataagatcccgggggcggaagaggggagaaatccaaggaattgcagtcataacaaagcgtaatccgtaacatagataactggaattggaaaattagctactcgttcctggttcttctagtagattgtgatattactgaaataatttttatgaccagctgcatttattggagctatatttttttaattactgaataattgcacctcgatatggggcaagggaagaattttaggaaattgatttactttcattgtaataaaaattgtaagctaatgatgtgttgtgaaaaataattaaatcagtaagtatttattggatatttaccatattcaaaggactgtcctagtccctggggacagaaatgcaaaaatgaataaagtatttt

SEQ ID NO: 218309 - DNA, 535 bp, Homo sapiens
ttcaatctgttgcctaggctggtctcaaactcctgagctcaagtgatctttctgcctcagtctctcaatgtgctgggattacagatgggagctacctcaaccagccctggatgacttttaaatgccttaagagaaagacagtctgttccactgcaatttccccctggcctttcagatctctgggaatactctcaataagaacaaactttccctgaggactggacctggtgctggaggacaaagggaatgcccagggacttagtagttttcttctcatttaagacaacttccatctggtacatctgcaagggtgcttcagagtggaaggactgatggcaggttcctgtctaccactgaggcttttcccatgttcttagagggatagaggagggtgatggaacacactgaaatgggaaccccctgtccccacagaaaccatgatattctcctacactaacactagaaagtcccagaacaacataggtggtccccacagatgttctttaactaacttccttttttttttttttttttt

SEQ ID NO: 218310 - DNA, 467 bp, Homo sapiens
aagaaagctgagttctggaattagtaccatcacagtaattgctgcatatgagcaggaggtagaaaccagagtttgagaggctacctgaggtcaggctagtggaaagaaggtctggtgcagacggtgggagaagccgggcagaggaaactcggaaattcacagcaggaagctccacaaagaagagcgtccatgtgagtgatccattgccctgcccctcttgaaggagcagccccaacaccagggctgagcctgcccaaggtgatgggtggtgttaaatcatgcactctgtgcgtggagcccttcctcctggaatcctgactctgaagccctgtgtagcctctttccattcttcaccagctctaggatgtacctcctgcaactctcttctctccccttacgtatgaattccccccttcttctgaatcattccccttagcactccaacactatcatttctcctacctgca

SEQ ID NO: 218311 - DNA, 347 bp, Homo sapiens
tatttttctttctttcctctattagtttattccttaactcaggtgttaggaaaaacacaatctgattgaattgcatgaaaatgtaaatatctcctagcctttaaccttagagagatttgtattttaagaagaaaatcttggttaactcagattttttgggaatgatgtgaaaaactccagaacatagaggagaagattcaacactcaagctacacacaattttgagagttaaacgtgaatgaggcactagtgataaaagaatgaatagagacacttgtcaatgtgagtttttggtgtcccttaggagaaattctgtgcaataaagaggctatttatggcagtttgtt

SEQ ID NO: 218312 - DNA, 503 bp, Homo sapiens
aaagaagttaaagttaattattttaggagtggtgtggaatgatggcaaagtcagtcaggttttgttatgtcctttttgtagaagaaataagatttgctgttcttgtggtgcagaggttggcaaagtctgacctttgggctaaatctggcctgctctctatttttatatttataagcaaagtgttactgaaacagacacacctgttggtttgtaggatgtatattgctgcttttgccttatgatggcagaattgagtagttgcaacagagagtatatgagctgcatagatgaaactatttactctctggcccattacaaaagtttaaccctgatctagtgaagaaaaattacctaaatttttccaagttgaagacgatcaatgtatgaatttttatagaagtgttacattttttacaaagggtacgtcatatggttaaagctactaatttgaatctgtttcatttttcatttgatttctgataaaaggttatctttggagttta

SEQ ID NO: 218313 - DNA, 378 bp, Homo sapiens
tcatcccttccacaacacctgccagggcaggacaggttcctaaaccgcgtgtaagatgtgttcgtccaaactgcctgaccacaggaccctgctctgcctcttttctctgtcgtactcggggcctgctggcctgccacagagtgtgattatctaccacatctgtcatttacccgtctcacccaccaaatggcaagctctgcgaggcagttttagtcactgttgtaccccaagcacgtaggccagtggctacaattgactgatggagattttgcatgaggaaatggacacggtagcaggctgccctgctggggtactctgccgtgaagccgggtccatctggatgaatgaactcactgtgctctgtgttgctctgcagtt

SEQ ID NO: 218314 - DNA, 346 bp, Homo sapiens
tgtattccataaaaaatatgagagagtgcctgtttacctgcatccttgacaacagtgggtattatcattactaaagtaaaactaaaatggaaatcaggcttgaaaaattcctaagcaaacaaaatcaaaggccttaagaatagccttaatcttgctaaaattacaaacttaagtgaatcttactttaggtgataactacaaatataagcaaaacttaacttgggtcatttgcaataaatgcttatgttaggcagaattaaaacttaaccccagccaattataagcagccaactgttaacagactatgacatctgcaaaggaaaaagagaaagctttcttttctatc

SEQ ID NO: 218315 - DNA, 384 bp, Homo sapiens
tacccctctaggttctctggctggggctctgaaagagactgacaaaggcagattaacgagagaaaaacagacacgagtttattaccacgtgcatcacgcacacccatgggaacgtccgcagcctgactccatttgtcccactttccaatattccatgtggatagcctagaaccatctaagagataaggcacccagatcgcaaaccacaggactcggaattctctgcttgtctcctaattagaagccattgaagagtcagtggactgaatacaaattaaccattagatcaactgaaaatgtcaagtttagatgaatctgagttctcatttagatattttctggctgttggcccagccccacaaataaatacacatttgaaagtta

SEQ ID NO: 218316 - DNA, 432 bp, Homo sapiens
ctactctcagcatgtcagccagtcttctctggaagcaagttggctgccgtagtagctcccagcatcacatctttaagcatcaccatgtccaaagactgagaaagaactcgttacttcctgagtcccagaatccctctagcagattatccctgaggattaattgtccagaactgtatcatatgcttagtcctaagcatggcaagacaatagaacaccataattggcttagagcagcagttctcaaagtgtggtccttgtaccaagatcagcattacctggaaacttattagaaatgcacattctcaagccccaccagaatcagaaactcggagggtagagtagagctcaccaagttgtgtttttaacaagccctccaaatggctctgatgtagctcaaatttgagaaccactggtttagactaaccgaaagtt

SEQ ID NO: 218317 - DNA, 419 bp, Homo sapiens
cacaccctgtgtgtctctctgtcctgccagcactgagggctcatccctctgcagagcgcggggtcaccgggaggagacgccatgacgcccgccctcacagccctgctctgccttgggctgagtctgggccccaggacccgcgtgcaggcagggcccttccccaaacccaccctctgggctgagccaggctctgtgatcagctgggggagccccgtgaccatctggtgtcaggggagccaggaggcccaggagtaccgactgcataaagagggaagcccagagcccttggacagaaataacccactggaacccaagaacaaggccagattctccatcccatccatgacagagcaccatgcagggagataccgctgccactattacagctctgcaggctggtcagagcccagcgaccccct

SEQ ID NO: 218318 - DNA, 506 bp, Homo sapiens
aagttccccctcggctgtcccacctggcagtccctctaggatttcggccagtccctaattggctccagcaatgtccagccggagcttctttgggcctccgagtgggagaaaagtgagagcaggtgcttccccagcggcgcgctccgctagggcccggcaggatcccgcccccaagtcggggaaagttggtcggcgccttttctccccgacgaagccgctccagggctgctctcagaggacgcgcggcaggcaaagagaatgaacctgagcgtccacgaaacgtcctgcacggctcccgggagctgggagaaacaggtgcctttctccgacgtccgcgggcgacgcctgccgcaccttgcccgctgccgcgcccctcccgggcacccctcgccctcggcgcccctgcccccacccccagtgccagggcggaggcagtcccggctcgcaggtaattattgccagcggagcccgccggggagcgggggtgggcgcgccggcggtgggcg

SEQ ID NO: 218319 - DNA, 595 bp, Homo sapiens
tgccatgttgcccaggctggtcttgaatgctgcccactttggcctcccaaagtgctaggattataggtgtgggccaccgtgcctggcctatcagagtattttcaggcagagaaaagcataaggtcttacttctagcataaaaggaacattctggctgctatatagagaagggactgtagaggacaagaatgaaagcaggttgactgattagaaagcattgcagcattataggcaagagcttatgatggcctgaactagagtggtaactgtggaagagataaatggatgaattcagaatatttttggagaatttccttcctttttaagactgaataatatgccattatatatgtatactacattttgtttacccattcatccactgatggacacttgggttgcttccatcttttgcctgttgtgactaatgctgctgtgaacatgtatgtacaagtatctatttgagtacttgcttttaattctttgggtatatacccagaagtggaattgctggatcatgtggtaattctatgtttaatttttttaaggaattgccatactgttttccccggtagctgtaccattttacattccc

SEQ ID NO: 218320 - DNA, 420 bp, Homo sapiens
gcactgaaccaagatcccgccactgcagcctggcaaagagtgagaccctgtctaagaaaaaaaagaaaggccactgatcattgggagcttttggaggcaccgtgacaggcagggtgccaccaagcatgtgtggcctcccaggagctaagaccccagagttcttcaggctctgctgagtgcctcccatttgcacagcctctttatgctgttaggaatgaagaaaagtctaaactgaagctgccccaggcaggaggccaggttttctgcttcttgggtttactgaggctctgctttacctacagagtgtttggaaataaagagaagactggaaatctttgctcttgttagaaacactttgtgtttgtcccgctgacacctctgtgttggccttcccatccccaggtcccattaaggcacagt

SEQ ID NO: 218321 - DNA, 407 bp, Homo sapiens
tccagatgtgtctgtgagacaacacgttatggggcaaattgatttcacccttgggaaaccagggagattttcaaagttatgtctgcaaagccagctaatgcaattccccattagtgcattaaagtgcgcccttattaattcaaacataaaggcaacaaaataagcttttaaatttaaaatataatacatatataatgagcatgtgtgaaagccttattcaaatgaaaatacaggagtgtttgaactactgaggtatcttttgtattgaattatgagcatatgtaatagatttaattattaatttccccattgttctatgcacacagacagggttcaaggcacagtcattctctggctttcatagatctaatttgtataattattgcctgaataaaaaattgctccaa

SEQ ID NO: 218322 - DNA, 435 bp, Homo sapiens
gattacaggtgcctgtcaccatgcctggctaatttttgtatttttagtagagtcgaggttttgccatgttggccaagctggtctcaaactcctgacatcgtgatctgcccacctcggccacccaaagtgctgggattacaggtgtgagccaccgcgcccatccagtaactaattttctatccaacaaagatttaatataaccaataggcactattctgggtgctaggtaaaggtgatcaacttgtgtcttcaacttgcttacagttcagggagggagacagggtagtgtattattattataatttactgtggtaagtgctatgatggaagaaggcttgaagggccatgaagcatcaacaagagacgtactaaaagaagtacgccttacataattgctgtgatagctggttttttgtttttgtttttgttttgagt

SEQ ID NO: 218323 - DNA, 501 bp, Homo sapiens
atctatcttctctctctctctcaatcgtctgtttattggttgtttcaagcactgcggctacacaatttaaatacataatcttcacaacaaccctatgagccttgttatctccactccacaaattaagaaatgaggctaaagataataaagtaatttgcctaaggtcaaagagctaaatgcaggataaggttggaagtgtctatgtggttccaaagaacccaacacactgaaccactttgctaggctggcttgtcatgggttatccttccacatgacaaacaaatagagaattcattccagccaacacacgctgattgcacaaacataaaaacagatcttatagaaatatatatttgatgggcttccaggtaaagacttttgtacagcctatcatgatttactctggcctcaaaaacttgctttaaaagcccagaaaaaaaaagtgtgatgttaaaagtctttgggtcagttgggtaagaggacatcaccagagtggcaaat

SEQ ID NO: 218324 - DNA, 193 bp, Homo sapiens
aaacagcatggcaggcttcatcatacctaccttcagtgattgccatatatatgtgtatatccgcacacacacatatatgcccccacctccttggcaggacgagcactgagggtgaagaggaaacaacttcacatccccgcttcctcccagctgcccgcaggagctcagttttggtttgtgcagtgccctggcc

SEQ ID NO: 218325 - DNA, 443 bp, Homo sapiens
tgaacaatcaattgagataactatcttcagatcatccaagttccaatttcttctcagagcatctagtcaattaatcaccttgtaataggctgtaggactcttcttctacctggctattttggggggtcagtggtgctggtcagccctttcccgttgatagcactatctttctcttgttcagaattctgtgatttacatatggatgctcattattattattctctacttaaagaaaatgcatatcctttataaaatgaatagttttagatatcattaatgttcaatatattaataacgtgtcaaatgtttatttaaatcagacacatattcatcctttttatattgcagcttttcttatgtaaccttttacattgtaatgtacactttatattttttatcattaacttaaaatttataaataagaattattgcaattggtcata

SEQ ID NO: 218326 - DNA, 561 bp, Homo sapiens
cagtataatgatttgatatgtatatacattgtaaaataaaatatagtcaagttagtgaacacatctattacctcaggtagataaccagtttttttgtagtaagaacacttaaggtctactgttgtagcaaattgtaagcatacattacagtattactaactataaataatgctattttgctgatctaatgctgaatgtactttagatttttcagagttactcaagttacaactaaaaatttgtactctttgaacaacatttccgtattttccaccctcaggcactaacaatcaccatcaatcaatgttaaagtttttttgttttgttttgttttgttttgtttttgagatggagtctcgctgtcacccaggctggagtgcagtggcgcgatatctactcactgcaaggtctgcttcccgggttcacgccattctcctgcctcagctactagggaggctgaggcaggagaatcacttgaacccaggaggtggaaattacagtgagctgagattgcaccactactccagcctggagacagagtgaggatcttgtcttaaaaaa

SEQ ID NO: 218327 - DNA, 397 bp, Homo sapiens
gctagggaaagaaggcgcttaccaggccacctccacaggtgctgaaagaagccagcgagccagggtgccgcagcacagctccggtgtagaagcagcctgcgtctggtggcgcgggaggttgcggggcggatgctgcccccgtggggccggggccgggatttggccgctgttccactgcgaagcgcggcgccaggaagcggccgtctctccggagcagcaggtacaggtcccgagagaaggccgggatccgcagcaacacttcgtcgccatccggctcggcatgctgggccgggggcggggacgggggcggctgcgggggaggcggcggctgccacgaggccggggcgcccggggacaaggcggcagccccgctggatccccgcggcagctcctgcga

SEQ ID NO: 218328 - DNA, 471 bp, Homo sapiens
gggactccttaagacccacaagtgacttctgtctacactacagatgaactgaattgatcatctaaaatacgtttatagcgttcattgtgccagttgctcatggttctgctaattggcccaggactagttgtgatctgcagactgaagccagagtaagtaagagaattcaaggcactaagacaaccaggaacagttttaccaaggcaagtggaagctgctaggctcagtggttgcatgcctatagatggggtaaatcatcctggtgcaaatatggtattcacaccataaatgtgtagtgcaagtttcctctgtggccaatcacagggctgcaagctgaagccccagtttagcttattctccatacataacttcaaggggactttctggtgaacttttccaagaagctccaagcacagatggttcaaatttgcagtttggctagactttgtgactggatgtacattaaattaa

SEQ ID NO: 218329 - DNA, 748 bp, Homo sapiens
attttctgttgttatagacagaatttttttttgcatttaacacctaaacattatttttacttttctagtgaaaatgcaatctcatgttcgtgaatcgaactgcattgccagggatataatttttgcagagatttccagggcaccgtgcttagaacacaacctggaacctatgatttttatgcctttcaggaagacttctaactaaatattaatcttgcttcagcaaatacacttaacaaataagtatggcagtgaaggtacaaggtataatagagaaaggtaaatcgactgaagcaatgcaaaacacaacactgggagattctagtatagagaatgtactaggctttctggagaaccttaccatcacatgcttagatcttagctcctgatgaggtggtagaaggagacaatggggaaatgatttaatattaggaaaggcaagtgcctcgagacatttatttaagctaatctgtccttgatttttgactttcagattcattacacccagccacattagcctgcaccattaaaaacattgattcaacctctcttattggcatagacaatacatctgccttgttcactactctatcctcagcttggtatttctctagcacagaagaatggtccagtagatatgctgaagaaatacctgaatgcataaataaataagaaaatgagagactgaatgaatcaattaatacctcaagtgttaccctagataagattctagagaggggagattcta

SEQ ID NO: 218330 - DNA, 580 bp, Homo sapiens
attttctgttgttatagacagaatttttttttgcatttaacacctaaacattatttttacttttctagtgaaaatgcaatctcatgttcgtgaatcgaactgcattgccagggatataatttttgcagagatttccagggcaccgtgcttagaacacaacctggaacctatgatttttatgcctttcaggaagacttctaactaaatattaatcttgcttcagcaaatacacttaacaaataagtatggcagtgaaggtacaaggtataatagagaaaggtaaatcgactgaagcaatgcaaaacacaacactgggagattctagtatagagaatgtactaggctttctggagaaccttaccatcacatgcttagatcttagctcctgatgaggtggtagaaggagacaatggggaaatgatttaatattaggaaaggcaagtgcctcgagacatttatttaagctaatctgtccttgatttttgactttcagattcattacacccagccacattagcctgcaccattaaaaacattgattcaacctctcttcccgcgtacctgcccgggcggccgctcg

SEQ ID NO: 218331 - DNA, 199 bp, Homo sapiens
gctcttctcctatgccactctaggctttgccctatctgaggccatggggctcttctgttgaatgaccaccttcctcatcctctttgtcatgtgaggctctgtgggggtcacctgcctgtgcatgctgctgtgactccatgccattcctggttctgcggtgtgctaagctttaccattgaacacgtttctctaaaaaacg

SEQ ID NO: 218332 - DNA, 330 bp, Homo sapiens
aataaaagttacatgtatggcctgtaagtggtaagctccgtgatggtgtgcatccgtagtcttcatcattgccttacagtgtgtcatatgcattgtaggtactttatttattatttgcagagtaaatgaagtatcccaggtcagtaatttaatttttttgctctactacctgagtgatatttgtgagtgtgaatcatggtgttgggttagcatatttgcttaaaggacgtgtaagattaggagaatcgcttgaacctggcaggcagaggttgcggtgagccaagattgcgtcactgcactccggcgtggacaagagagtgagactccgtc

SEQ ID NO: 218333 - DNA, 494 bp, Homo sapiens
tcctctggaaaaccttgactggagtgttctttctacttgcttcagactatctgcttgctcacctctccactatgtaaacgtaacttactgtgagcgcccaggccgtctggctactacagataagcaccccagcccgggagcacagacgctgaacgcagccgcctgaccagaatgcagacaccagggcagataccattctgaagctgtggactcttccctttctggggaaatcagtgagttgatattttctatgttgccacagggagctctttctggcaaaggaaacggaaagaaaacgcaggatctcctcaccaaagcacagaatggggaaaaacaccaaagcctgggcagttgggcagttaggtacaaatctaccaagtgagcagacttaactaaaagggattgtgatgatctactccaacaatttcatttttaaaattaggaaacgaggccgggcatgatgacttacatctgtactcccgacactttgggag

SEQ ID NO: 218334 - DNA, 745 bp, Homo sapiens
tatgtatgtatgaatgatttctttgtttttttttattccagtcaaatgtttatgaaacctccagattgcctcgttaaatccttaaccttggtgaaatggtttgggaaaatgcaggtctgggctataagtttagctttttctttagtcactactttagatttcacagaataactggaagtgtacatggtaattttatagatctttttctttatggaatcctgtatttcttggcattagacgtcaacttcagattttgagaaggaatgtatttgctaagagtaatacagaaatgcttgttatgatatttctgtattaataacaagccatgctcaaaatgtggtttcatccagtttgaccattaagccctcagcactcagggacatgactaaaggcactcacatggaagaacggcagttcataacactgggaataaacaagtggaacagcgggaatcaggcagtgtgtttattgaggtacatcttcaggcagtactgggattagcaattaggtattcatatgaattcagtttgtgagaggattccatcaatggctcttcaaatttaagcagcaaaggccaccactaactcctaaaatatagtgatctttaataccagtttatttgaatggggaaaatttgccacacattttctcgttttcttcttcttgtaattttagagcagcaggagcattttaaaagttatactcaccaagcctgggcaaggtggtgagaccctgtctacatgaa

SEQ ID NO: 218335 - DNA, 365 bp, Homo sapiens
gaaggaggcattcagatttctccttccatccttaattatcccatgatgtctacctgctagcctctcatgacaaggaattgctgatttttcagaataagcaaaaatcatccttgtttaaacttatttatttattttttgagatggagtcttgcactgtcgcacaggctggagtgcagtggtgtgatctcagctcactgcagccgccgcctgccgggttcaagggattctcctgcctcagcctcccagctacttgagaggctgaggtgggaggattgcttgagcctgagaggtcaaggctgcagtgagccataatcacatgagcctggaagacagtgagaccctgtctcagaaaaaaaacgaagaag

SEQ ID NO: 218336 - DNA, 520 bp, Homo sapiens
ttcaaacactggaaaattgcttgacattttattgggaggcattgtcaattattagctaagattgttttgtcttctgaagaattggccctctataaaaaaatagttgtggaaggtgggcttttaacagaaaatgtaaagtctgttcagttcatactaattagtacatggaattatttaacatataggcaataatggctaaaaactgacatgaccatcagctttattttaggatgttttacaaacctatcacaaagcaacaactaattttttgttcatgtatattaattcatttggcctttacctggactaatatcatctgaaaccttcttttctttgaaacattttatgaaatgtatacacttatttttactttattatgtaagcaaagcaattttttattttccgtcccacaaattatgtgttcctttaaagatttgacattttgatgcagcaaatgttaagaaaaggtgtgagataaatgtctacaaaataaatgttttatacagaaccacggggcaat

SEQ ID NO: 218337 - DNA, 601 bp, Homo sapiens
tgcataattctttagtcttttttcccctaacttctgcctttttccattagtctaagtccatgttaccttcctctatagaaattctgtccagcaatagtgtttgcttcaaatgattgcttcttgctacggtgcgagaactcagtcatattcagaaaaccagatcttgctcataaaccataatcgtggaaatggagaagtgggtaacttgtcacataacacccctcccgcatacttactgacactcattaattgccaaagtagaggttttgttaacaactttgccagacactggttttattacttagaatgtctaatgagcaaagtttaaaatgccagtcattgtcaaaagagctattcaccattttctaccttaccttgtcagtaaactggctttattaagtggctcctataaatgctcctcacttgcatacttcaacttaatcaagaaaaatgctccattaataaataggcaagctacttctagagctcactgaagacagattaggagacttgaaattacagtagtatgttgttacccactggtttactgagtgcgtttctgtgtcataaaataaacaaaatgaccaggactttgaagcct

SEQ ID NO: 218338 - DNA, 560 bp, Homo sapiens
caagaggagcttgtcctatgctaataaagattctataacattggccaaagggtccgtttatacattctttgagcctggtggagcacgtttgctgaggtgatgtggtctcctcagtgtcactgtgaagagctcagtcaggaaaagccagcagcatctaccctgccaccctccaaaccttctgactttggggagactccagtcccccaggtctttacccagcctgcagatctcattctagcttaacaagggcatgcgtgtgcatgaagttgaactaagagtggaggaaggccagaggtagggttgggtgtgatactaggtagcagatattacagacttctgaatgcattcagatttccaaagggtttcctgagacctctcaaccaatctttctaggacaatagctagtgtaggggtctcctgactcaataggggacccaggccttcagataccagccactcactggctgctctgtgacgtgctatcttaagaccgtgaatggaagacaagccctatgtaaacacaaatcttaaagccactgttggctactcgagggcctcct

SEQ ID NO: 218339 - DNA, 957 bp, Homo sapiens
caagtgcttgccagccagtattttaagcattttacatgtgtgaattttttaacccttacaacaactcatcccaattttctgatgagaaaactggggtaaagagggatgaaattattatccaaggtaacaaaagtaataaatgacagagtcaagattggaattggaactcagtctgactaatggatttcctttctgaacacacacacaaacacattgctaggatcacagtttgtatctttgcatttccctttgacctttatactgagcatttcccatgttacttatttttcttctagatcataatttctaatgcttgcctaatggtctataccatgattaaacattctacattgtaggacatataggttattttctatctaatattttatgactgtaagttttgctgctatgaacattcttctcccaaaatacttgactgtgtccctgattatttgttggatcaacttttaggtgagttacagaagtaaagatatgaaaacaggctcttgaattagaaggtttgcaggagcacagtggacataaaagcagagattctggagtaagatgccccaattaggaaatgctgctctgctactatctgtataattcagttatgttatttaacctctctctgcctctattcctcatccctaaaataggagcaataatagtacctacctcatagagctgttaagtggataaaatcacttaatatacataaagattttagaatagtttcagaaagaagttccaagatggccgaataggaacagctccagtctacagctcccagcctgagcgacgcagaagacgagggatttctgcatttccaactgaggtaccacgttcatctcactggggcttatcagacagtgggggcaggacagtgggtgcagcccaccgagcgtgagccggaccagggtgaggcattgcctcacccgggaagcgcaaggggtc

SEQ ID NO: 218340 - DNA, 307 bp, Homo sapiens
agcccattgcatgagggcaccttttgctcccatgctctgatgggcacacggcggctttcgagggctgcaggccagagcaggcacctgacaaggctggtaacatacgcagccaaggctggattttcttcatagacttcaaccaacagcacatctcagcagatgaagtgctggagccgatatgggaatccagcttccactaagccggacaatacaaagattcgcaccaacgtagaaccacgccacttttctcaggcgggtttttcatttttaaaagtatgattgcttttcataaaacattatgctattt

SEQ ID NO: 218341 - DNA, 621 bp, Homo sapiens
gatcacttgagcccaggagtttgaggctgcagtgagccatgatcacactactcccctccagcctgggcaacacagtgagaccccatctcttaaaaaaagaaaagaaaaaagaaagaaatataattatgagttgcaaaacagtgctgggaggatgaggggctgcagaataaggcagagaaaaagaaggggctgatacttatcaaactgtatcaaaagggtttggtgcttaatgtttgcttatttgaaacagctgtgccattctctttcctttacaacctaacttctggaaagagtagtctgtacttatttttcccctttttttctacccaagtttttgccaccattccactgggcctcttcctgctgagctgatagagcctccttgtgtccacacacaccggacccatcagacctctgacagagcagttctcacctcctgggggttgcccctgtttatctgaggcccctggcgcaggcagagcacatggccccttccacagctttggggattcaagtgcagtttcatgtgaagggttccaccttcccaggccacaagtttttttatatctcatatccccagcttgaatagggagggaattctggacatggaaatcaccttca

SEQ ID NO: 218342 - DNA, 631 bp, Homo sapiens
tacttgcgcagaggcaaataagtaagaaaaacatatactgtgctatggttataagtgctactaagaaaaataaaacggggaggaaggctagggaagctggggaaaggggccgtcagtgtggccagggagggtgacatgtgagcaaagacttggagtagaggagggaccaagccacacggatacatgaataagcatccaagcaggcaccatggccttgggatgtgcctgtgttttcaagaaacagcaagggggacggggctgctggagagggagcatgtaggagatgaggcagtgggctgatcaggaggggactctgaggccactgagaagacttgacttttgctctgagtggatgggaggcactgaaagtttgcagagaagtgctctgttccaactgtgatctttttttattttaaataattgagatggggtcttgctatgttgcccaggctggtctcggactcctgggcttgagcaatcctcctgccttagcctcccaagtagcacttgccaccatgcctggctgtgatctttaaaagagttgcttggactgctatgccaagagactgggagatgcaggtgggaggggctggtcagggagctactgtggtgaccaatgtgaggtgacagt

SEQ ID NO: 218343 - DNA, 406 bp, Homo sapiens
gtcaagagaattcaactttttccagggctacagcttttctctttatgctccttttctatattttcatccattttctcatgtggaactggagtgtaccttatcttaagataccaagtgtctgacagccacatgttctgaggatgtctggtctcccaaaggtcagaatccaaaatcaaagaactaatcattatattcctacggggatctttaaccattttctaactacagaacatgttccaagaactgactggaaaacattttctgaactgtttcttgaggttcccaaatgatcagtgtattttaatgtaaaatcaatatatatttggggaggtaaaaaaacaatgtttaaaacatgtccgtttgagaaatggacagtagaataggaatccacttaagagggagaccg

SEQ ID NO: 218344 - DNA, 408 bp, Homo sapiens
ctatggatatggccatatatagataactaaatatactgatatactgagatttccacttagtaaacagtaattttgggcatgttatataatattggaggtttagtttcttcatgtgtaaaataaagataatgattgtgcataatttatgtgattgttggaagcattatatgaaatattgcatgtaaaagcttatttatttaatatttattcactgcctgttctgtgaacctagcatgtaaaagcttttagccaaattcctggcacatatttatgtcttcaagcattatttatcatcatcaacattattgctattgttatttctgctagtagcacagtactatgttgtagcacaatgttaggcatattgtacctgtgtgataatatttattgaatttaaaccgttggcca

SEQ ID NO: 218345 - DNA, 444 bp, Homo sapiens
caattgattcatgatcacctttttaatttgttgaagttgtggattactatttatattgtacttaacctttgcagttaaatgctggattactatacaaataccaactcagggccaggcgcagtggctcatgcctgtaatcccagcactttgggaggccaaggcgggcagatcatgaagtcaacagatcaagaccatcctggccaacatggtgaaaccccgtctttactaaaaatgcaaaaattagctgggtgtggtggtgtgtgcctgtagttccagctacccaggaggctgaggcagaagaattgcttgaacctgggaggcggaggttgcagtgagctgagatggcaccactgcactccagcctggctaccaagcgagactccatctcaaaaacaaacagacaaaaaaagcctcagtaataaatttaaacaaggattcccttgg

SEQ ID NO: 218346 - DNA, 462 bp, Homo sapiens
cactggcacagggaagaacgcagtccagaagtccttaaaaaagtacccattgttgaaccaggccctctgaagttagggccccacaagaacaaaattccacaatcccagcagtgctacctaatgtcgcctggctccccgaggtaaggcctcctgtgtagaaaagagctctcacagcacgcctgagacttctcttcctagaaaagcctgctgcaggggaaggagcagacaggagaaaataatagaatataccatttatgctgggaaatgcattgagtcaacttaattgctctacagaaaccctgggcttaaatactaacaccatgaaggacaagagtctgtgtctcccctcccaagaagacaaaacatggctaactcaaaaaccactggaaaagtgagtaatttcttatcaaagccaagccattcagtattatttctgtggctgccagtgttgtttcaaataag

SEQ ID NO: 218347 - DNA, 4873 bp, Homo sapiens
  misc_feature (3049)..(3049): n is a, c, g, or t
  misc_feature (3133)..(3133): n is a, c, g, or t
  misc_feature (3597)..(3597): n is a, c, g, or t
atggcccccgcccggggccgcctgccccctgcgctctgggtcgtcacggccgcggcggcggcggccacctgcgtgtccgcggcgcgcggcgaagtgaatttgctggacacgtcgaccatccacggggactggggctggctcacgtatccggctcatgggtgggactccatcaacgaggtggacgagtccttccagcccatccacacgtaccaggtttgcaacgtcatgagccccaaccagaacaactggctgcgcacgagctgggtcccccgagacggcgcccggcgcgtctatgctgagatcaagtttaccctgcgcgactgcaacagcatgcctggtgtgctgggcacctgcaaggagaccttcaacctctactacctggagtcggaccgcgacctgggggccagcacacaagaaagccagttcctcaaaatcgacaccattgcggccgacgagagcttcacaggtgccgaccttggtgtgcggcgtctcaagctcaacacggaggtgcgcagtgtgggtcccctcagcaagcgcggcttctacctggccttccaggacataggtgcctgcctggccatcctctctctccgcatctactataagaagtgccctgccatggtgcgcaatctggctgccttctcggaggcagtgacgggggccgactcgtcctcactggtggaggtgaggggccagtgcgtgcggcactcagaggagcgggacacacccaagatgtactgcagcgcggagggcgagtggctcgtgcccatcggcaaatgcgtgtgcagtgccggctacgaggagcggcgggatgcctgtgtggcctgtgagctgggcttctacaagtcagcccctggggaccagctgtgtgcccgctgccctccccacagccactccgcagctccagccgcccaagcctgccactgtgacctcagctactaccgtgcagccctggacccgccgtcctcagcctgcacccggccaccctcggcaccagtgaacctgatctccagtgtgaatgggacatcagtgactctggagtgggcccctcccctggacccaggtggccgcagtgacatcacctacaatgccgtgtgccgccgctgcccctgggcactgagccgctgcgaggcatgtgggagcggcacccgctttgtgccccagcagacaagcctggtgcaggccagcctgctggtggccaacctgctggcccacatgaactactccttctggatcgaggccgtcaatggcgtgtccgacctgagccccgagccccgccgggccgctgtggtcaacatcaccacgaaccaggcagccccgtcccaggtggtggtgatccgtcaagagcgggcggggcagaccagcgtctcgctgctgtggcaggagcccgagcagccgaacggcatcatcctggagtatgagatcaagtactacgagaaggacaaggagatgcagagctactccaccctcaaggccgtcaccaccagagccaccgtctccggcctcaagccgggcacccgctacgtgttccaggtccgagcccgcacctcagcaggctgtggccgcttcagccaggccatggaggtggagaccgggaaaccccggccccgctatgacaccaggaccattgtctggatctgcctgacgctcatcacgggcctggtggtgcttctgctcctgctcatctgcaagaagaggcactgtggctacagcaaggccttccaggactcggacgaggagaagatgcactatcagaatggacaggcacccccacctgtcttcctgcctctgcatcaccccccgggaaagctcccagagccccagttctatgcggaaccccacacctacgaggagccaggccgggcgggccgcagtttcactcgggagatcgaggcctctaggatccacatcgagaaaatcatcggctctggagactccggggaagtctgctacgggaggctgcgggtgccagggcagcgggatgtgcccgtggccatcaaggccctcaaagccggctacacggagagacagaggcgggacttcctgagcgaggcgtccatcatggggcaattcgaccatcccaacatcatccgcctcgagggtgtcgtcacccgtggccgcctggcaatgattgtgactgagtacatggagaacggctctctggacaccttcctgaggacccacgacgggcagttcaccatcatgcagctggtgggcatgctgagaggagtgggtgccggcatgcgctacctctcagacctgggctatgtccaccgagacctggccgcccgcaacgtcctggttgacagcaacctggtctgcaaggtgtctgacttcgggctctcacgggtgctggaggacgacccggatgctgcctacaccaccacgggcgggaagatccccatccgctggacggccccagaggccatcgccttccgcaccttctcctcggccagcgacgtgtggagcttcggcgtggtcatgtgggaggtgctggcctatggggagcggccctactggaacatgaccaaccgggatgtcatcagctctgtggaggaggggtaccgcctgcccgcacccatgggctgcccccacgccctgcaccagctcatgctcgactgttggcacaaggaccgggcgcagcggcctcgcttctcccagattgtcagtgtcctcgatgcgctcatccgcagccctgagagtctcagggccaccgccacagtcagcaggtgcccaccccctgccttcgtccggagctgctttgacctccgagggggcagcggtggcggtgggggcctcaccgtgggggactggctggactccatccgcatgggccggtaccgagaccacttcgctgcgggcggatactcctctctgggcatggtgctacgcatgaacgcccaggacgtgcgcgccctgggcatcaccctcatgggccaccagaagaagatcctgggcagcattcagaccatgcgggcccagctgaccagcacccaggggccccgccggcacctctgatgtacagccagcagggcccaggcagccaccnagcccaccccaggtcatgccagcggcagaggacgtgaggggctggcagcaggcagggcggccccaggcctctgccctcctctcnggtgctggaggagctgaaggcttcgccacaggacctggagttatcaggggtcaggcgcctgggaaggggcctttggtggccaccctggtgaggacacctgtcccccagggcaggcaccttctcttttccagagcctggggcctccacgtcacagagtccaacagggacatcactcgcctgcctctgtgtgcgtgcatgtgtgtgtgtggtggggggtgttctcacaaggtcatgggatctcatgtgaacagtgtgtgatcaagtgtgtccaccccttcgggtctcagcatggacgtgtgcatgttatgagcgtgtgcttatccgttaaggctggaggcacatgtgggtgatggtggatgatgtgtcatgaatgaggaggtgtgtgagcagggaactcagtgtgacaccgccaggtccagcacccatgggggcgggggagaggctcacccctacgtccccccacncctggaggctggagccaggggccacttctgaactgcaccagcaccaggcccaccctcgtctctgcctgggtgagcccaccccggctgtatctcaggtctgggtcctccctctagccgaggaggccacctgcagcctccacccggctctcaccgctgcttcaacaggaaaacagggttcccggtcagtccggctggccgccttcatggaggcatcatggcagagcacatgagatgtcctcagctgggcttggctgcctggccagggccgggggctcagcagcctcctctagcctctgatgccttccctccacggcccaggtctcctcactcaaagtcccttcgccaacctttcaatgcccagccctgacacctgccctttgtcccccaggcctaggatcagggaccagaggatcctatcttctcagcacccagcccaccccttcctgtagcatatggggagactaaggcctggagagaggggtgatgccccgtcccaggttgcactgcaaccaagtgtcagagtcggggctccggcctcctgccaaggctcttgtccccatacaccatcccacaagggcgctgggggtggaagtgccctggaagcccctcccctctcacactgacctccccccttacggcccaccagggtatgtaaatatctcttttctaccatgtcagaatattttttcctcactcctgacaatgcaaaaatggtcttcaaagcacataaaaagcacccagggtgagaaagccccatcccgggggccgttggcaggcagggaagcaggaaccccaccgtgtgccccctgccagccccagagggagtggcgagcccagctgcccagccctgccccccctccccatagccagcacagctatcccgcggggacaccagcactgagccccctctccctcctgcaataattcggggagtctcagccccatccaggtgccgcggccagctctctacacctctatatattatattactatatagccgagctgttcttccttcctatggaagtcggaaacatggtcagaacacgatctgggggggggatcctgtcttcctccccaccccaccccactcttacccaatttctgggctctggatcctcacagtcatggaggcaccgtgggcctggcacttgcaaaagtgtggcccctcactctagtgtgtggtccctctcagggtcctggggatctgcctctctgtggtctccatcctgactcttgaacttacccacaataagaataaattctgcctcatctttaa

SEQ ID NO: 218348 - DNA, 419 bp, Homo sapiens
ggacataggtgcctgcctggccatcctctctctccgcatctactataagaagtgccctgccatggtgcgcaatctggctgccttctcggaggcagtgacgggggccgactcgtcctcactggtggaggtgaggggccagtgcgtgcggcactcagaggagcgggacacacccaagatgtactgcagcgcggagggcgagtggctcgtgcccatcggcaaatgcgtgtgcagtgccggctacgaggagcggcgggatgcctgtgtgggtgagcgcgccatggcctgggcatgggtcagccggcagcggtgcttggtcttggcagggctgccagggtgtaaggggggacgtcagagcccacaggcacctgagtgacccacacagcccctgggaagatggataaacctccagtgttcctaca

SEQ ID NO: 218349 - DNA, 411 bp, Homo sapiens
aactctgtgtcactaaagtcaatactcttgaccaaggtgccctgttaccttgggcagattacttaatctttgagcatcgttgtcctcatctgtaaattgagcgaaataatacctaccccacagtgctcttgtgacatgtgattgagtgtgcatgcagagcatgtagcatagtgcctggcacagatgagcacccagaactgggagctgctctccatcagtatggtggtcctcccttgccctcacgactcatctatccatgactcttttgcccctctcatcattccttcagtctgacttcctcccttcatggagacaccagtcggtcagcactctgggcactgttgtgtgcacagccctcctcgggaaccaaggaaggagcggtaggaagaggagggacttactaccattctt

SEQ ID NO: 218350 - DNA, 182 bp, Homo sapiens
ccctcccaggcagtctggtcagtcagagggtgagaaggaggaaccaacaaaagctccatccaaaagaaaggaaaagaatggagtgggaagtgttttagactagcagaaacacctttcttgctatcagagttcaacacaaacaccttaaggggccaggcaagtaatgaaaatgagctggcaac

SEQ ID NO: 218351 - DNA, 583 bp, Homo sapiens
tgaattagaaagctatatacagatatgagctatttcagtcttcatttttctgacatggagctgtagtacaacttgaagaactttgaaatagtcttggagaaaagttcaagattgaaaattagatttttggtactatatagaaatactctgaaatagtttagatagttcctatattaaaatgacacttaaaatacttgtgtatttatgagaagtgagtcaagaaatgttactttttttctgataattagcatctgttctaatacttatgtaaggaaatgaggctaatttcctcatttatattaatctaatttcctagatttatattaaatctctcattatgcttctgcatatgtatttagagaagcataagaatatactatatattagagtttaaaatttagatctgtggtatatataaaccaaactatggtaaactcctttttcttttctttttatcataggcagtggtcagtagcctgtggtgagctgtttcagagtttttcgttttctgtatttttgacagatgatctatcaggaatgaagatatactgctagtacaaaattaattatatcatacatgcta

SEQ ID NO: 218352 - DNA, 204 bp, Homo sapiens
tacctgtgctctctcttgtaaaaaccagttttagcaagaaccctactgagtcagtttagcaagagtatccccacccttgatatctgatcaggttccttatccttcaccattccccaaattaattactctgattactctggccatcttcagcaagaatcattaggttgttttacccagaaaccccttactttgatgttactctta

SEQ ID NO: 218353 - DNA, 483 bp, Homo sapiens
agaatcgctgaacccgggaagcggatgtgcagtgagccgagatagcaccactgcactccagcctgggtgacagagggagcctctgtctcaaaaaaaaacaaaaacaaaaacaaaaacaaaacagaaaacaaaaaaacagaacctatttccccaggtcacggagtggttcttgacttgaacacagcaatcagaacacctcgggggtaaacactgcaccaaccctagcctgagagcacaagaggcagtgcctcctttttcctgcagccgggctgagtggccctgtgcgggggtcacatggggccatctgaagatgagcctgggctgaggagcagcacccaggggggcaagggaaaggaggaccctgctttatcctgccatgcgccttcttcccgggccacagggcactctcatgtgctgtgcctcagcccagcagactcttccacccagcttgctgcctcctcctctttcatatctcatcctgag

SEQ ID NO: 218354 - DNA, 428 bp, Homo sapiens
ggtgttctagaggatcccgtcaggagtttgagaccagcctgaccaacatggtgaaaccctgtctctactaaaacaaaaaaacagaacctatttccccaggtcacggagtggttcttgacttgaacacagcaatcagaacacctcgggggtaaacactgcaccaaccctagcctgagagcacaagaggcagtgcctcctttttcctgcagccgggctgagtggccctgtgcgggggtcacatggggccatctgaagatgagcctgggctgaggagcagcacccaggggggcaagggaaaggaggaccctgctttatcctgccatgcgccttcttcccgggccacagggcactctcatgtgctgtgcctcagcccagcagactcttccacccagcttgctgcctcctcctctttcatatctcatcctgag

SEQ ID NO: 218355 - DNA, 562 bp, Homo sapiens
gtctcctttggtttctgttcttgcgtctttccctacaaactgaaactagaattctgtagcagtgtcggagcggaaatgcttttctaaaacaagctcaggaagtcatttaattagcccaggaagggaataggggaaaatctattctctccaaataatcttggaaaattggagttttcctaacacattaagagtaaatgtcctgcctcactgcagagtgatctgtacatcttcagttgacaagcatgaacatcccccacctcttagtcccatgattccttctctcttccttcctgctattgactactgtgcagactcagctggattttagataatctttataatatcacaatggtttccatggagatggatcatgatgtcacaaaagtagatatatattctttggatactgaaaaatcaaagggcaatagagggaggaagagaagaattttcaaactggtatatagaggagggggaaatctagagaacaggaaagaaaactaagaaagggtgtgagtgaaacagagaaatggctattcaaaggctattcaaaatgacagcaacc

SEQ ID NO: 218356 - DNA, 380 bp, Homo sapiens
cggggaggcagaggttgcagtgagacaaaatctcaccactgcactccggtttgggcaacagagcaagacttcttctcaaaaaagaaaaaaagacaataaaacataggaaacataaatatgtgtcttgaaaaatcatttaaagttatcaactttgctgttattttttacaatgcagcattggcatggaatgcattttctagtatgtctgtaaccatgacttcaagaaactgtggtctgaagttgactctgctgcaggaaactctgaactatgagacaaaataaaggacataatttgttaacggacctcaaaccaaatggattatttattgcctgtttccacctctggaatataagagctccaaaagacagaattttatgtg

SEQ ID NO: 218357 - DNA, 535 bp, Homo sapiens
tccttcaaagaagcgcttttggttacaagtgggtccataacacacaaaataaaattctgtttacggctgggcgcggtggcttacgcctgtaatcccagcattttgagaggccaaggcggggggatcacctgaggtcaggagttctagaccagcctggccaatgtggtgaaaccctgtctctactaaaaacacaaaaattaggtgggtatggtggtgtgcgcctgtaatgtcagctactcgggaggctgaggcaggagaatagcctgaacctgggaggcggaggttgtagtgagccgagattgcgccattgcactcgagcctgggcaacagagcaagattctgtttcaaaaaaaaaaaaaacaaaaaaacccacaaaattacatactttttgataatattgaaaaataagtatggaaaatgattcttcttaggaaaatttatgcccattattcacttcgctgttttgttaatgatcacgaatatattaaactgaaaatacaagctaagcagctgctttgaaactacatcaaaacag

SEQ ID NO: 218358 - DNA, 1019 bp, Homo sapiens
ccccgcttctgccgatggctgcggcggtgtaggagcaagtcgtaggcgcccgcgaagctctggccgcagaggccgcagcccagggtccgtcgcaccaggtgcacgtacttgtgagtcacgaggcccaggaagtgcttgaaactctgcccgcacgtggcacagctgaagcgctcggggccggaactggcacccccgccagcacctgccaccgccgccccgcctgcgtcctcacccccagacacccctgccagtgccgccacggccgcccccacctcccccgccagcccgttgtccagcacgctggccgcatccgtgccgctggagccgtccgggggctgcaggccgccgggtgcgggcgggagcaggcgctcgggggcggcctggtggaccagcttgtgccacatgaggttctcgatgaagccgaaggtcttgccgcaggcgtcgcagccgtatggcttctctgccatgtggacctccttgtgactcatgacgtgaaagagatccgggaagtgctcgccgcagtccgagcaggcgtagctcagcccatcggtgggccctgcagacgtgcccgaggccccgggcccacaggcccccggtgtgccttgggtggaggggaggccggctgccccggccagggcgcagggcagctggagccggtgcacctggcggtggcgggtgaggctctgcgggtagccgaagaccttgccgcagagctcgcacttgtagggccgctcgcgcgtgtgcaccacgtgatgcttgctcaagtggaaggattcgcggaagcgcttcccacacacggggcactggtggggcttctcgcccgtgtggatgcgctcatggcgcttcagggtctcgcggcgcccgaagccgcgcccgcagatgccgcagcagaacgtctttcctgggacgctggcgcccgagcctcccgccccgctggtccccgcgccgccgagcagcagcgggtgggcgcccaggagcgggacgggcacagcgccgtacaccaccgccgccgcggccgc

SEQ ID NO: 218359 - DNA, 653 bp, Homo sapiens
gcctactactactaaattcgcggccgcgtcgacaaaaaattagccatgcgtggtggtgggtgcctgtaatcccagctactcgggaggctgaggcaggagaatagcttgagccagggaggcagaggctgcagtgagccaagattgcgccactgcactccagcctgggcgacagagccagactccgtctcaaaaaaaaaattattatatatttttatgtgtatataaatatgcacgtagatgtatacatgtatagaaaaagcctggaaaaatgcacctgaaacttttacagtgatcttctgggttgggagtgacaaaagggccttaccctttttgtaatggtttccttttgtataacagaatgtaccatgtattacttatgtaaaaaattttaccctcacactgtatttactcttacaattggcgtacagtattttattgtatagatggtcattatttattcagtctgttaataatggtcatttaagtttttctccagttgacaactctaaataacattgagataaatgtagatatatcattgtacatttgccttggtttttcccatgggataaattctagaaaatgccagctgaactatagtgacagcagaccagtggttgcttgaatgtcaaggattgagagagagtttggtt

SEQ ID NO: 218360 - DNA, 314 bp, Homo sapiens
ggaaccctcacggacgaacccactccatgtattacttatgtaaaaaattttaccctcacactgtatttactcttacaattggcgtacagtattttattgtatagatggtcattatttattcagtctgttaataatggtcatttaagtttttctccagttgacaactctaaataacattgagataaatgtagatatatcattgtacatttgccttggtttttcccatgggataaattctagaaaatgccagctgaactatagtgacagcagaccagtggttgcttgaatgtcaaggattgagagagagtttggtt

SEQ ID NO: 218361 - DNA, 582 bp, Homo sapiens
gagatgagccggtacccctcacggattacctcaacaaaatattagcaaattgaatccaacaatgtgtaaaaagaattacataccacaaccaagtaaaatttctgccaaatacgcaaagctggttcaatattcaaaaattcaatcaatgtaatctaccacatcaacaggctaaagaagaaaaattacatggtcctatcaattgatgtagaaaaagcatttgacaaaatccagcatctattcatgactataaaccatcaacaaactaggaagagagaggatcttcctcaacttaataaggaataccttgaaaaacctgcagctaacatttagggtgagaaactacataattttctcctaaaactagaacaagctatgtcccctgtcttgtgccagttttcaaagggaatgcttccagtttttgcccattcagtatgatattggctgtgggtttgtcatagatagctattattttgaaatacgtcccatcaatacctaatttattgagagtttttagcatgaagggttgttgaattttgtcaaaggctttttgcatctattgagataatcatgtggtttttgtct

SEQ ID NO: 218362 - DNA, 566 bp, Homo sapiens
gagatgagccggtacccctcacggattacctcaacaaaatattagcaaattgaatccaacaatgtgtaaaaagaattacataccacaaccaagtaaaatttctgccaaatacgcaaagctggttcaatattcaaaaattcaatcaatgtaatctaccacatcaacaggctaaagaagaaaaattacatggtcctatcaattgatgtagaaaaagcatttgacaaaatccagcatctattcatgactataaaccatcaacaaactaggaagagagaggatcttcctcaacttaataaggaataccttgaaaaacctgcagctaacatttagggtgagaaactacataattttctcctaaaactagaacaagctatgtcccctctcacaactcctattcaacatcatactttttttttttattatactttaagttttagggtacatgatatagcccacatgatatagcccacgatgatatagaccgggtgatatagtccacatgatatagtccacatgatatggaccacatgatatagcccacaaaatatagcccacatgatatagac

SEQ ID NO: 218363 - DNA, 479 bp, Homo sapiens
ttcctagatggagtctcgctctgtcgcccaggctggaatgcagtggcacgatcttggctcactgcaacctccgcctcccagattcaagtgattctcctgcctcagcctcccgagtagctgggattacaggtgcatgccaccaagcccgggtaacttcattcttttgcatgttgaaatccagttgtctcagcaaaatttgttaaagagacttctttttccccattgaatggacttggcatctctgtccaaaatcaattggccataggtgtatttctgtactttcaattctgttccattgtacctatatgtctgtacttatgccagtaacacaatgttttgattactatagctttgtggtaagttttgaaatagggaatcatgagtcctccaactttgtccttctttttcgagatgtttttactacttggggtctctggaaactccatatgaatttcaggatggatttttctatgtctgca

SEQ ID NO: 218364 - DNA, 526 bp, Homo sapiens
  misc_feature (18)..(19): n is a, c, g, or t
  misc_feature (70)..(70): n is a, c, g, or t
gcccccccccctcaaagnnaggctgggggaatttaatagggcatgaagcccacccggcggcccgggctgngaaaatttttcccaaaaccatatataaaagtaaacttaatagtacagtataatggaccccatgaacaaaagtaatttttctaacctcaaaagcaggggcagtttatttaatcaggtaaaaactgagccttaaaagtcagactttgctaaaagaaaacagtatttttttcactgtcctgaatataacattaaggaaataggatttggttaggtctagataacatttaataatttcaactgtgttaaagacaaaagtaatttttgatgtgaccatggacttgtcatgaaaaatataaaggtgaaagggattccatcccccttcctctaaacagaatggaacataagcacaggtttaggctaattcataacctggatttttaaagcttttacatagttgggtttcatgttgttcagatgtcttactaaaccaggtatctaaatgagtgtttttctgtta

SEQ ID NO: 218365 - DNA, 335 bp, Homo sapiens
gcttgtctacattcttagtttgtaactgtaggatttttaatttttgtggctgtcatgagagactttcaccagcctcattattttgcaggtatgagatgtggtccttcagggtcagttgatagtgtgacatgagtggcctggtaatgaggccagcactctggttgatcctagtacagaccagaagagcaggagaagagccaacacgtatccacatttctgattggtgccaaatgagcagtgccaatgaggcactgtgcagctgtgctcaccaggggcctttacaactaaaggggagacataaataactagtcaggtgacagactttatctcaggtt

SEQ ID NO: 218366 - DNA, 321 bp, Homo sapiens
aacaaacattgagctgctctaattaaagttgagaaaagtggtgatgagggcaaggagattataaatggcttggtgtcactcctcacttcccccatgaagcaaaatttgaaaatcactgaattgttctgctttctatgactccttctatgtttatagataaagattggatttccttttctgccttgccttctgggaggctcaggccttctttgttttactcagtcatgctaattctcttcaaattggggttcgtgagccaccgtgcccagccaaatcttaaagctccaaaataatctccttggactccatgtctcacatcca

SEQ ID NO: 218367 - DNA, 397 bp, Homo sapiens
gcttcacactggtcttcaccttttatgatgttcttaaggcataaatcatagtttcaaagccagggttcccattatattatttaagatgttatgtggaagtttttatgcatttcacaaattcataaattagtggggcttgaatgatagaaactaggtagaccacttccttcattgtcagacaaggttatagaaagttgaagcatcttgcctctgttccatggctagcttgtggcaaagccagatggtatttatccttgaggttcccttcaagtgctcgttttgggaacctaaactgcctctctttggttaatttgatgaattatgtaatttatcagagtggttttaaaattcagtataagtaaaattatatggacactaaaatttttagagtgagtaa

SEQ ID NO: 218368 - DNA, 432 bp, Homo sapiens
tggttttgcctacatacatggaattctaattcttcatacatgaaatatttatgatgtaacaattagcattaatcctttaattcaggaaaacagtaggaggagctcctttcttttaaatgaataagcgtttacataaatctgtataataattaattttagagcaccaaaactacaaataatatattacaaagatatagaagattctacatatataaagaattgctttttaaaaaactttagtcagaattatcattaaagtcagggatgataaatgagataaaaaattatgtgaaattgaattaagggtatttggggatacttattacttccatactagaaaatttgaaaaaataagttaaatagatacatgcttagaaaaattaaaatactaaatgagatgtaagaacagagaatatgaataaagcaaacaaa

SEQ ID NO: 218369 - DNA, 106 bp, Homo sapiens
gggagtgggcacgggctggacagtggacttcaagccaggggcacagcagccaagacctccactccacccaaggctgggcctctagaatacctattctcagggtgtc

SEQ ID NO: 218370 - DNA, 1059 bp, Homo sapiens
atcattttttgttcctcattcaacatatacattttaatctagtttttgactaattaggaaggtattccagcagttagcatgctgagaatttgctgaaatttaaaaaaatgtatccgtttccgaatgttgtttactaaaatcatagtagtgctgaccataattattagttttagtgaacccaggctggctccaggtgatctttctttcctaagtggtcatgaaattctggattcacagggattctatttttgggcattgagttattgtttctgctgttgacccttatgcaaatgagcacatttacctaactttaatctctcagttctgttcctctcctactgatttccagactaagaatgccttcaaataaccaagtatataattgtctgattctggaaacaaaatctttctgtagtaatccattactctaatattattttcctacttagactttgactccatcatatctttctttcctttgcagtcaattctttttgataaaggtccttgataccaccttatacctatttctgctcttctttttgatttttaattcactttatgtgttctggttcttttacctgattccaaaatgttagctttttgccagatttttattctttcacatagtttctgtccatggtgtttttttcttcttgtaataatcacttaattttcataaattatcatttattccctgatgacatatatttgtatgatcagtctagatagctgttctgagctcttagtctataaatttttctgcttcatagacatggatatctatgaaatatcaacttggaggtcccagaaagatctcatatctaacatgcctatagcagactcattatctccccaaatttgttcctcttcttgtgtttctttggtgagtgaaagatgatggtatcacatccttcccagccaaatgattcccaaattaaaaactctgctaaggcatgtttaatcctccatttctttgaggctcaaaattcatcataaattcctcttggatcaggctcttattattttactacagttagtacaatagacaatcaagta

SEQ ID NO: 218371 - DNA, 141 bp, Homo sapiens
ccactagccagcacagggctcatgcgggggtagggggaagataaattaggtaagggagttaggaacaaagcaggcatcccactagctagcacagggctagtgcaggtgggggaaaggtaaattagctgagagagttaggct

SEQ ID NO: 218372 - DNA, 557 bp, Homo sapiens
ttttttattggatagttgtgaggattaaagtaagagcatgtcaacgtgtagaaagattatatacgttctacagttcagaaacattggcgtgtagattataaatatttgctatgttaaaatatttttatttgggggcaggactttgagctgctccaccccacccccacctcctgctgcccacgcaagaatcagaaccactgctgggcagagtggctcatgcctggaatcccagcacttgggaggctgaggcagggagattgcgtgagcccaggagttccagaccagcctgggcaacatgcagaaaccccatctctacaaaaaatacaaaaagtatccaggaatggtggctgtaatcccagctacttgggaggctgaggtggaaggattgcttgagcctgggaggtggaggctgcagtgagccaagactgtgccactgcacttcagcctgggcaacaaggtgagaccctgtctctgaatgaatgaatgaatgaatgaatgaatgaatcagaactgtaagaaaacctgctaacctctccacattgtcccgagtccattaa

SEQ ID NO: 218373 - DNA, 230 bp, Homo sapiens
tgggcagtgaaactattctacatgatactaacaagggtcgattcacacttatcaaaatatatatatttatacatttatgcagtattactatccattatatacttatcaaaatccatagaatgcacacttccccaagagtgaactctaatgtaaatgatggactttgggtgataatgatgtgtcaatgtaggttcatcagtggaaacaagtttaggactgtagtgcaggat

SEQ ID NO: 218374 - DNA, 466 bp, Homo sapiens
tactaatttaatcatcatttattactcatttgatatcccattttatagatgaagaaaccaaaacaaagacagataagtaatttgaccaaagtgtatcagtgtccaagaacaatctcattctctggccccagagccagtgttcattactcgttatatcatttgtatgtgttttctaatacgaggaagtatgtatatgtgtgtatgcacatatatacatgtgtttacataatatataatttaaatgataaccaaaatcaagagaataaatcagtgtttaacaaacaatatgatcatcaagtacttagtatggaaagactattaaagaagaaaacaaaagattttagatttactctcagctgtgtgaccctaatcacttatctttactaagtcctcatctgtgataaataagcatcacctgggggcagatatgtggttaaaaacagaaattcctgcaccccaagttgga

SEQ ID NO: 218375 - DNA, 571 bp, Homo sapiens
gtgaattctgtaatcctgccatatttaatatcttacccctctagtatctccaatgtatcatttgaaacaatttttaaaattatgccactaatatgattgtcttttaaaattcaccattacatcatatactttagatcatctctatgttaatggttcttaatggttcagaattgtttctccaagattgccttcaatttttcattgccatttttaaagatatttcacaacattggtggtatgggctctaaaaaatattatggcacattagagattttaagtgagcttggtatattttcacctggaggcaattatgtagactgtattgagttcctttatatcataaagttttgcatatataaattaacaggattatcaatcggcttcttagaaacgattatgtaagttctagtaatattaaaaagatatttaaacattacatccatacatatgggttaaaatacacatacaaaaacaggagagcctaataatttcagaagccagtatcataaaacaaaggggaaggagaagttaagtaacagcagtatggctaataaataaataatgcatttta

SEQ ID NO: 218376 - DNA, 242 bp, Homo sapiens
aatataaagatgttgcaccaagtgtcctcctcaagggcagtacatttttttttctagaaaaaaattctgaaaagagctctcctattcatgttcatcagtggttcttcagtggaggctatttgcctctttagagatatttatcatcattcagagacatttttgattgtcacactggtaggaggagggtgtgctactggtacctaatggctagaggtaaaagatgctgctaacatagcctacag

SEQ ID NO: 218377 - DNA, 599 bp, Homo sapiens
ggaaaaattagatcattttgtatcaggcagtctagatttgggtgccagctatttgtcagaaaaccagctaccccatagttggagatattgagaacttaggagagttatagccctttctaaagtgggaagggagactcagtttcttaatgctagtgtaacaaattatgcaaatttagtggcttaaaaacaccacctgtttattatcttacagttttggagtcagaaatatgaagtaggtctctgggctaaaatgaggtgttgccagtgctgtttttctagagccttcgagggagaatccgttccttgtctagctttcagaagctacctgcattccttggctcaaagctcctttcctccatcttcaaagccagtcacagctaaccggcagatcttcacattgaatcactctggctctctcttccaatttcctcttctacttttaaggaccttctacttttatttatttgtttcaagagatagggtctcgctgttgcccaggagggagtgcagtggcacgatcatcattgactgcagcctcgactcctggtctcaagcgatcttctcacttcagcctcccaagtagctaggacaacagttgc

SEQ ID NO: 218378 - DNA, 472 bp, Homo sapiens
atctagagagttgcattttgtagacactcacaaactgatagattacctcggcatccactatagtgcaggtccaaaatagtactgccaagaaactttttccgcattattcttgtctacagctacaatcgaatttctcttctcacttaagtgatttttagattgggaatgtcaccagagaaaaatgtagctgtgccagccaatgggcactctggacagttcagcatcaaattaatactctttaaatacaccctcttcatttgactgttcagctatgcatctcaacactgctttacttacactggaggcaggcaaaatattaaatatgcacttgactgaaaacctaacagactattttatacatagctttggaatgtgaaagttcatgtatatggcaagtcatttgacataactgatttgtaactaaaatttttaaaataatttaaaaagaaataaaattggttatttgccggca

SEQ ID NO: 218379 - DNA, 416 bp, Homo sapiens
ctgacagtgggaaggggaaggtggctgcttgcttctctgccacccttgtcttgcacttgggctcgccctggcccctcctaggttgaagctttggcatgaaatggtgcccatgtagcctctaccagcagacgtcctcacacttttggcagaagccccctgagcagtacctcatttagactttcctacctctgattccacacctggtctcgggtaccacagacctctgacctctggctggggacacgccctgagccttgccaactggtcttctggtcctcacttgtggcttaagggggaagcggggacgcctgtaatcccagctctcagggaggctaagaggcgggaggatagcttgagcccaggagttcgagacctgcctgggcaatatagcgagcccccgttctccaaaccaacca

SEQ ID NO: 218380 - DNA, 107 bp, Homo sapiens
cagttgaggatcccccagtctgtccgaacggcaccacctgttcccatgccctctgcctgtggtatcgtagtcctgcagtgtgggcaggcattgacctttggagaccg

SEQ ID NO: 218381 - DNA, 305 bp, Homo sapiens
tcatttcctataaatggtgcaaacagtacctaccccatacagttatgagaaataaatgatataaagtgctttataccctgagtctcaaagtatggtcaacctgggtccagcaagggtccatagactctttggtaataatctacaatgagataagtacagaagttgggaataattgtatttcttttgaatctaataattaaaaattagggcctatattttctatgtctcttttatgtcatgtttctagtatttaatttttattgtttacaaaagcatcagtacacaatggattggaaactaaaact

SEQ ID NO: 218382 - DNA, 467 bp, Homo sapiens
tcgtaaatcaggaacagttacctaaaacagttagcactgttacagagtcaagagaccagaggttctccgtcctcctaggtagaaatatgcagaactttacatacggggtccctcggctagaggcctgtccatggtgtctgcaggctggctatgctcagattaagcaagactctttgtgggataagaaaagccactttgttggtattcctatcaaaaatttaaataacctgaatctaatcatgaggaaacatcagataaacccaaatggagaaacattctaaaaaagaactgaccttactcttcaagaatatcaatggcaagaaaaattcaggaagtgttccagactaaaggagacaaaagtgacagttgaaggcaatgcgtgactagaaatttccttttgctataaagaatattaaagaggtaattggtggaatctgaataaagtacatagattgttaattatattg

SEQ ID NO: 218383 - DNA, 462 bp, Homo sapiens
ccctcacaattcacctgcagtgctaagcagggcattctttgccccagccatcactagcagaacagaggaacacagggatcaggttgaagctgagaggaaggactcccacagaagactctgtgccataggagtaaccaagttaaggttcagacacaacagactacttgtaaacaccacattctctacattagaggtaacacagttgtgacttgtccaagacccaagacctacaaaaaaaaagagaaaaacaaactaataaactgcttttgatattgttactgacaagaaacacaaaataccactaagcaggtgatagtgaaggacactgtgcagatacgtgttcccatacagatacgattcagctaaactaactcaagtgcaacaaaaaatcttcaagattataaaaacatagctaatatgattgatctctctgaaaaataaattcaacggaactcaaaatct

SEQ ID NO: 218384 - DNA, 419 bp, Homo sapiens
actgtctactggttgagaaataacaaaatgtacatacaagtgagcagtgatggctgctattttataaacttgaggatttcacagcttgtttttgtcttgtatttctgggtaagcctggattacatttaccacttggctttacacatgctctgtttttaattaaggagcctgagttgtattgacagcatgtttatgtaattaatacaattatatatagtttagttaaacattcattgagcacctattgtttgcccattccctgcaactataatctttattcttctgagtcattgtaccatgtacaacctataattaaccagttaagcatatggtagtggttcccagacagttgaattatctttccttcactatagataaaaataaaaaattaatatattttcatatagcagatgattcat

SEQ ID NO: 218385 - DNA, 426 bp, Homo sapiens
acgtgttagctgtagaaattcatcgcaaagagttgctgcttggctgatctgagcctgttagtaaactttctgcacattcacatttaggaaacaaataggattaataagactggcagtgtgcagtaactccaaggctggttgtcacttacagtaaggcagccacatcaatgccctggtgcactccagtggtttccagaatggaagtaatggaatttctgtagttaagtgcctgtcagtcctgtggctggggcactcctgtgtaaatctgtaatagagaaggagccattatgggcacctggcatgagggctagggaaggcagggttggcccaggccctaaggctggtcgtggcctagggaccaaacctgcacaagcacagaaaatgacaattctgtagtcttttccctcactttgtttttcttgggtc

SEQ ID NO: 218386 - DNA, 337 bp, Homo sapiens
tggacactatttaaagtgacatggcatatgtttaaaagaacaaactagaaattctagaattgaacatttaaaactaaaaaactcaatggctatgttaggcaacaaagtattagtaaactagaagaaataatggaagaaagtatcaagaatgtagagctgagagacaaaaagggagaatataaaaggtcaggaggaaggaggatggggtcagaaggtgtaatgcacgtttaacactgagtcacaggaagaaaagtcggggcagcaccatgtttgaagtgacggtggctggtaaatcatatcaaacagtcaagaaacccagtgaatcccaagcaagatt

SEQ ID NO: 218387 - DNA, 464 bp, Homo sapiens
acagaaccctgaggctcagtcttcagcataatttgagactcactttttgccaaagaactgtgattgacaacctgagcactttcagttcaccttattgttcattatttcctccagatgaactgtaaattgaacagctctatccaagattatagataagacatagcccaccactgccaattcctttgaagctgttctactagaaaaagttcatcaaaagtgctgactcttcagggagaagttccccccccccaaaaaaaaatgctgaatcaaagactactgtgcacttcaaaaaactcgcccttttctctagatgtgactgtggttagtactgtgtaggtaatcagcaggaatacatcagcagtcagaaaactgtggcagttactccggactcagccaaatcactttacgtgtttctctagctccaggttcccatctatacaatgaatagcattttcatccactgt

SEQ ID NO: 218388 - DNA, 305 bp, Homo sapiens
tgcacgagggaagaaggtgccttacttccctttcgccttccaccatgattgtaagctttctaaagcctccccagccatgctgaactgagtccttttgctcctgctgagtagttcctgcctgcatctttaatcctatggaggtgacagcctttgttccattcagcgtaagatgaagggcctctagtattgtgctcctgacctcgtaatgagaattaccagcaggactggatggattcctaaagaatgtgagcctgctctcttgtaaatgtttttaataataaatgataagaaaggcaaaggcacaa

SEQ ID NO: 218389 - DNA, 534 bp, Homo sapiens
cccctcaggagatggtggcacaagagagacagcaccctcctaagatcacctccggccccactaggtcacctttgcaatttcattagctccaggctgtcttgttccattcagatttacagaaattttagatctgggatttggatcaaatggcagaagcaagaaaaattcattttgagtgttttttgaaaccaactctgtaacaattgaatatatttgatgtagaagttgtcaccatctagactgatgtcctcatcatcaaagggcaagagcaaatgtctctaggttcctgtgttgtccatttgtttcccgctccctttttaaaacggccttatggaaggacaccttcttcttcctgtaggaatgggccacaagcttcaggtaagagccttccctgacttccctcagccaccaagtggaagcagtgtcttactctcagaacccacatggcattttatccatggcatttatccagcagggtgtccctttgggagcctgtcactttttattctgcatgataggtgactgtgtccatgc

SEQ ID NO: 218390 - DNA, 403 bp, Homo sapiens
tagccacgtgaggatgggaagtctcatttgccaaatgactgggctgggtgcagtggctcaagcctataatcccagcactttgggaggctgaggcagatggatcacctgaggtcaggagttgaagaccagcttggctaacaagagttccccaaggacagaagtcagggaataagagctgagtgagacctcccaaagcagatcacaaagagaaggggacactgcaccatggaggtgacacaggccagtggccacggtgctggacctggggctgagaggacccacatgtatatcctggccgatttaggtatcttagactttctgtgcctcactttccttatctgtgaaatcagcattctgatcatgactaaataaaaattgctgccattgatcaagggcactgact

SEQ ID NO: 218391 - DNA, 511 bp, Homo sapiens
ggataatgctggcctcaaataatgaggtaaggagtattccctctccaatgttttggaaacgtttgagaagaattagtgttggttcttctttaagtgtttgatagagttcactggtgaagccattaggttcagagcttttcttttttgggagatttttgattactgattcattcttcttacgaattagagctctatgcatattttctatttccacatggtttcattttggtaggtcttctgtttctaggaatttgtctatttcacctaggttacccaatttgttggtgtagaattacttagtactttcttataatcctttttgtttctgtggaataggtagtaatgtccccactttatttaatttctaattttactaaagtgagccttttctcttttttttttttttttgttcttagtctatctagctgaagtttgtcaattttgttgatctcttcaaagaatcaacatctgggttcattaattttctcaattgtttttctagtctccattt

SEQ ID NO: 218392 - DNA, 177 bp, Homo sapiens
ggagaaaatctagcttctggtggtttgcaggcaatctttgacatttctttgcttgcagaaacatgaccacaatatctgtcttactcttcacatggcattctctgtaaagccacactatttgcttagattgtttgaagaaggcactttcagatgtgttccagaggctgggcaccttga

SEQ ID NO: 218393 - DNA, 223 bp, Homo sapiens
agtgcactcaaatgctggcactgaagttgcatcttgttgatttacaagtacaaatctaggagacaagatcatgaagacacaaagcatcgaaaacctaatgtaggggtgggcaaacgacttcttacgggttaaatctgtccaccaccttgtaaatatagcttcgttagaacacagctgtgctcatttgtttatgtattatgtgtccagttttatctctaataac

SEQ ID NO: 218394 - DNA, 658 bp, Homo sapiens
agggactgttgatattcagggatgtggccatagaattctctccggaggagtggagctatctggaccctgctcagcagaatctgtatagggacgtgatgttagaaaactacagaaacctggtctccctgggtattgctgtctctaagccagacctgatcacctgtctagagcaaaggaatgagccctggaatgtgaagaaacatgagacagtagccagacacccagctgtttcttctcatttcacccaagacctcttgccagagcatggtataaaagattcatttcaaaaagtgatactgagaagatatggaagctatggcattgagaatttacaattaaagaaagattgggaaagtgtgggtgaatctaaggtgcagaaagaatgttgtaatggacttaaccaatctttatcaactacacataccaaaatctttcaatttaataaatgtgtgaaagtctttagtaaatcgtcaaatctaaatagacataagataagacatactggagagatatcttccaactgtaaagaatgtgacaattccttttacatatcctcagttctaactccacttcagagaatccacactgcagagaaatcctacaagtgtaaacaatgtgggaaagcctttaggcactgctcatgctttcttgaacatga

SEQ ID NO: 218395 - DNA, 424 bp, Homo sapiens
catcatgagtaaagtatttcacataagtattctttttttgagatggagtttcactctgtcacccaggctggagtgcagtggcgcaatatcagctccctgcaacctccgcctcccaggttcaagcaatgcttctgcctcagcctcccgagtagctgggattacaggcacgtgccaccacgcccggctagtttttttgtatttttagtagagatggtgtttcaccattgttggccaggatggtctcaatctcttgacctcgtgatctgcccacctcggcctcccaaagtgctgagattacaggcgtgagccaccactcccagccaaccccgtccctaatttaaaacacacacacacacacacacacacacacacacacacacacacacacacacgtgcgcgcgtgcgcgtgagccaccgctcccag

SEQ ID NO: 218396 - DNA, 420 bp, Homo sapiens
ttggagttttgctcttgtcacccaggctggagtgcaatggtgtgatcttggctcctgcaacctttgcctcctgggttcaagcaattctcctgcctcagcctccctagtagctgagattacaggtgctggccaccatgctaattttttgtatttttagtagagacggggtttcaccatgttggccaggctggtctcgaactgctggccttaggtgatccgcccacctcagcctctcaaagtgctgggattacaggcatgagccacccggtttgtttgttcttaaggaaaaataacagtacttgataacagattgacaaaagagattttgaactttaggtattgagaaaagattagtaagactcactttgatagttgtgaaaattactagaacatgatacagattttgcttctggccatgat

SEQ ID NO: 218397 - DNA, 505 bp, Homo sapiens
ctctcagagggtgaattgttttcctctttccaagttctcttcaggaggggaatccccccgctgtccatccctgtatcctgcgagttaggtacccagctgggatctgatttcacagcctggggtcagatgtgttgtaaagcaatcttacatggttggtaaaaagcaatgtaagacactctgctagaagttggcagggcagagagctggggggcaggcggcaaacatgattagagagggagcttacccggctctcaagggactcatgctaactgtggagaccaggctcatccttttatgaaaagataatgagctcttgtgtgggtctgtgattaaggcctacatatggcacagacaccaagggcgatagcaggggagtattgaagaaaagggcttagaaatatcagggtatgagcaaagactcagagatgaacgctcagggcatgtgtgggttttgtctagggtttctacatctagaaagtagttgttaggttctgggggcacacag

SEQ ID NO: 218398 - DNA, 373 bp, Homo sapiens
ggaagaaggtaggagaggcatgggaactggggaagaacagcttttcatccccctcacccaccacaatggtcagctagcaggatccaccaaccaagggtgacactacaccatatgcaacaatgaacttgaaatggagcagatacctcaatgcaagaacaaaggctataaaatgcacagaagaccaaggaaaaaagccctgtaacactggatttagcaaccatttcttggatatgacgccaaaagcacaagcaacaaaagaaaagagcgaaaaggcaacctagggaagggaagggaatacttgcaaatcatatatctgacaaagtattagtatctagaataaacagctcctaaaactcaacaacaaaaaacaatt

SEQ ID NO: 218399 - DNA, 413 bp, Homo sapiens
cccctacagtgtgaactagagcacctgtctgtgtgttccagatgtgtacacatttgtcaaaagaattgctggccagataccggccatcaggactgaaagctacactgtacacaggcttctcattcagcatttaccttcggtatagaaagccgtatcagtcagtccaatataaatggtgccctcgtcccacctgctgcattgatttctatcatccagaaaggtctacagtatgtagaagcagaagttagtattaatgaggatggtactttctttgatggtcgaccaatgagtctgtccctgatagacgccttaatgcctgatgtagtacaaacaagacaacaagcttatagcgataagcttaaacagcaacaggcagcagctgccacagccaaccaacaaggatctgcaaaaaa

SEQ ID NO: 218400 - DNA, 633 bp, Homo sapiens
tttttccaactaatactctcccaccttttattatttatttccattcgtagtgacactaggacccccagatgccttcatagcattgcttatggctttgtagtcccgcatgagtagccactgccatgcttctgccatgctctcccccatgtcacctctgcagccacagcgctgttcagttgtgtgctgtcagtgcttccaacagggggtgtttcagctcttccctctgctccattgctttctcatgacaaagttcatcctgcttccgtctcagcaaagcctgatctgtgactctgtgatgtgtgcttttggatgtgagtgtgtctgtgtgtgtatccaccttagggagaaaacggatttcataatttcattgaacaaattggcccattacatttgctaccctttatcaaacaaaaaccgaaactgtgtcatttggacaaagtggtagaatttattatctcaaaagtgataatgggaatgctataactagacatcgataaaacttctaatcttggttgaaaaatatgatttcactttgtattgctcttactttccctcatatatttattaaagctgtaaaaagatgacagtgataaattcaaataaaaatttgagtatagcagggaaaggatactg

SEQ ID NO: 218401 - DNA, 332 bp, Homo sapiens
gtccgcaccggctcatgcggcgttccagcagcggtcactcccgccgccggcccccgccgcccgccccgcctgcccctacccctccgcgcgggccgggcacctggccgccgctcggtcctcggggccccgcgctgctgtctctgtctcggcttctctcggcccctgggtctcttcgtctctgccgttctcaggctcagctccgtctcgctcggtccctcgcttccccgccgggctctagccggccgtctggtggcccgaggtggcggcgggctgggcgcggggcgcgatgagcggcgcctgcacgagctacgtgagcgcagagcaggaggtgg

SEQ ID NO: 218402 - DNA, 434 bp, Homo sapiens
ggtctagtggtccttcctcccatcctccatcaatccatccatttgttaggcccctactctatgccaggtcttgtgctgggtgctgcacattctttctttctttctttctttcctttctttcctttctttctttctttcctttctttctttctttctttctttctttctttctttctttctttctttctttctttctttttctttccttctttccttctttcttctttttttttgagacggagttttgctcttgttgcccaggccggagtgcagtggtgtgattgtggctcactgcaacctccacattctggttcaagcgattctcctgcctcagcctcccaagtagctgggattacaggcatgtgccaccatgcccagctaattttgtatttttagtagagacagggtttcgctgtggtcagaatggtctcgag

SEQ ID NO: 218403 - DNA, 529 bp, Homo sapiens
gagcataccttttctgttatgacaactctgtaaatggaagaaagaagtccttttcaactcaaagcagcaatttcagtggctgtttcaaacattgcctttcaattggagataaaatcaaagaaacaaaacctcaggctttttactgaggaccaacttgaattcattattcaatgattttctgtatcctttcaacatgtgtttgttaagcgaggtgcggtggctcacgcctgcaatcccaacactttgggaggctgaggtggaaggatcgcatgagcccaggagttcaagaccaccttgggcaacatagggaggtctcgtctctataaaaaattagccaggtatggtggcgtgtgcctgtggtcccagctacttgggaagctgaggcggaaggatcacttgggcctgggagctcaagactgcagtgagctgtgattgtgccactgcactcaagccagggcaacagagtgagaccctgtctctgaaaaacaaaacaataaaaatgcatttattgaattcacacttcaaaaaa

SEQ ID NO: 218404 - DNA, 589 bp, Homo sapiens
ggtactcactatccctatttcacagctctggaaaggtccctggagaggatgtggaaagatccccagtaggtagcagagccaggattcgactgaagaccgtgattcaagtgaggctcttaaccctgggccagctgtctgccatttggactgcaaaacccagaggccagatacccctaagaggccagctgttgcacctctgcaaggcggggttccacctcctctcgggtcccggcacctaggccagactcatcgaatgaatgaaagactctgttgtatcccctgtacccaccatggctatcacaagccacagtcccatgaagacagagaacccaaggccactttctcagaggaggacggtgatctgtctctgggcctctagggtgggattcatccttctcagtcagatttcaggagcgatggtggttgcgtttttgggtgtcagtgctattgctataacttaatgatgcaaggtagggaagtcccacagacactgaacatgcagtgatgctgctgagtgtgttgattagcaccaaagcaactgtggaactcagagataataacatttttaattgtattagggtttggggaa

SEQ ID NO: 218405 - DNA, 903 bp, Homo sapiens
aggaggaggaggcagaggcggtctgggccgggccgggcctgacccctgcgtcccgggggcacaggcgttcttaaggctgcagagccctgggtcccccacccggccccggttcactttgagcggtcccaaggcctgagggcctactgtccagtccccaggttatcgtcctgagcaaagacagaccccgagccctgcggtcttggggctcaaacagtccctggatggccaaacaagcaaatattcgccatggcagtgggtgctggaagggtggctcacggagctgacgccctccgcagagaaccgtggtctagtcctgcggtcacgaggcctatctgggacagtggtgtttgagctgagactttaacgaatagagacaggtgaggttcctgcagcccagggcttcagcgtgaacaaccccagaaggaaaaagagtgctgttgttaaaggtatctggcatcatggacccaaccatcaccaggagtttctcacttcatctctgtgtgataaattttgacatatgtatacatccatgaagccggcaccacaatcaagataatgaacatctcgcttaccccagaagtttcctgtgccctgtcactcctccgtattcctccatcctcaggatttcatcaaatggtctgctgcactgtgctggaattttgaactccccagagtagtaaacaacatcttctcaagggtatacaagtcatcagatagagaaaacacccattatagagctgtggagcccttacgatatagtgctatgctgcaacaaattagacagaagagtatttgttgaataataaaaggtatcaatgaacgaacaaataaattaatgagctgatgtattgattaaatgaatttacttctttcagatttacttttccaaactaaaaaaaaatt

SEQ ID NO: 218406 - DNA, 748 bp, Homo sapiens
aggaggaggaggcagaggcggtctgggccgggccgggcctgacccctgcgtcccgggggcacaggcgttcttaaggctgcagagccctgggtcccccacccggccccggttcactttgagcggtcccaaggcctgagggcctactgtccagtccccaggttatcgtcctgagcaaagacagaccccgagccctgcggtcttggggctcaaacagtccctggatggccaaacaagcaaatattcgccatggcagtgggtgctggaagggtggctcacggagctgacgccctccgcagagaaccgtggtctagtcctgcggtcacgaggcctatctgggacagtggtgtttgagctgagactttaacgaatagagacaggtgaggttcctgcagcccagggcttcaggcactgtgctaagcagttttcctggaagtgtctacctcatttcgttctctgaatagctctaagaggccaaccatcaccaggagtttctcacttcatctctgtgtgataaattttgacatatgtatacatccatgaagccggcaccacaatcaagataatgaacatctcgcttaccccagaagtttcctgtgccctgtcactcctccgtattcctccatcctcagcatgaacgaaaaaaaatcatccatattgttgagctgctgaatacccaggaaaggctggaacccatttctttgttcatgtgtttgtccaaatcctgtgtttctctccattgactcttgtt

SEQ ID NO: 218407 - DNA, 658 bp, Homo sapiens
aggaggaggaggcagaggcggtctgggccgggccgggcctgacccctgcgtcccgggggcacaggcgttcttaaggctgcagagccctgggtcccccacccggccccggttcactttgagcggtcccaaggcctgagggcctactgtccagtccccaggttatcgtcctgagcaaagacagaccccgagccctgcggtcttggggctcaaacagtccctggatggccaaacaagcaaatattcgccatggcagtgggtgctggaagggtggctcacggagctgacgccctccgcagagaaccgtggtctagtcctgcggtcacgaggcctatctgggacagtggtgtttgagctgagactttaacgaatagagacaggatttcatcaaatggtctgctgcactgtgctggaattttgaactccccagagtagtaaacaacatcttctcaagggtatacaagtcatcagatagagaaaacacccattatagagctgtggagcccttacgatatagtgctatgctgcaacaaattagacagaagagtatttgttgaataataaaaggtatcaatgaacgaacaaataaattaatgagctgatgtattgattaaatgaatttacttctttcagatttacttttccaaactaaaaaaaaatt

SEQ ID NO: 218408 - DNA, 1302 bp, Homo sapiens
aggaggaggaggcagaggcggtctgggccgggccgggcctgacccctgcgtcccgggggcacaggcgttcttaaggctgcagagccctgggtcccccacccggccccggttcactttgagcggtcccaaggcctgagggcctactgtccagtccccaggttatcgtcctgagcaaagacagaccccgagccctgcggtcttggggctcaaacagtccctggatggccaaacaagcaaatattcgccatggcagtgggtgctggaagggtggctcacggagctgacgccctccgcagagaaccgtggtctagtcctgcggtcacgaggcctatctgggacagtggtgtttgagctgagactttaacgaatagagacaggtgaggttcctgcagcccagggcttcaggcactgtgctaagcagttttcctggaagtgtctacctcatttcgttctctgaatagctctaagaggcgtgaacaaccccagaaggaaaaagagtgctgttgttaaaggtatctggcatcatggacccaaccatcaccaggagtttctcacttcatctctgctttattgtagtataatttgcatacaataatggcacacatttaatgtgcacagtgtgataaattttgacatatgtatacatccatgaagccggcaccacaatcaagataatgaacatctcgcttaccccagaagtttcctgtgccctgtcactcctccgtattcctccatcctcaggatttcatcaaatggtctgctgcactgtgctggaattttgaactccccagagtagtaaacaacatcttctcaagggtatacaagtcatcagatagagaaaacacccattatagagctgtggagcccttacgatatagtgctatgctgcaacaaattagacagaagagtatttgttgaataataaaagagtctcactctattgcccaggctggagtgcagtggcatgatctcggtacactgcaagctctgtctcctgagttcaagcgattctcatgcctcagcctcccgagtagctgggattacagttttccaataataacatagaaaaaaggaagaatttgagagtttctcagattaggcaattccttgaagaatctgagaacacagaagctcccctccctactttccatgattgaaatcagtgattcattggtttctttgtgtgggcttttgaaagatcattagaaaccaacctgaagatcatgagattcttgtggacacaggagcaatgagtggcaatacagtgctttctaatgcaacctactttaaaaggtaaacaga

SEQ ID NO: 218409 - DNA, 415 bp, Homo sapiens
aaagacagtgaattacttaaggtgtcgccatgataaactagggtaaatcatgaatattttcagagatgttactgcctcacagttgtatgatatgttctgtgagtcttattggttggttgtaaaagcaagctgacagccttcagaagaccttctttgttcagcacagaacctggaggtacttgattaattcagtagtgtgtggagagaaacagtggggcaaggagttctttggtttgactctccaagccagatgctaaaatcagtccggaggactgtgacagagttccaatcacagtgcaacaagatttatatttacctagaatctaattggactgagatttcctgcagttatattaaaatcctctgtccttttttcttagtgagcaagcatttgaactcctaagctctggagatt

SEQ ID NO: 218410 - DNA, 331 bp, Homo sapiens
ctgtcgagaaaggatctatcttcttagataatagataaataattatcaatagaatgttaatagaaatgtggacagtacagccaattctgtgaaggtctcagatagaaatgaggaaaatgttattggacaataaaagaaagtgatccttgttataaagtgccaaagaacttgctgaattgtgctctcgtgttttgtgaaaagtagaactggtaagtggtaaaatttgattatttaactaaggagattcctaagaaagtgttgaaggattggcttacttctatctgatggcttatagtaaaatgcaagggatgaattgaacaaggaattgtta

SEQ ID NO: 218411 - DNA, 225 bp, Homo sapiens
gcctgtcccctctcagaactgtgcctgtgtccgaccaaccctccaaatgagacccagcttgcccctggctgcgggagccccagtgatgggggaggacggtgaagatactagtgtcccagatgattaagccttagaagatactctgcaagacttaggccatgaacggagcccttctctgctcttcttaactcaaagttaaaaataaagtcaaaaattcggtgttcc

SEQ ID NO: 218412 - DNA, 622 bp, Homo sapiens
cctacagtcacaggtgctggcctgtccctgctgtcctcctgaccacctggtgctcccggccaccctgcccgcccccctgtctcctcgggacagcctggctgcctccacttgctggcccctgccggcccaccctctttccaagcctgccctgcccctcagctcctggggtggggaggggagacctcgccttctgcctgcagcgactcccacctgtcacggagcccccctgcagcaccaccaggccctgccctttcccaagcagagggatgggacagccgtgcagatctcgggtcccgcccctagggaagggcctcgctgcagaagccaggctgctcaccttggagtgcggggaaccagcgcccctttcagcacccggtggtgtctctctgtgggaagggagcggttttatccaagcaggacactgttttctgtagttttaccttctttcaagaaatgtcgtatatgagacctccgttgagtgtggcagctgttcattgatattccattggatgcactagtgtgtcctagtccccacgatcaatgtgtaaatcgtaacatccaatcatagcgagtttcacacacataggaataaataaatggagagtgctgtaccgggaaaaaa

SEQ ID NO: 218413 - DNA, 225 bp, Homo sapiens
acaggcacaggtgatctttaaacagggagacctaggtccggctctgggccaccgtgtatgatcctgggcaagtcacttctttcaacgcaatttaggattagtgacagccatagaaaggaacatcctttggactaaaggctggttaacctaggtctacgcacttgacctctgtgcctcggtttcctcatcaataaacgtaggagacctacctcacttgattgagga

SEQ ID NO: 218414 - DNA, 500 bp, Homo sapiens
gtgctgggattataggtgtgcgccagcacaacaggccagaagactcaatattattaagatagcagttctcaatattatcaagatagcagcagatcaagatagccaacttgatctacagattctacataatgacacaatcttaatcaaaatcccaggaagttatttgtagatatggataaactggctctaaagtttatgtggagaggcaaaagatccaaaatagccaaatcaatattgatggagaatggtcagaggactgataccacctgacttcaaggcttactctaaagctatagtcatgaaagcagcatgatactggcaaaagaatagacaaatagatcaatggaacagaatagagagcccagaatattaaaagtaatatttctaatagacctgtataaatgtgtcaactgatctttgacaaagcagcagaggccacacaatggagcagagatagtgttttcaataaatgacgctgggacaaccggacatccacaagc

SEQ ID NO: 218415 - DNA, 364 bp, Homo sapiens
ggaaggggcagggaataggagaggtctgggcctctggatcagcagtcaactcctcaccccagactcctcccactcatgtccttcctatttctcctgccaaatcaactgtcctaaaataactcattgctcataaacatgcaagtggcttcccccacacaacatgctcagaaaccaacaccttggcctggaattcagagaccattacagtttgacccctactaatctctctctccacccactttttcccttttcctttttttcatcatgaggaaatcatgccaaatttgagtttatatatcaaagccaatttgcttgtctttgattcacttttatgtagcagaaaaataaacatatactacttgta

SEQ ID NO: 218416 - DNA, 414 bp, Homo sapiens
agatgataaatactgagtactggggccaggttctgaatccaggagttggactgcaccagaggctaagcacttgccctcattgttgtgatgctgggctacgttatggaagacaaagatgtctcggggtatttgttgttttataagaatttcaggctgggcgcggtggctcaagcctgtaatcccagcactttgggaggccgaggcaggcggatcacctgaggtcaggagttcgagaccagcctggccaacatggtgaaaccctgtctctactaatacattaaccgggcgcggtggcatgtgcctgtaatcccagctacttgggaggctaaggcaggagaatctcttgaacccaggaggcagaggttgcagtaagccaggaccgcgccactgcactccagcctgggcaatagaacg

SEQ ID NO: 218417 - DNA, 526 bp, Homo sapiens
accctgacttaggacctcctgccgtttctctgggtgactgctctgtagtcgtgagtcgtctctttaatgctgagcatcagtacctgcacagccctgaatggagcagctgcccagaatctgtcttgtcatcgatagatggacagttgccgagtgtcctgcgtgccgactgactaaggagtttttgtctctgtcaccctgtcccctgtggttttatgaagacgttagttatgaatccgtgtttaggatgagaagatgtaaacagtgaggaggataagtgagaagctagcaagagtctggatggtgatggcgggggagcgctggtggaggagtcgggggcgtcccgctggactggggcacagctctgcagcagcagccggtgcggttttgccttgtaagtgacaccgttgcctgcaggcatctctgacagctgctcctgctccagattccagaaatttctatggaacatttcctgaaccatcctcctggtttcttcccttcccctcactgaataaaatccgtaatagca

SEQ ID NO: 218418 - DNA, 253 bp, Homo sapiens
ggattggtcaaagaagacatatccacaatttaatgtcacaaatttttccagaaaatggtcaccacaaacatcaggtcttttagaggccaggcgtgatggctcacttctgtaatcctagcactttgggattacaggcgtgagccactgtgcccggcctaattaatttatcttttttttttttttttttttggagtctcagcgtttccgattcgttgtcccccaaaagtggaagtgtatgtgccacaaccccaaa

SEQ ID NO: 218419 - DNA, 477 bp, Homo sapiens
ctgcctacacgatcattcttagcagcaaatttattccatcgacttttacgtccacttaacatccagattgcatttactttgcgcagataaccttgccgcctacctcacaagtcaaggccacctgctgctctctttctactttaaaacatccttcctccatctttaccccccaactcagcaaaattgatgtctctctcggatgacccaaagtttggagggataattaatttgatagatgtcagaatcaaagttcaaaacagtctcaacaggctacaacattaggccaaaagcaatgaaataaaatataactttcaaatctaaatatgatgtactagctggaaaagcccaagttttagattttagaccttggtttgtatctagttacccaaatttgagtcatatccagtaactcaaattactatcttttgctctagtaaggtcaactgttaatttgagataaaaatacctacttcataa

SEQ ID NO: 218420 - DNA, 567 bp, Homo sapiens
attcatggctacccagcagaagctgccagagtcttctttcctgcatgaactagagtgtcctgataaccgcgagaccacttaggctgaagtcaagatattctttcagtatgtgggggtccccaaagccacaccccctctcacttgggaataggagaccatgccgccccctctccacctccactgccaggggacaactagcctcttaggctgttccctccctgagtcttcccttcccaagctggctacaggtggacatccactcttccccttccaactcccttcagaggcccatgggccacagactgcagatctagccctcccttcactaaccctcttgtcctcactaacctgggtctgtctaagccttcttccctgtagtggatgggttgctctgccaaggcctggcatgcagtttggaggtgctcaggaaacctcagctcagagctatgatggatgaagcaggacaaaaggccagaggtgaaccaagaagctgggagaacaaaacaggacagggtctctgttgtcttggccaaccaaggtctaggagtctccagactggtcaactcc

SEQ ID NO: 218421 - DNA, 294 bp, Homo sapiens
aaaggctgtgaattggaagcacaggctgcaggcagctggggcagctttgagcaggagctccgggaaatcttctctaacctggggtccctgctgtgagcagcggcaccagccaggtaacctgttctcagtgggagacaccggctacccaccagggaagccagaaaagaggccatttcgctcagacctcaggccttcccacaggcgtgtcctccatactccgagggatggctgaggtcccgtttcgtttttaaacgtggaattatgattgctattaataaaaatatctggcccagt

SEQ ID NO: 218422 - DNA, 403 bp, Homo sapiens
tatataaccaagtaggtaaaacccattgtattcatgttttcaagataaaattgctaaatttatcctatctttacagggaggcaggatttgcaacttggagtcaggtgacagctgaagttaggctcgtctcctctgggaaatgtcctcttttgtttcaggtagttgtgagactgataggaggctaatttagcattcgactttaaaggagtcataattctcaaaccccggtgaattcttacttgtttacaagaccaatgaagacttctaaaaacctcgtagtccccatggccagtgtgtgcaaaccaggctgtcctgcccctgggatgaaatgaaaaagtgaaaagtaaatgaagtcatccatatccagcccttaatatttttctctggcaaacagacacactaa

SEQ ID NO: 218423 - DNA, 242 bp, Homo sapiens
tctgctggggcagtagcaggctgtgagatgtaggaaaagggctgctttccagttctggctctattgctacttcctaggagaccaagaaaagttccttttcttgttgggacctcaattttcctatttctgaaaaagcctaatattctggaagtttcttcccatcctagaaactatttttttcttttttcttttttctttttttttttttttgagacagggtctgactctgttgcccaggctgg

SEQ ID NO: 218424 - DNA, 543 bp, Homo sapiens
actgcctctagcagcaggataatgcaatcacagggctcatttgtttcccttttctcatggatctgagtttcacaagagtgaaactccggctcaaaaaaaagggggttttattcgaacaacatacaaacacacaacagaatgcttcataagtcactttaaacaataaaatagacaataataacatacatatttttataagcatactcaggtatactaatgacagttgcacaggtacaacagttatgagcagatgaactgtattcataaggtcattggctgggtgcggtggattatgcctgtaatcccagcactttgggaagctgaggtgggtggatcacctgaggtcaggagttcgagaccagcctggccaacgtggtgaaaccctgtctctactaaaaatacaaacaattagctgggcgtggtggcaggcgcctgtaatcccaactacttggtaggctgaggcggagaatcacttgaactcgggaggcagcggttgcagtgagccaaaatcacagcatgagcaacaagagcaacactccatct

SEQ ID NO: 218425 - DNA, 332 bp, Homo sapiens
tgtgtcctccagatggcaaaatggtcaaaagaggtgcaaagagccaggcagtgggcaagaatgggaacattggaggtgtctacattgccttgtccagctctggctcttttctcaggtcctgtgtggaccatgcataatcacttttatggtaggaagaacctctaaaacataaaaaaatagatggaggaaacctgttagaggtttcctcttatattatttcatgtggcctcaggacttcagggttgatgatgggcagcttgttcttagagaatacatttttaaaaatctcagtgggcatatgcactacgctctctggccattcccttccttag

SEQ ID NO: 218426 - DNA, 370 bp, Homo sapiens
atatgcaaaaggcctaaagtacatggtgcattgtagaaacagtgagctgcctgctatgtttatctttcattattagcctttcaccccactttcctccctccaataccatagttgccaaacaggaaatggatacagatccactaaagagccttaaaaagccatgccaagcaatttagactacccccacgtggctgaaagccagtgaaacactctcaacggttactggcagatcaatttctatttcaaatatcactatgacaaaagatatattaagagagtttaggaagattaagcaggagctcattacaataatttaggagaaaaataagaacatagaatttagaggaaggaacagccatgagagatattg

SEQ ID NO: 218427 - DNA, 491 bp, Homo sapiens
tttttttttttaataatttaattcccaacacacttctgacacataatagttgtttgcaaatgcctgttacatgaacacagcagataataaaatagtataaacacaaatagctttgaaagctattctagtctttctctagtatgttgaagatctacatactgacatgtttaaaaattataaacacatatcaggagattgtgatttattgctcaaactctctcacccttagagaaaatctgaagttcctatcatggcctacaaggtcccttgagatctatcccaggggtcagtcaactatacccccacagggccaaatccaacctgctgcctgtttagcaaataaagttttatgagaacacagccaggtccattcatttgcatattgtccatggctaatttcccttataatggcagaactgagtagctgccaagagaccttacagcctgcaaagactaaaatatttactatctggccttttattttaaaaagg

SEQ ID NO: 218428 - DNA, 158 bp, Homo sapiens
actatttgtatcttgtttcagtgtttttcaaactttgtttctcctctaggtcacttgaaatgagcaaaattccatcattagcaatctttttatgtgatgctagagagattattctcccgctctcccaaatatttcattgtgtctttttcccaaatctc

SEQ ID NO: 218429 - DNA, 339 bp, Homo sapiens
ctggactggcgctgggctggacagcaacagctaaggggaaaaggaaagtaccagatagcgtcgtaggtgcgcaataaatatctgttgactgatcgaatagatgtcacctgtggacgtgttgcccgagtgagtgcatgtcccatcacagccgccagacctcccagcgacagttgcgaacacgcgatgcttgtgcattcctgcgtgtgtatttctccccacacgggagcccgactttgggaagttgaccggcatgtgccactcagggctgtggaatcccgactccgctaaaactgcagaccaagaggcccgtttcagttttcttccctttcctgttttcga

SEQ ID NO: 218430 - DNA, 226 bp, Homo sapiens
tagagaaataacggcaacatacaaggtaatgaacacatgtggcttggtcaactgcaaatctttagttttatggagtaaaaagtataaagagtctctgctacatatttccaccaaagtctggtcaatcttaaggaagcactagggaaggaagtttaggagccttgcattcactactcttttttttttgagagagagaggtagtttcactttgttgcccaggctggag

SEQ ID NO: 218431 - DNA, 195 bp, Homo sapiens
aatagggagaggtgcagtgcagcctttagtctgtggtcaaaggtccagagtcctaaagctaaaggacttggagtcccatgtttaagggaaggaaccatccagcatgggagaaagttgtaggccagaagataaagctgtctagtctttccgcattattctgcctgcttttattctgggtgcactgcagctgattag

SEQ ID NO: 218432 - DNA, 167 bp, Homo sapiens
tttttcacagaaatgctttgttgcccaggctggtcttgagctcctggcctcaagcagtcctcctctctcagcctcccaaagtgttgggattataggcatgagccaccatgcctggcctggcacttggattctatctcatgtgtagagggaagccattagtggaattt

SEQ ID NO: 218433 - DNA, 564 bp, Homo sapiens
aaggaagtgacatgacttagttttaaaagagcactatattgtgtggagaatgtgttgggaggtggaaagaatacaagtaggaaaattattttaggagtctaggcaagacatgataggggcttggattatggtggtgacaaactaaaatcctgttttgtttgcaattaatagacaatgaaaaagtatttttgaatactgatttgaaaatcttacttattttgcctccaaagcatacattttttttttctgtctttgctaaatcatttaaatccaagggttccaaactttttttttttctgcacacagtatgctagtggtggttgcttttaatattccagagctctgtagtcaagatcttgagtgtaggagttggttggggtggaaggactgtaataagttgagactagtggaaagaagaagctggtgccaagttgctgtgcagaacagggcataggtgcatactatagttccttgggaattctatgaagcttgggacagtgttgaagattctgtatggacaaggcccaccttagtcaaataggggaaaagaaagatatataaact

SEQ ID NO: 218434 - DNA, 401 bp, Homo sapiens
gaagggattaccaggaagaataaatagaatcaatgtattatactactacatggattcttttcatttattatgtaatttaggataatacctacctatttcagtttttcatttgggagcaggtatttggctagctctgatgctgtctctctctctctctctgttacccccacccccatataaaatatgtaatataacatgtatttgattttactctgagaagtactgaataattaaattgtaatagtattaggcaatatgaattaatttatgtgttgtattcagagaggttttaagataaaatctgtaagacctattttaaaagattatttcttgaaaaaggaaaaatcttattttaaaaaataaagcaattgattagtgttcttggaccaaataagatttat

SEQ ID NO: 218435 - DNA, 569 bp, Homo sapiens
tcaactatgcttaccgactctatagtgatctcacagctgttaaaataattataatgggggagagatgaaaaaggttggttaatgggtccaaatatacagttcaattgaagaaataagctctaatgtttcatattagaataagggatgattatagttaaccacaatgtattgtatatttcagaatagctagaaaagagggcatgaaatgttcccaacaaatagaaatgataagtacctgaggtggtggatattccagataccctgacttgatcattacatattctgtgcatgtaacaaaatatcacatgtaccccataaatgtgtccaaatattacatatcaatacaaaaagttataacaacttattcttaaaacatttggacacattatatttgatagtagcggtggtgaaatgtgtatttttactcatctagatgttccctaagtaaatacattctttttatctgtattcccaaggataagcacagtaaatacatacacagagagtacgtatttcaaaatgactattaaatacatgaaaattttattttgaacaactgattctttact

SEQ ID NO: 218436 - DNA, 459 bp, Homo sapiens
aggaaaatagaaatcaatgaatccaaaagttggctttctgaaatcggtaataatattgacaaaactctgaccaaacaattaagaaggaaggaaggaaagaaaaaacataaattaccctgtgaagaataagagagatgatttctttacagatgttacagatattgaaagtgtaataactgaatattatgaaaaacttgtcaatacattcaacagaaaccaaaaaataataaattcaattattattgagtcatgtaataaaattattaacaatgagaaatattgagttgtttctgcatgtcttttacatatgccgggtgcagtacttcatacctgtattattacctttaacatatgcatttcatgtatgtaacatatgtaataccagcactttgggaggccaaggcgggtagatcgcctaaagtcaggagttcaagaccagcctgaccaaaatggtggaac

SEQ ID NO: 218437 - DNA, 440 bp, Homo sapiens
tcactgagagaccgtgttgcaatgtcagaagcaacagcagcaacaaatggagatgtaatcagtgggactccagttcagaaacttatgctggtatcagctccatctattctttcttctggcaatggaactgcaattaatatgacacctgcgctgacatctacaggtgtttctgcccagaaattagtttttattaatgccccagttcctagtggtacatcaaccccaactcttgttgcagaatcattaaaacaaactcttcctcctccattgcaacacggtctctagggcaacaaagtcaggccctccaaggaaggggaagtgaagatggcctctctcgcactcccaccactgggaggacaatcttacaggcgcaggtgcttagccaggtagggtttggctcagggaggccatagaggggtccattgcaacacggtctctca

SEQ ID NO: 218438 - DNA, 1092 bp, Homo sapiens
tagaattaggcacaggtgctttgataagacacaaggatatttatccagactgggttagatgggatttttccagaatgggaaagtgaaacctgagttgaagttttaaagggtaagtaggagttagtcaaagaaagcagcatattctgaaggcctagaagtaagtacagcattgtgcttttggggaactgccaaaagtaagagttccagtgtatggcacatgtagtaggagggatgagtagtaagaagagataaaaatgaaaggtataagccaagcatggtagtctgttacgtgggaggatggcttgaacccaggagctcaaagtcaacctgggcaatatagcaagaccccatccctaaaaataagaattaaacaaggctcagttccttttatgtttcaagcaggggaataacatgatcaggcttagtttttatttagtttctgtggggccattctgttgttagtgtagactattagaggatggctaggattaggagagcctggaggcagagagaccagttaataggctgtgagtgaggcataactgagataataacatcgagaataggaagaagtacaaagattgcagaaagattaaggaaataatctagagaagattggatgctggaagaaagggaattgaaaggcttaaaaatgacacccaagttgttagttcttgccacagggtgagtggtacaataaaatagggttgttgggggagatgttaatttgggaaatggaaagaagatatataaaattttggacaagtgtagaagtctactaataagattaaggtagattatattttaaattaatactgtggcaattaaattttacagcaagtagcaaaaaagtactgctttccccagatgacatctggatgctttgctattccctccttgatgtccatagtctgtttctgtctcctagtcaaaacagtgttttgatgcgctcagccctagatcattcttactttttaaagatcttcagctattctctttgtatcatgcatcatcactaaaaaatgccatccgtctcgtgccactgcactccagcctgggcaatagagtgagactctgtctcaaaaaaaaaaa

SEQ ID NO: 218439 - DNA, 580 bp, Homo sapiens
ggtttcaccgtgttgcccaggctggacatgaactcctgagctcagggaatctgcccactttggcctcccaaagtgctgggattacaggtgtgcgtcaccacgcccggcctatcatatgatttttaatgtgacatagtaattatttaaatgttggtcatccttttctaaaggttatatctttgtatgcaagttcatttactgtcaccattcaccttactcaatttactgaaattgaggcctaagaaagtgatggcttatctaaagtcatatgttagttctggaagaacctactaggatgtggtaggaagaacatgggctttggggagatccaagttaaaatctgtaggcctctgacttgctttgtaaacttgggcaaaagttcctttacctgttgtacctccattctgtagaggtggaatagtatctgagtcatatcgtgaatttgtcatttttttaatttcattactccattcccagatgttgaatagaagtgcgataaatcagtcacaatttcccattgtgacagactcttcgttacaaaactagtttgtgtgaaatacatatgcagttgaccctcaaa

SEQ ID NO: 218440 - DNA, 405 bp, Homo sapiens
tagttttgctaggcttatttgtaacttctgtatccataaataaataatcgctgtggctttagcattaaataatatctatctatttaatattttgagtcatcatttttattgtggctaatgataatgactgggaattaacagaaaggtgacagatttctaaagatgcctttgaaaaatggctatttgcctctgtcctctcacctttgaaaataaactgtattttttaatctttattatcaatgaatattataagatctgaacactgttatgctaatatatatgtgtgcatctatcataagaaatatagaaaatatttattacaactattggcaagaatgtggagtaactggaactctcttacactgctggttggaaaataaaatgttttaaatactttgatgaata

SEQ ID NO: 218441 - DNA, 144 bp, Homo sapiens
ggacgggaaggtctatggtaccaggccttgcaaatctgaaagtatatgctgttgccttgaaagacaacagacttagttgggcatgaggttgttcccaacatttccccctgaaaactctactacgtgtggtttcattgtcttctg

SEQ ID NO: 218442 - DNA, 464 bp, Homo sapiens
gtggtggcacccacctggtgtcccagctactcaggaggttgaggcaggagaatcacttgaatctaggaggcggaggttgcagtgagctgagatggtgccactgcagtccagcctgggtgacagagcaagactgtctcaaaacaaaaacaaacaaacaaaattctaacattcaggctatacctcaggccaattaaataagaatcgctagcagtcaggcacagacatcagtactttggaaacgtccttgggaattccaatgtatagctaagcttggtattgctaccctaatacctggaggaggtaaaaacctgccttctcccttgtgttaccaaatccagttgagaaggaatcgaaagtgctgaccaatggaccccagcaagaatcaccactttcccctcccatttgagaaaagaccaaacacttgcctctctgcttgaaaaaaatatggaaatttatatatacta

SEQ ID NO: 218443 - DNA, 266 bp, Homo sapiens
actgaaatgccaaggaaaaacttaagagatgctgtagtagttaaagctgtactgtccaatatgtagtgtttggcagcatgtggctatttaatcttggaatatggccagtccaaattcagaggtactgtaaatttaaaatgtatgtgaaatttcaaagagttagtatgaaaaaaattaatgtaaccacttcaataattttatagtaattatatgtgaaataatgcttttgatatattgggttaaataaaatacattattaaaattat

SEQ ID NO: 218444 - DNA, 238 bp, Homo sapiens
tgctgggactacaggcatgagccaccacacctggcctagggtattttttttggtgtgttgctagcgtagcccaaggcagctctgtgcagggtaaagcaatggggctccgagtctggaggggtgtgtgtgtgtgtgtgtgtgtgtgtgtgtgtgtgcgcgcacgcgcgcgcgtgttatatgtgatttgtttgtgtgtgttgtgagagttgtgtgtgaggtatgtgtaagaggtatgttt

SEQ ID NO: 218445 - DNA, 673 bp, Homo sapiens
tattcattccctccattataaatttatcaagtgggttaagacatctggttattatgaggcatttattacattaagccttaaaatgtcttaggagaagatcaaatgtgaaaagggatattaacttttgtgtcactgccaaggatataaatggtattcctctgataaatttacctctggtggagttcttcctgtagcaaaaacatttcagaaaataaattttttacatttgtcagaaaatgatactcaagattagtatgaattctattttcctctttggatctgttttgaattaaagcagccatggcaatatcagggacactggaattgtaatgccactaaaatgaggatttttcagggacaagatggctatggaacaggtcctatccagtggccacgctctaaggaagtagggtcatatggtagaggatataacctctggaaggatttgattcctagcatcagagctagatagaggatataacccaactctttctccaagcatccctctctcattttgctaccccaatcagcattatggatataaactgaatttttaggcatgctaagaaagcagaaatttaggctgaggcaggtggattgcttgaagtcaggagttcaagaccagcctggccaacatggtgaaacctcatctctactaaaatacaaaaattaa

SEQ ID NO: 218446 - DNA, 410 bp, Homo sapiens
tattaaggattcatctgatgggaagttcaggaaggaatgcttcacaagcagggatgtgaagtcagcacttagcaagcagtgagcgttgggcttttaggagggaggaaacagctcgtatggaagaggagagttattggcttagcaaagacaaatagctttgtggggctagagggtttataggaacagtgtcagatgaagctgaaaagtagattggggtcatgcttttgtttttctttttgttttttgagacggagtcttgctgtgtcccccaggctggagtgcagtggtgtgatcttggctccttgcaactgctgcctccggggttcaagcgattctccggtttctgcctcctgagtagctgggattataggcatgcgccaccacgcctggctaatttttagatttttagt

SEQ ID NO: 218447 - DNA, 405 bp, Homo sapiens
tgtaatatgctatttgcaacatgtatcagacagatttactagcctttagaaatccagtattcatttatggcccccagcagattatatgtgatgttataataacataccttctaggaatctgagtctatattacaaaaaaaagaaaagatttttctagatacctgtcttaatcattaaatgtcctttcctaacaagataaaatattacctcattatttagaaatttttatttttatgaacaatttactttgaaaagcattactccgtccattttatagctcatataaatctattttaactaataattcattcactcacaaaaggctgtaaagctcagtatttaaggatctgatttttggagccaaattcctttgaatcctggctctatttcttctgagccatgcaa

SEQ ID NO: 218448 - DNA, 205 bp, Homo sapiens
gatggaaatataaatgtttgtaacaaatatacagtaatctgtgtttggataaatatcttttagtgtattggtgtggctaaatgtcagaatgaagttaagatagttgtattactagttctgtgtgtatacagatttgtttatgtagtatatatacatatgtaagtgaaggtatatgtgtgcaggtattaatcaatggatatggcag

SEQ ID NO: 218449 - DNA, 480 bp, Homo sapiens
aaacagtatgttctctgaccataatggaattaaattagaaatcaataacaataagatatctaaagaccacaacgttttgaaaattgaacaaaatacttaaaaatccatgggtcaaaatttaaaaatcacaagagaaatcagaaaatatgtaaaactgaatgatgatagaaatacatcatgtcaaactttgaggtatataaagtgtactaagagaaacgtttatagctttaaatgcatccatttgaaaaaaaggtaaaaaaatcagtgatctaatgttccaacctaaaacactagaaaaagaacaaaacctaaagtacaaggaaggaaataataaagaacataaatctgtgtaatagaaaacaagagaaaattaaggaagccaaattcattttttgaaaaaataagtcatcactaatattttaccattcattctatctctgattttgtctgtctagctagaagttgatccattttattgat

SEQ ID NO: 218450 - DNA, 516 bp, Homo sapiens
gagaggtcgtcaggcaggtgtgcagacaacgtgagtggtgagcctcacgcccgaggaatccgctcttcctgctggacgcgtggatggtggtgacggcctcgccgcagcagcagcacctggagctggcccctgccgggtgggtggtctccatggggctcatggcatctcgggggtcttggggggatgtcactctggtgctccgtttgcaggtacaaacctgccattctaggagctgactgatgatcccggtcctcgcccctgtcctcacacccctgagtggtcaggcaggggcttcactcggctggttctggcctccgtgctaaaatgaatgaataggacaggacagtgaggaaaacgcacacctggggaagtgacctgggaactcaccacccccacccacctccgggactccgacctcccagggcctcagccaggccctgccctcttcagcacattggaaacacctgcatctacccagtgtgcgctaggatggcagctctccagcctccatcctgc

SEQ ID NO: 218451 - DNA, 816 bp, Homo sapiens
catgaatacttgacatatttctctcatcactaagacaacatgccagttagtcaattaaaaaacaaaaataaatgtatcaaaccacgtggtattatgtggagaagacttgatcccaaatgttcccttttctcgaagttatttgctgttgtccatactatccacgctatccaagtttacctggataaatagaatgcaatcagaattatgttgaagctaatttattgataaaatatataccaaaatgtattacaaacataaaacttcatgaggtcagtattattaatttcaaattttgggtttttttctaacattaaattattcaaaacttttatttaaaaatgccacattcaggtaaaaggtagtagatgggaaaatttcagcagtagatatttcagaatacaatggttgtagaaaaagggattatgagtttatttatgtgcagatatacagttatgtttttaaaatctagattataaaactgatataaaattcgagtttaacaacatatcttattaagataagaatcttaatgcactatgaaaagaaaaacaaaacaaagcccagataacaggtttcttttggtagtgatctacaaggtattagggatatgatttccctcttgttctgctgtctctctgtccctcagtgattacaggtagagcatcacttcaataactcttccagtcagtattggtggtgacagccagtctgacctgaaaagaaaccaataccccttcccaacctggaaatgctggtaatttatttcaccatccccagcttccctatatttttccccatcctaccagcaaactttgt

SEQ ID NO: 218452 - DNA, 458 bp, Homo sapiens
gctcaaggagtcaaaagtatttattggtcacctgtgcactgtttacagagctctattctaggggctgagtggaggagaaggaaaaaaaagaagtcactagttcctgccttttaagatagctggagacacatgcagagaaaaatagctgaaggtcacaaagagcaaagcaagaaatcaactgcaaataaaatcaatataattcaccgatgtgtaataaatcgggagcaccaaggggaagtcaactgcaataagggatcttggaggaggtaacttttcaaggaatatgaggatatgaattagcactcaggagaacggaatgtgcatgtcaacagaattaaatgccactgtgtctcatattacccaggtacagcgggagaccaaaaggtgaccatgctgtggacccggttttccagaagcatcttatctagatgtggcattcgggacacaacaaaacacag

SEQ ID NO: 218453 - DNA, 221 bp, Homo sapiens
caggctggtctcaaacttctgacctcaggtggtccgcctaccttggcctcccaaagtgccaggattacaggtgtgagccaccacacccggccacttctgaagttctaagaattcataagacttgtaatcaaaatcatgaatcatggttatgaatttacagttttaaatacttagaataaaaccagaaattattttttctcacttcaagtcaatttaccaat

SEQ ID NO: 218454 - DNA, 155 bp, Homo sapiens
aagtgctttgctgtcatggagcttaaagtatagtgagttaatgagaaactgatgccatgtgtggaaacatctctttgcatttaatttaggtcttagttaagatagaatcttgtctcattcgtagccaaagtaattgtgtggtaactgaggaaata

SEQ ID NO: 218455 - DNA, 266 bp, Homo sapiens
gcacaatgaagtgtggattttgttattgaattggatggcgaagcattgtgtttattatgtgatgacactgtatacccaaagaatgcaattaaaacattaccatactaagcattcatcacaatattcccaactcacaggaaagcacgagtaataaaaaattacaaaacttaaaatgtaatacctcattacgacagaattttattacaaagataaaaatgagactgctagtatgaccttgataccaagactaaacaaagacagtgtac

SEQ ID NO: 218456 - DNA, 541 bp, Homo sapiens
agccacgcccccacacctgggattccagggcctgctcttctctgctggactcccagactgcaacccagactgcactgttagaaaccagagaactgcatgatcatgaggatgagtgggtgcctgtgggtcttcaagacatggcatccacctgccgtggaccagtccagtctgcaggcgtggactctgacagctggctccacccagtattcaggtctcaacctgcaccctcactgcccagaacccagccctttttttctgggacctgccacactgccagatcttgtcattccccttccccagagatgactacactgtcttcccagtccactggctggggacctgtgctatgtggctgcctctcctgcatcacaaccatctgcctccatctagagcatctgaccaggatgtacagcccacacaccgttaagcctcacactaagctcactcaaattacgatgtgcatggtaaaacctacccaaggtacttctgattgtcaagaaataagaaataaaataagacgggccacagaaaagtggttata

SEQ ID NO: 218457 - DNA, 261 bp, Homo sapiens
ggaaattcatagcaaccaatcaaaacgggcctggtttacttgatttgccatgctaaagaagttccctctattttaaccctataagaaaagtaactttgaaacaaccaatctgctttttgttctctgtttctgctttcttcagcctgtttctgtctataaagccaattcctctgctcagctcatcggaacactcattcttgttttatagaatgcagtgttgctcaattataaaattgcaaataaaaggcaattaaagtattt

SEQ ID NO: 218458 - DNA, 192 bp, Homo sapiens
atggcagagcagacttgggtggggcggggttaatactcacagctcatggagctcagccaggtcagtcaggaactgtcctgtgatttttttttcccctttcatgagctatgtgcaggaataccttttttttttttttttttttttttttttgggaaaaggggtacccataaagtggccccaacaccagaggga

SEQ ID NO: 218459 - DNA, 130 bp, Homo sapiens
cctaggacctcaaggttgtgtctaagacataatttacagttctcgtgtaggtcttccaaatacttagctacacagctttggggcgttttctcagccaaatacttttctttagcccttctgtcgtcttctc

SEQ ID NO: 218460 - DNA, 675 bp, Homo sapiens
gctcccggcggggaaacgtttccaatgcctggagcttttgtttgatagcgagggaggtgggtacggcgcttggtgggggtgaggggagcagaaagagagagagtttggtccccaagtattgagctgtgagagagcaggggcaactccagggccagcattcagagcggagaattagagctgcgcacgccccaggtcggatgcgacaacgaggtccccgggcctcagcagctaggtgacactgggcaagtctcagcagctctgggggcctcaacgtctcaactgtaaactctgggcacgcggctagcgccaggtcctctccagccctaacattctgtgattctaaacttgtctgatttgtctcatatgttgcaaggctcgtagcaaaaagaaaaaaatactccataactatttaacaggaattagctaaagcacagctctagagagagagacacacacacacgtttcaaataacccgaacactagaacctagtgaattttatacctttactaaactttagcgattatttgtttctttcgtaacaaaggttattgattagatttagtgctgaaaaaaaccaacaacgtgcgcttcggtcatttgtcttatggaggaaacataaatctataaatcttcctcctgtctctaagaaataaaactctcttcatttccaaagt

SEQ ID NO: 218461 - DNA, 764 bp, Homo sapiens
ctggttgctatccctgggggtgctttgcactggcctgtaccctttgaagttagatgtgaccatgtgactttcttgagccaatgaaacatgaataaatctgatgtgtattattacagatagaagctttaagagccagtgacctgcccaccacattctttcccccggccctggcaattgtgcaagcttgtttataggaaaaggtagcctctgccagccggggcccctgtgtgaccatgatgagtagggccctccctagcaattgtagttggacttgtagcatgaatgagaaatccagtcctgagattgaattggttgttactgcagtataatctaacctctcctgtctgataagaaatcagatgtttctgtatatatcaacttccagtaaaagaaaaaatcataagattctgctcaaactaagtgacaatttaaaaataagagcaagatgcatattcagtatatctttaaggcttgaagaaatagaaaatattttaaaaagccacaggtaaagctgacaaggcaattcaatggggaaagaatcgtcttcaacaaatggggctaggacaatgggctatccacatgaaaaagaatgaagttgaacccctgcctcacaccatatataaaatgtaactcaaagtggatcaaagacctacgtataagaggtaaagctacaaaactcttggaaaaaaaatacggcagtaaaccttcatgaccttggatttggcgatagtttcttaaatatatcaaaagcacaagcaaccaaa

SEQ ID NO: 218462 - DNA, 440 bp, Homo sapiens
gctaagtctgttttcagagccccagatataccccattcataggtaaggacaaaatacatcccaaagcagagacaccaatggccttggggacatccactgctgtagtgagctgctccactgtcagcttccctaagctaagatattcaagagtgggtcagccaggcacagtgactcacgcctgtaatctcagcactttgggggtccaaggcaggtggatcacctgaggtcaggagttccagaccagcctgaccaacacggagaaaccccgtctctactaaaaatacaaaattagctgggcatggtggtgcatgcctgtaatcccagctaactcgggaggctgaagcagcagaattgcttgaatccgggaggaggaggttgcagtgagctgtgatcacgccattgcactccagcctgggcaacaggagtgaaactccatctca

SEQ ID NO: 218463 - DNA, 831 bp, Homo sapiens
ggtgttccctttgtctatgattgccctggggcagaggatctaccatttatatgtacacggcctttgcctagggcggtgcctggtatttggggagaaaaataacaaatacttgttgaatgctaagtcataatgatttggtgtttccctttgtcttacctgtaattctaatgatgtcctattttcttttcttttccatagccatccatctaaacgtgtcatggttagtgaatagtgagcacatattcaaacaatgttcaaaatgggaaaaacacaaaatctattaactgtctctgtcttcatttaggaataattctcgttttgaggagcaaagtgctttcctaatcttcctatgatgcaccttctctggcactgccccgtaatgcaggggcatggcggcatgctttcttgcttgcacactcactctcctttttctttctctctttctccccatatgtgcagtgccaaactacagttggaacactatttccagttttgttcagtatttggcttccctacggcattagtatacatacactttgagacacaaggtgtgatctcaaaccaaatttgtgtcctctttaaaaaggtagcacagatactagctgatgctacattccttttccttagacaaacgttttacttctcagatctttaaagaattgttggattgcagaagtctagacttagcgttcattgtatattttagtctcctggaagtgggaatttattttgaatggaatagaaaattaggtaatcactactaatctttgctggcttacctgtaaaatctgtggtctccataaatactgggaaaataaataggtattttta

SEQ ID NO: 218464 - DNA, 486 bp, Homo sapiens
aaggatttaggtagccaacttaatttattatatctggtcggtcttctgcttgaaacagattcacactcaacacccaactaaggaggagccaaagtagtggagtattcctgacccaaaaaggcttttgaattttgaaacatttctaatgtgttaggttttctcaatgagaccattaaaaaacgttgtgttccatttgagaaaccagagtcaacagcagtaaatcagtgtgccccacaagccacgtcttattcagcaataaaatagtgctcacatggtgcctggcagacagtggctctggacagcaaagcactgagtcacccaaccccactcctttgggatggggttgggagtcatgcattggctccctttttcatcctggggaaattacaacacaacgcagagtgtccagaaatctaaagagctggtttaaggtgaaaaaaatgccatgaatgaatgaaccagatgtttaataaatcaaaacaacta

SEQ ID NO: 218465 - DNA, 282 bp, Homo sapiens
tgttcttaacgaccatactctcttgtaacaggcatatgcctggtgctttcctgacatcagttcatttaatggacattaaacaagaaatagattgcttgatatatgatgcagctgaaaaaagccagacatgactaagacagagatttgagacactagctccagcaatagctgtgttaacttggcacattatttaaattctctgagctcaggttcttaatctgtaaaatgagcttatctgtatctactcttctgtttgacgcagtgattaaaccagcttgctcc

SEQ ID NO: 218466 - DNA, 293 bp, Homo sapiens
agtgaatgtggcctgagaaataagattctccaaaatttttaaaaattgttgcatgaataaataatcctagctgcttatctgtagtttggagaactctagaagtgctataaatttgggctatacgtctaataataccaaatatcaagagtttctcccacccatatatttttattgtattttcaaggatgtcactgcttcgattatcctctccttccaggatcattaatctctcccaatctactggtttactcctgtgagtatccaacatggttaaaaagctcccactattgaaa

SEQ ID NO: 218467 - DNA, 304 bp, Homo sapiens
agtgaatacctttatataagattcttgacatgacaaaattatgaaatggttgcccggagtcaggacttggagttggggatgggtgcggaaggagtttggttgtgtctatgaaaggacaacagaaggcatccttgtggtgatggaattgttttatattttgactgtgttaatgttaatatcatggttgtgattttgcatcatatttttgcaagatgtcactactatgacaatgtggctagagagtacatgggatctctatgtattatttcttacaactgcatgtgaatctacaattatctcaaaa

SEQ ID NO: 218468 - DNA, 453 bp, Homo sapiens
ttaagacttcatgggtaggtagctatttcctcactaaatcactccctttaagccatctctttagagaacaatgtgcacgcctgagggtttacaatttgaattaacaacgaaagaaacttaacgattgggttactgtgctaagggaagctggtgacatgtgatcccatgctgtgcaagattccactgggcaagcatccaacacaggcccattgttcccagtgaagcactctttcaaactaaaacaaaacaaagcaaagcaaggcaaaaacaaaacaaaaacaagaagcacccagatagcccctgaagccatttaaaatacttggaagtaagactaaaaaggaagccccaagacattagaacagccaggttgaccaaaagaaacacctgcccttacctgttgaggcacacttccacgctggattatattctagtccatccaagcagtgtctacaa

SEQ ID NO: 218469 - DNA, 559 bp, Homo sapiens
cagggggatcgcttgagcccaggagtttgagaccagctctggcaacattgtaatacccagtctctacaaaaaataatttaaaaaaaaattagccagggatcccttgagcctgggaagttgaggctgctgtgagctgtgattgcaccactgccctccagcctgggagacagagcaagaacctgtctcaaaaaatatatatatgtgtgtgtgtatatatgtaaatatacacacatgtatgtatatatatgtgtgtgtatatatatatatattatgaaaggaaatgagtattgtaattttaggagttcagagcctggggagaaaggaaggactctggaaggcgttctgctttttcatggcctgggtagtggtggagaatttttttgatactgtatatttatattttagactcttttttggatgtgttatattctgcaatttttataaaagctaaaacacatgtatttgtaaaaaatttgcacttatgaaatcatttacccatgtttttgcttaagaaagtactagaacactaccactattccaataattacacctttatctt

SEQ ID NO: 218470 - DNA, 610 bp, Homo sapiens
aaatcagtttaggagaattgacagcttaacaagagtgatttttccagtccacaaacatagtaactctctgtgtgccatcttaatacctattaactaggtacgcattcctgaacatctacactccttagattgtagataaaaagctaccagctcctttcttcctggatcccaaaagccttcttcacagcttctgtttcctgattttctctcacatccctgaataactggcgcttcaaatgacttgtaggcctcaacaggataaaaatgtaagaatacaacacggcagccccaacatccacacaataagtgatgcacctatagagtaacagcagaggagcggggtggttttctcaaaccctcattaattaggaataatattaaaaaccaaaagcagaaacaatatgttttccttttaggaaactgaggtgttctgcccttggattattagatgcagttctggctaccacaccataaaaggaaataacacagttgaagaaagcccaaggaagggtatctatgacggccaaaagaatgaagagacttttttatggtgacagacccaaactaaaccaaaaacttttcagatgaaaagggacatggcagcagcctt

SEQ ID NO: 218471 - DNA, 411 bp, Homo sapiens
ccatgtttttacacgtgtgtgttcagttcccttattacttctcccagccctagacagtgggggcaggtctgtggatagaacagatgcaagatatgtgttgagctcatttctctcagtataactatgggactgggctcacacctgttatctcagcattttgggagaggctgaggcaggcagatcacttgagtgcaggagttcaagaccagcctgggtaacatggtgaaaccccatctctataaaaaataaaaaaattagccagccatggtggcatgtgcctatagtcccagctactcaagaagctgaggcaagagaatcgattgagtccgggaggtcaaggctacagggacccatgattacaccactgcactccagcctgggtgacagagtgacaccctgtctttaaaaaaa

SEQ ID NO: 218472 - DNA, 393 bp, Homo sapiens
atgaaagaaaataatgtgggtcagtaatttagcgtggtatcaaagaggtaacattgaaaggcttcctaaaggttgagtaggaactgtccagctaaagaagagagggaagaacattctaggtagagggaacagcaaaccctgaggtgaaaaagaggtttcaagttagaaaagctaaattaaaagcaaggagagtcgtttgagatgaggcaggagagaagtttacacaggacctcatggtccaaagtgattttagatattaatgttacatgctgcagggaagaagggaagtgacaaaattatatttgctttctaataggacactctgggtgcttggtgtagaatgaattaaagcacagcaagcaacaaggggggcacttagccattcaatagtcc

SEQ ID NO: 218473 - DNA, 225 bp, Homo sapiens
ttgtacattttattaagtgaaatagctattttaaaatttaagaataaccactaaatgtttaggaatgtattaatagtatgtaatttttcaagctaataaaaagagaaaaagcagtgagaaaaaatttttaatcctacgcttagtcaatccaaaagaaggaaacagaagaggaaaaaagaaaaggaaaggaagaaacattaaaaatagaatgagtaaaatgtctac

SEQ ID NO: 218474 - DNA, 446 bp, Homo sapiens
aatagctagcctcctgaggcttggttaacagatggactgtcagctgagtacaagcaaaggaattaagataatgaacacaatctttaatcagaatgaagacaatggaattgaaagcccattcttaggcttgatggttccaaaccttaggaagtgaattattgagaataattgtatcatcctttaaaatgtgaaacgttaaaagaagcagatctggtaagttgaacgttcaagttcaatttgaacattctgtataaaatgagaaccagcaaacgagtctcctataaccatcagctgtaggatgacttaagtcaggctctctagcacatttgtgaaacaatctttctgtaaatggtaagagactgggacatcagtgccattgcccagaggcagcagtcttgtctgttactctgggaatattaaagctaccaggaaaactgaaggctgtg

SEQ ID NO: 218475 - DNA, 643 bp, Homo sapiens
attgcttaaggccaggagttcgagaccagcctaggcaacatagtaagaccagtctttacaaaaaaaagttagtcgaatgtggtggtgagcatccgtagacccagctattcaggaggctgaggcaggaggatcgcttgagcccatgagttcaagaccgcaggaagctgattcttaccaccgcactctagcctgagtgatagagcaagactctgtctctaaaaacaaaaccaacaaaaaacagtgaagtaaattattttataaaacattgctacagatatctgctgaataaaatcaaattttcaaaatagggttttgttttggttttggtagagcacatctatagtagatattaataccagaataaattataagatatatatgccattttctgataactcaaaattaaatatctaaattttaatcatcagagaaatgctaatagtgttgagacgaaatattttttcattgctagaatgtattcttccagatccattgccttaaataagttactgtggcattacattagcttttgaaaggtggggattataacgtcgtagtagtccatgggtgccatgactctagttaagagcaccctttctgtagaacttactctttgtattgaacttgaggtttaaaaaaaaaa

SEQ ID NO: 218476 - DNA, 1320 bp, Homo sapiens
gcgggcggatcacgacgtcaggagatcgagaccattctgtctaacacggtgagaccccgtctctaccagaatacagaataatacaaaaaattagccgggcgtgttggtgggcgcctgtagtcccagctactcgggaggctgaggcaggagaatggggtgaacctgggaggtggagcctgcagtgagccgagatcacgccactgcactccagcctgggcgacagagcaagactccgtctcaaaaaaaaagaataatttctttaggtctcacacagtgaaaagaactcgcaagactaaagacccattgataaactaacttatctgtttctcagtaactacctagaaagatttcacttggacatgcaaaggaaacatgtaatctttaagaaaaaacagaaagatcctctttcagcatggggagctgaaaaaagaaaaaaccgaaagactacaaaggttttactttttattgttgttttttagagacagggtcttgttctgtcgcctaggctgtagtgcagtggcacagtgataggtcgtgggagcctcaaactcctggcctcaagcgatcctcccaccccagcctcccagagtgctgggatgacaggcatgagtcaccacgcccagcctataaaggctttaatcttagattctatgtattttaaatggtaggatacaatcccaaccagaagctaactcttggaaatttcacagctgataaatagacatctctgcttcagaatctttcttaactgaatgttttcaccaaatctttctgagctactgatcttcacttgatcttaaaataacaaactgatctgaaccttaatgaactgctgcatgacctggtgtttctatactgctaatgactgatgcaagtagacacatgagtgatgagctgtgacaatctatatcaatcattacacaatctagttcacttactgcacataatcatggtagaaaataaatgaaaacaaaattttaaggtataaaaaattagtgtacctcattattatttctgggtaaattttttgtcttttaaaaaatagtgcctaaaacattgtcttatctatgtgacattcagtgactactaattgatggttattgtgttgaattactcctattaaatgtgggttccacatacttggtttcaatttatacattccatggaagaatagacatgttttattatcatcatctcttggcattttttttcaggataacagacaatggaagtaggataagtgtaaactttttgaagtatgttattaatgttatttgattttaaataatgaataaaagaatgagaatgagaactatgatt

SEQ ID NO: 218477 - DNA, 362 bp, Homo sapiens
aggttaaatttttctctaggttttattggccatttgaatgcccttctttgtgaaccttctctttttttttgtcaataaaagttgtattgagatgtgattcacatactgtacaatttatccctttaaaatatgcaattcggtagtttttagtgcattcacagagttgtgcagccattatcgtaatcagttttggaacagtggtcatcattccccttctccttcttagctccaagcaaccactaatctactttccgtctctatggatttgtgtattctggatgtttcatgtagatggaatcatgcgatgtgtgatcatacaatagaagactggtttcttctatttaacataatgttttcaaggt

SEQ ID NO: 218478 - DNA, 375 bp, Homo sapiens
ctagatcaaaggctgaacattttgctttagtatagatgagggaaatgagcaagtcctaaaaggtttgccctgttacggtgtttcatcactcatactggaaggagaaggaaaggagccatatgactcatttaaaagaaaaactgtaagtcaccttaaattccctatgttttacttcattttttccctattgaggttgttacaggtcatggttgataatagttggtgttgaatgaatgtaatccattatttaaaaacaggtacatttaagtgaaaagataaatgtaaaaagctgttcatatcaaagccaaatagaaatgatttttatgcttataatttacatggtgcaatatatctttttaatttgtttacttttca

SEQ ID NO: 218479 - DNA, 367 bp, Homo sapiens
aggcatcctgtaaaaatcaaatatttttctttttaagtaagaggaagtgcttcacttctcattgtgaaacattaggacatgttcaatgcgatgttccggaagaatggtaaagtgtaatttaatgatgcccataatcaggccatggaatgtgagaagcactgaaacatattcagcattttgcctttgacagtatcagcaattattttcctcccaagacatattgagaacacatataattaggtcatttgagaaattaaacgagggcaaacagcactgacaacataaatgtagctcttattgcccacatctataaataatttaaagcatagccccaccagatgtcatcccactggactactattaaaaa

SEQ ID NO: 218480 - DNA, 681 bp, Homo sapiens
tggtacagaagataggagacaaaaatagtagatgatgtgtacaaaggacttaggatacataagtcttggtataaactatatcagaatgaagaggccctttttaatgttcagcattgttactgagactaagaacaatcttgtgtcagcaaaagacagaggtttgggagccagacacatttggtttcaaatctaggctccatcattccttcctctcctcctccagtaaatatgtattgagtgcctgctatgccataccctgtgccgaacatacaacagtgaatgaaacagagcttctgctgcatggagcctacattctaatgagggaagacaaacagtaaacaagtgaataattaaacatatatgccaattggcggtaagagcagtaagcatagtagggagaatacagagggccaagaagtgattgcgcagcaattgctgtaatgtgcagagcacaggtgttgggggacaaggcagaagcagagagggcaggtaggagactgttgcagtaatctaggcataaggtgagggtggctcaaagcggggtagtcacagtggaggagactggcagtaattaaattccatggtattttttaagtctagcaaacaggatttcttgatggagcagatatgatagacaaatgaggaatcaatgatgattccagggctttgggtttgagccaa

SEQ ID NO: 218481 - DNA, 354 bp, Homo sapiens
aaggttttcccctataaaaaaaaaaaaagcagtaaaataactttttaaacttccctcttccataagagctacttccttcctcatctttatccttcccatctcttctaaaaatacaaaaaaaattagcccggcgtggtggtgggcacctgtagtcccagctgctcaggaggctgaggcaggagaatggcgtgaacccgggaggcggagcttgcagtgagccaagatcgtgccactgcatccagcctgagcaacagagcaagactccatctaatttagtgtacaatttgagttttgacaaatatagttgtccaatctctaccaaaataatgattttgaacatttctatcactcctc

SEQ ID NO: 218482 - DNA, 257 bp, Homo sapiens
gctttctgtaatcagatctttcacaaacccaaattagaccacactcttttttccttgcttatttcagtcttttatattcccttttgagaactcccctggctgttgctgccatcctctctcattttctttctcaccactgttactgcaactgaagttgcatttcatgcctcacctatactgaatttccttagtaacttgaaagttccatatgctctcttatctcttgcttcttgtccttcttccccttcaccttgctc

SEQ ID NO: 218483 - DNA, 322 bp, Homo sapiens
ttgtctaatcatttaggagccaaaaggaagctgacttagacaatagaccctaggtaattaaaaaaacagaaaatagggtttttcatataatttaaaagagcatatgatttaacttagaagagtaaataataaccgagaaaaaaatgtttttttgaatgttttatcatgaatgaggaacatgtgaaaaacccctgagctgaaggaaccacaagcccgcaattgtcctggccttgcagcccttctcctgcagggggtgccctccctcccactcctctctagatgggagccgaagggaagaggtgaatctgagttgagaacaaca

SEQ ID NO: 218484 - DNA, 451 bp, Homo sapiens
agagggccctcctttcgtaattcctggggaaggaactggagttctttcccttgggtggctgcttgaggggagtagcatgaatggaggcgaagtcaagcaatcagccaattagcatttatgcatccaggataaaactactgttacacaggagagaagcaggaaagaatgccttgaccccattgctcagggtggcacgtgggactgcttttgagtaatccctcagtctaagacccataccacagaatcctagagccaggtgggactccaacaggtcaccttctccatccctccctgctccatcccaggaagattacagtctctgttaaaactctgcacagtggaaaaactccatagtatccctgggtaagtccttacagcaccatctaacgcttatagttgcggaagcctcctttagcatctaacctaaatccatcctgctataaagaaagca

SEQ ID NO: 218485 - DNA, 145 bp, Homo sapiens
ctccttaaattaagaagtgagtccattaaggtcacagaatttaagataaacacaatcaaattaattctatttctatatacagacataactcattttatcgttctgcaatttattgtgcttcatagatattgcatttccattgtgt

SEQ ID NO: 218486 - DNA, 425 bp, Homo sapiens
ttgcttgagcctgggtgtttgaggctgtagtgtactatgatcatgcctgtgaataaccactgcacaacatagcaagaccctatttctaaaagaaaaacaaaaagtcttttatctcctggaactctttaaatatttctcccctctgtttaactaaggtatgtgataagagggtcttttctttttcccttttacaatatgtttctgggagactgaccaggaatttcacctaaatacttcccattggtagagtaaagccagcattgcagccttataaagaacattctgagattctcagcccaagtgagggaaggaagactgtcttgtgctttgatatggtttggctctgtgtccattgtaagtttcctgaggcctccccagccatgcagaactgtgagtcaattaaacttcttttctttataaattac

SEQ ID NO: 218487 - DNA, 443 bp, Homo sapiens
ctcttcagaaggagcagctctggcagactgttgccatgtagtcatgtactccaagagcagttctaagagataggggattgagacctccatagctcctttagcaccaactccccaacctttaagataccccaaattgtataacatatatatattcatactcatatataatatgaattatacatattttatatatagtcataggccacataaggacattcagtcaacagtgggccacatatgcaatgtggttccataagattataatatattttactatatcttttttatgtttggatatgtttaggtacacaaatacttactactgtgttacaactccctacaatattgagtacagtaacatgttgtacaagtttgtagcctaggagcaataggctatttcatataacctaggtgtgtagtaggctatacacatctagcatact

SEQ ID NO: 218488 - DNA, 507 bp, Homo sapiens
ttttatatttgtagtagagatcgggttttgccatgtgggccagggtagtcttgaactcctgacctcaagtgatccacctgccttggcctcccaaagtgctaggattacaggtgtgagccactgcacctggcctctttgtttttttttaaagttgttttgattattctgtgtcacttgcattttcatataaattttaggaatgccttgtctatttctttaaaaaaggcaggaattttaatggagattgtattgaatctataggtcaatttgatgtagtgttgtattgccatcttaacaatattaagttttccaatccatgaacatgggatatctttatttaggtcttctttaatttatatcaataatgttttataatttcagtgaataagaagtcttgcatttattttgttaaacttactcctaagtattttattcattttgatgctgtcccaaatggggttgttttatttcatattcagatttctcattgctagcgattctggtata

SEQ ID NO: 218489 - DNA, 415 bp, Homo sapiens
tctctcctttccttcctccttccttccccaggaagtctccaaaccatccctgttttgtgtccaaagcagcactgcagatatctcccctccctctctcttcctgtttcttctggcagaccaggaggaaagggacccaggagcccaagatccaaactcccagtagtataaacactggatgttctgtggtgcgtctgccacccactgcagcctcatctgtcatctggttgtcctaaggcttccaccttccccactcagccaggggccctcccttggagaggccgacctcaattgcttagactaggggtatccaatcttttggcttccttgagccacactggtagaagtagaagtgtcttgggccacatgtaaaatacgttaacactaacgatagtggatgagctaaaacaaaaattgc

SEQ ID NO: 218490 - DNA, 606 bp, Homo sapiens
ctcaggtcactggaaatccgcagcaattcagggaagaagataagaacaacagaagaacaaccaccataggaccaggaatacgtactaggtccagtgttgcacctgcaggaggggaaggatcattagtgaaagctgggccactgccacccgggttcacaatgcctgcctgactgaggctaagtataaaggtcagggcatgtactggttcttcatccctgctatgctggcaagcatcaagtaagaaactttcaaatatagctacaagacacaggttctctctacagagtggtacaaaggagaaatctaagaagagaacacaaagaggagcaggctttggtaacccccacttaccaaataagatatactgaaaaaaggtaaggtgaccaagaagaatttgaagcctctgttgtactgtgggtaaccatagcaacagcaaactcaaacccagtccaatccctatttagatgaacacaaatccccatgtgaaaactatttaccttattctctactatcctatacacaactgtcagatttcaacaataaaaggagaggcatacaaaaagacctcaggcacattgttagaaaactgattatgtaaattatacg

SEQ ID NO: 218491 - DNA, 290 bp, Homo sapiens
aaatcaaagttgggccaggcatggtggctcacgcgaatcttgctttgcagggccaaggagggaggatcacttgaggtcaggagttggagatctagtgagactctgtctctacaaagaatttaaaaattaagctgggtgtggtggcgcgtacctgtagtcccaactactcaggaggctaaggcaggaggatcttttgagcccaggtgtatgaggttacagcaagctatgatggtgctactgcacttcaacctgggtgacacagtgaggtcctgtctctttaaaaaaaagaa

SEQ ID NO: 218492 - DNA, 475 bp, Homo sapiens
cactcagctctgcaaactgtactagaggtgtttcaattcccttatttctctttcatcactcaaattcctacctcttccattaaaaagtatgttatacttttgacagtatttttacttactggtttcaggaagttagaaaaacagagcctgcccctttaaaaccagaggtagagaaatgcagggataattaaattccaagtagatacaagtattcagaggcaatgccagtgagcaaagatcatgttactcacaatccttttaaaaggtaagtcagaaccacattgaaaaaacaaaacacaaaagctggggactgtgaagacagaggacatgagatggaaatgtctacctaaatggaagaaaccgaggcaagattaacagtttatgtgggccaaggctgaggactgcagccagagatatacttctaagttcaggaagtgctctagagacaaaagaggggctccaatttctaaagaaa

SEQ ID NO: 218493 - DNA, 434 bp, Homo sapiens
acccagaagttgccatactgccctggatgggacgcaagctctgaagcagtgactaatttggagaggctggcccacagcagaagatgcagggccggaaaccaaggaaggcaagggtccctggagacagacaccccacccttcttcctgttccagtaccaccaggtggtggacatatcacctaagctcggacagctgaatcttccatcctgggacctgaacccctggcgctcactggatacccagataaagtgctcactggatacctcactagctcctgggacagtgccatggccagtctcccatcacacaccttccggtggctcctccactcccaggagtgagcctggatgccatcccttccctagcctggttccccagccatcccatcaattctgggcacacctggcccccttccaataaattccctttttgct

SEQ ID NO: 218494 - DNA, 298 bp, Homo sapiens
tttttaaatcattttttctaaaagagagaaaatggtagaggattcttgacagacatgagattctctcattgcataatctttttctataccatgttatgcttttttattttctctaatatgcatgaaatgtgtaagggataaaatctgcattctcgtggaaagattatttttatctagccccatatcttattcattaattttaacctagaaatcattttggagaacagccaaacactcagctgctctttgattaaagagaaatttgggactggttggagcatgacattctagaatccca

SEQ ID NO: 218495 - DNA, 572 bp, Homo sapiens
tgccttaaaaaatgcaccaattatcagcctgaccattttaatataaaaaatgtttatattatagtataaattattaatcaatctgccacaatcattactttagttaaaactgaacgtacttgtggctagcataggaaaggagacattttcatgttaacgtgaatttttttaacctaaattattgcagcctattgatcctagatctgaatcttcaaagaaaactgatttatttcattaattggaatattttaaccagagaagtctatcaagttggggtttcaacctgaatgaaccttttccatttagaaaattgatcttccagtcacacttttatgaaccttgagcttttagagcatggttgcttttaaagacagagagatcatctccagtaacatcttatatcattgacaggttggagtatggatgttagagcaaactaagtttgtgatatataaccacccacatacagacaaaatgaacaaggcatatatttaaatatgcaagctagacaacatgcagagcagtgagtaaggagtaaatactgagtcacccttagaacataatatatgctg

SEQ ID NO: 218496 - DNA, 429 bp, Homo sapiens
ctaaggcctcaatgtgttgcttaaatatcaggatctacaaagaccttgaactgtctttgtgagcccctggtcccaccgcactccttgtagacaggaggcagaccattgcagtgggtgatacccagcctgcagcaaggccagcgctcaacctattgctaccaggaacacgtactctcaggcctgccagaggccaccagacagatgtaaggcatctccccctgaagtggccccttttttggatggtaagcattttaaaacatcagttttacattaaagtaaatttggacgtattacttgcatgaaagcaaaattcacgtgaatttgtcaaggtaaactggagattctaaagctgtgttggcaaactctggccccagggccacctggcccttcacctgtttttgtaaataaagttttattggaacacagcca

SEQ ID NO: 218497 - DNA, 415 bp, Homo sapiens
aattaacatccaccattttattctatttaaaaagttaaatgaagccaagatactggcagcacttgaaggctgtcccctcctcctatgccctttgggatagccccaccctagggactgggcaagtgtgggtaccatgaaccttttggcattcatttcatgagtatcagatccccttctccatctcccaggagcaacacagtggagagaacacgttaacctgattgtgggagggcatccactctggcagtgaaagcttcacttgacattctctaaagctcaacaagagtgttaaagcctatctttaaaagaagtgaatgggcttcctctggaaagatggcctcttagccactggtcccctgttagactgaaatctgtcttgtgtggtcaggagccattaatgcgctgacttgaagcc

SEQ ID NO: 218498 - DNA, 385 bp, Homo sapiens
catttgaaaatcaattaaatccattaatgcaattcaccacatcagtaggctaaagaagagaaatcacatgatcccttcaatagaggccaaaaaagcatttaacacccattcatgatttaaaacatctacaaaaaacctgccactaacatcatacctaatggtgaaaaacttgaagcattcctactaagatcagggataaggcaaggatgtctcctcactactccttttcagcattgtactggaagtcctagctaatgtgacaaaaaaagaaaacagaagaaaagaaagatacagggctgggcatggtagatcacgcctgtaatctgagcactttgggaggccaaggcaggtggagtacttatggccaggagttcgagaccagcct

SEQ ID NO: 218499 - DNA, 678 bp, Homo sapiens
tcgaatcaggtttacaaattccgttagttccattataatataattgagagtattttatcatggaagtcaggagttcgcagaaagccaagctgtgtgatatgtcacagaaaattcaagtaaattaaggactaaaaactgtccacagacattgacagtttagatcatatatgtagttgtaatgtgttttctgttatacctgaaaaatcccttaactgctcttaggttgagtaataaacaattaacgggtgttttatctcactttgaacataactaccaaaaaggtattaagattcagagattgctgttttaatattctgcacatagtgtattttaaagcccttgttaaacagaagtattatgtagatacaggcatgggctagttttagtcataatagtaacactgacttaatgttaccgtaatagatggccgaaagagttgactaaactctaaaaacagatacataagcaaattaaagtatatttttctgttttaaaaacaaatttacatactttttaagagttcggacgaaaaacctaagaataagaatcctatctgccattcatttctttttgtagtgaatgaagcttatacagaataaataagttccagataaattcaacaggtgaatcggatacctgctctatgtcaggtgctgggaatatacagaagataaaaca

SEQ ID NO: 218500 - DNA, 435 bp, Homo sapiens
ggttttcagttctctttgtaaataatctatttctgtctaaaatacaatttaaagtcatactactacaagacttctagctccagaaattttactctgtaccaggcattgtgcaaagtatttgacatgcattttaacccttacagttttcctgtaaggcttagattctgttctttccatctcacagattgctgctggtaatactcattgaatagttagtgtgaggcgctgttctaatcactgctgtcttgttttctctgaggctaacttacccaagggtgccccataagctagagccaggattgggtgtgggtggttggcagcagcccacgctcctcccccacgtgtggtacagaggtgcagcctgagcttgtggggtcgctcaacagggagtggggagcgggatcccagcccagatctgcctgtgcttcatcatgc

SEQ ID NO: 218501 - DNA, 1326 bp, Homo sapiens
ccagacatgggagccagttcgtctgtgaggattttctccaggcatagtcaagtgtggaaaatgaggacaatgtggtgaacttttcataaaccaatggattcaggttgaagacctggccatttttttctgagattatatctctccaatctttatccttagccacagtgtcttctttaatgaaatggtgttgattatggatgatagattttttttttctgttggccaaattagaagttggaaaccctaggttgttattccttcccttccccaaatttcaaagctttaccagtttgagaaatcccagaatctcagtcctcaagaaattgaacctctaacaaggatacgtggatgtgcacatacgatgctatgtctcaaggatgacatttagtgccctccaagaagtagaagtgatgccggggaaccaccaaggaagaaggaccagcatctctctggggagcctgcagacggtctgtgcatgaaatgggctttcaaggatggacatgggactgaaagggggaaattgggcatggacctggggcataaggaatctttgtcatattccatggtagagagggcccagaggtgtgagagcagcagttgggtttccagaacagcggttgggtctttcagaccgaggagtgctatgtagaagtgaagggccttggatgggggttggggttcatatataggagcagtgcagccctccaaggggctttggagctgtaacggaggactatacacctggcagtagaggacaggtaaactgaggaaagcagggtcccaaggaggcagtctaagaattaaaaagttaatgggcagtaatttgtggaagagctgatgagaacctgaacttaaatctctgataaaagagttcatatcttgggagaggatattttctcataatggcacaagagagctctctgggtgctggaaacatattcgacctctttgtttgggtggtggttacatgactgtgcacatgtttaaaactccgtgatcgtatcctttgctgggacacggatggagctggagaccattatccttagcaaaataacacaggaacagaaaatcaaataccgcatgttctcagttataagtgggagctaagtgacaggaacacatggacacttatagggggaacgacacccactggggcttttcggaaggtggaggtcggaaggagggagaggatggaaaaataactaatgggtactaggtttaataccagagtggtgaagcaatctatgtgataaaccccagtgacacaagcttacctatgtaacctgcaattgcaaccctgaatttaaaataaaagtttaaaaaaga

SEQ ID NO: 218502 - DNA, 499 bp, Homo sapiens
tggaagtgtaagcgtgcacagacagcaagcgtgcaagtgcaaggatgcacagagcgcaattgtgcaaactaagggaacagagagagcaagtgtgcaacataagggtgcctagagtgcaagtgtgcaagcataagggggcacagagaacaggtgtgtaagcataagggtgcacagagaggaagcatgcaaatgtaaaggcacacagagagcaagtgtgcaagcataagggtgcacagaatgcaagtgtgcaagcatggcatatgggagggaagtcagggatttcttcctgggcagaaatatcaaactgggtctgtaaaatacaaatgggtatgggagggacaaaatgtcttaaagccaaaaggaagaatacaggttgggtacagattgaacaggaaactcttgtgagaaagatgacatgtagcaaggacctgtaaagttaaagaaatgtcccgaagaactaccaaatgccatcccaggttattagccacgctgaacctac

SEQ ID NO: 218503 - DNA, 254 bp, Homo sapiens
actggaagatgttttcaggccctacaagaataagaagtcttaaccaggcccgagttctgcttcctgggagtatctccccaggctgtatctcagcacagctcttgcctctgccctcttgggtgtccctccttttccagcaccttcttggccatgttgaagaatgtgccctttgagaaactttctcaacctccttcctgtcattagcaaattgtgagcccacagaccttttttcactctaaactgttctgtccaca

SEQ ID NO: 218504 - DNA, 276 bp, Homo sapiens
tactaccatatatttgcttggggatggctaagcatggattgatgggcgagcttttggaaaaagcattttttaaatgcttttaaggaatattaaatttttttcttgccatgagaggcacagtgtaagtttggcatttagaaaaggtgcaagctggattgtcctcaggggctgacccgcacagtgttaaattttaggaaatagcagagagagcttggcatgatggattattttaagcagtgggattttgaaaaagagctactatatagtttatatttg

SEQ ID NO: 218505 - DNA, 413 bp, Homo sapiens
ttttttttttttgagacagaatcttgctctgtcgcccaggctggagtgcaatggcacaatctcggctcactgcaacctcggcctcccaggttcaagcaattctttctcagcctcccgagtagctgggaccacaggcgcccaccgccacgcccggctaacttttgtatctttagtagagacggggcctcaccacactggttaggctggtctcaaactcctgacacctcaggtgatctgcccgcctcggcctcccaaagtgctgggattacaggcatgagccactgcgcccagccctgtgtctgctattctgagagcagaagaatctccaatttttataaaatgcaagccattcctcaggtatgaagatgacaacctctggcccattagaagtgagttgtttggattgtcgacgc

SEQ ID NO: 218506 - DNA, 526 bp, Homo sapiens
cttgttgctgtcagaggatgtgtgaccttagctaaagtagaaagataaaagaaggaagatcacatcgacaccttctaagagttgaggccccagattcaaaatgccaaatttatggaaggatacaaatgaaccataagaaatcttatattggctgggctcagtggctcacacctgtaatcccacactttgggagcctgaggcaggaggataatgtgagcctgggaggtcgagactgcagtgagccatgatcacgccactgcactccagtctgggcaacaaagaaagactctgtcgagagagagagagaaagcaaggaaggaaaaagaaaagaaatcatatcttgaacgaagggtaactatatttgaccatctttttttattctatgctttgggataaatctcagtgtcttatgcctcagatgatatcatcagcacacagtgaaacaatattacattacattctcattatcaaactctcacaactataagattccgtcctgtttcccagaaggtcaaaatgtgtttta

SEQ ID NO: 218507 - DNA, 204 bp, Homo sapiens
acatttagaacaagaacagtaattagaaactcttataattacttataaaaattaaggatatcagtatcctcctagatcaaaattttggtgtttagtaagttagaaaacattctgaacaaaaaggaaatatcttcaacctctagtgatcaatagaaaagcaggtatataaaaaagaagtttgattccttttaaaacatgaactaa

SEQ ID NO: 218508 - DNA, 565 bp, Homo sapiens
tggatcacctgaggtcaggagtttgagaccagcctggccaacatggcgaaaccccatctctattaaaaatacaaaaaatcagccaggcgtggtggtgtgtgcctgtagttccagttacttgggatgctgaggcaggagaattgcttgaacctgggaggcagaggttacagtgagccgagatcgtgccattgcactccagcctgggcagcagagcaagactctgtctaaaaaaataaaaaaatttaaaaagcccatgagattggtgaaagtagtgaagcaaaataagtacaagtctatttctgtgaattcacacatagtagctactcagtaaataactgttgaagtgaatgaataaaagaaatgtaaaaggtgttttaaatttagaatctgtggactcagtaatggctgactgtaagagaaatggaagatggagtagttgaagatgtttcaagacaaggagcgccttcaacacggcaatcccggtccaactttggaagctgcaccctagctaagctctcgagacatgaatcaagattaggatatttattgcagcattgttcataat

SEQ ID NO: 218509 - DNA, 391 bp, Homo sapiens
tttcccccccattatggatgaaaattctaatgtaaatattatagcatgaggtttttaatttttttcaacagaagacacattcctttattttcatgacataataataaatgatactattttgatttcattttaaaagtcaattttctatccttttgctgattccttttacttcagaacttgcagcaaatagtttagcattagttcttctgtgcatcttattagtttattagttatacatccaagtgaagggcagagtggtatataccacttaaaaggcatttggaacagaatttaaaaggcaacaagacaacacaggggccagaattaatgagaacaatcattactagcacaattaccagagtatttttttgaaaattaaatacaaaaaaaa

SEQ ID NO: 218510 - DNA, 294 bp, Homo sapiens
cctatcaaaagtgctcctcgtcaaaatagctctgtttttcattctttcaaacatgagtaagttaggcacatcctgtttgctatgtcatggcttttccttaaactaggtcttattctttggaaaatacctatgtgttttgttgttttgttttaatctattctgaaaacatcagcttttatgaattaacccacaagttattaaaaatgacatattttaatgcaaataaaatatttctatatttagacaatttaatcacatggattatcttaacactatcagtttaaaactatgagt

SEQ ID NO: 218511 - DNA, 356 bp, Homo sapiens
aaagagtggaattttgttttattcatgtttgtgtctacctacttatattttgctaggtgggccagatacttgggggtcagatattttagtgtccaataaatattcattgagttaaattgtataaaaatgtaggcttggtgtcttgattactaacaaaactattttgttttgttttgctttttttgagatggagtttcactcttgtcgctgaggctggagtgcagtgacacaatctcggctcactccaacctccacctcccaggagagtcgcttgaacccaggaggcggaggttgcggtgagcctagatcgcaccactgcattccagcctggtgacagagtgagactcttgtctcaa

SEQ ID NO: 218512 - DNA, 481 bp, Homo sapiens
agctccgctggtgagggatcattcatctaaaagtccattgtggctgctgggtcaggtttgagaagcagttggcttccgcagagttgctgctacaaaaatgtggcatctgtctgtttcttttgtttgtaatactttttctcataccccttgtctggccgcttctagatctctgccatttatggtctagaaggtagttgcttctccctgtgttgtgctgtgtttagaaagatagtctgaaattcagaattaggcagttatgttccagtcttctatcatcctattaaagagaaaaagaaaaacttgcgcaaatggggtggattaaaagtttgggtcatgtgaagttcataaagctatatctccagagggaaatgctaaaaatatactcaaccactaaaattgcccatggagggaaataagtttattgctttattggtcatgtaagtcagttaaaatataatcaagtcagcctcctcactgtctt

SEQ ID NO: 218513 - DNA, 501 bp, Homo sapiens
tggcatgtttttcatatgtatatatatattgcatccatcaaactttagggtagttcttaaagctgtgacccctctagtttcttctgtactgttggacctttcatagcttgtcctctcaactcacaaattaccaggtggacactacttatccgccaattctcctgatatcgttgcacccatccatctatagaacttgctcagcaaaaccctgttctgagtttgtgctgtaacgtacttgtttgattgaattcctttggagaaaaattagtaatgttttcattctgttacagatactgagttcttaatgttattgctaatggtagtggtggtatatttttatagcagtaaaattttcatgtgctatatatagtacagtacttttgaaattgtttttacgtgtatatatgaagtgttctttcatgtgtgaatacaacccttttggagcctttcagttttatagttgtgtttacttcagaagccatacaatatctttattctaaa

SEQ ID NO: 218514 - DNA, 151 bp, Homo sapiens
tttgtttttacattcaggacattgtattcttcaccttggaatgtttcctcttcaatagtaattgctataaatctgataggcaaagttgtaccccacctgcatcaaacattttattttcttaacttctagtctcattatctggtcccacttt

SEQ ID NO: 218515 - DNA, 579 bp, Homo sapiens
ccactgtagtctcttacatttgattctcatgtattttcctctaggggagagaaaaggagatttttcaaaaggaaaaatacccctttgtctgactgttctgaaaatagcgcactccagaatataaaaatgaaagtgtgggttcatagtacatgcaggccctacgtgtgacctatcctgaagtgttctttcttgattttatgtggcactggggatgtccttgagggaaaaaatagccaggggttttactttggtgatgcgttacgctagccggcttcatgtctcacgtaaatggtaacctttgctgagtgtaaccctagctctttgtaaagagaacagaattagactccaccaaatgaagagtccaagaccttggcaatcttaccctggaaagatgacaagatacatagagatcagacaaatgaacaatgatgatgcctttataacattgcctgaatagctaggatgtctgcagagttatactagcttcatggatattatataggttcagtggtctgaaaaataggacattagatctatttaaaagtgaacaactgaagaatttgacagtagcttcattcg

SEQ ID NO: 218516 - DNA, 487 bp, Homo sapiens
cacctagagaatttagaaactccttggctgtcttctcattttggccaccaaattatccggtcagatcataggtataaacaagctgcagggcccttaggccaagggttaaatcaagagggaaatgatcacattccttcaaatatagaatataatattcctgtatgatttggcatgactggagaaatattaaataggtgtaacatttcttgcttaagaaagggctggtattccggccatagtggctcagacctgcaatcccagcactttgggaggctgaggcaggagggtcacttgagttcagtagtttgagacaagcctggacaacataatgagacgccatctctattaaaaaaaaaaaaggaaaagaggccaggtgcagtggctcatgcctctaatcctagcactttgggagtctgaggcaggaggatcacttgtgttcagtagtttgagaccagcctggacaacatagcgagacgccatcactatt

SEQ ID NO: 218517 - DNA, 288 bp, Homo sapiens
agatggtgtttttctcgatttcgccccaaggagggtgctcggacttcgacgtgccgccatctttgagcagggcacagctgtttacagccttggaatggatatcaggctgaatggtggttgcttggcaacgccccgccacggtcgccatctttgagtagggcacattgtttactactatatactggaaacctacagggaatgtggttgctaggcaatgctttgggaccatcgcaatctttgatccgggcacagctgttttttccgtttagaatgtaaatcatcaaagcc

SEQ ID NO: 218518 - DNA, 309 bp, Homo sapiens
agttgatacttgttgaatctcattgatgggcatgtgggggttcactttactgttttctgtattatttgattgaagtttttctttctgtttttttgagatagggtcttgctctgtcacccaggctagagtgcagtggcacagtcatggcttacacagcctcaacctcctcccatctctgcctcccaagtagctgggactacagatgtgcgtcaccacgcctgtgctcaagtgatcctccctcctctacctcccaatatgttggaatgacaggcatgagccactgcggctggcctaataaaatatttttta

SEQ ID NO: 218519 - DNA, 428 bp, Homo sapiens
tactttattggttggaagcaagccacaggtccttgtcatactcaagaggtggggattaaccgaatgtgtgaacaccaggaggtggggatcatggaagattcctttgagttcgtcggtgacaataatgtttaaacaactgaattcactgctaacaggaaatgtcaggaaatttcatattaaaactccacgtgtccccagatcttagaaagcctgatgccagatctgcttttacatgccagatctgcttttatgtgaccagtatcagtgtgagctgagaaatagctgcttgctctgagcagttgcattgctactcatctcatcacaatcctttcttgcttattgtatgttgctgttgtttattgtcttgcatgcataggtgcttttcacacatctaggtgcttcaattatttgtgttatctggctggcct

SEQ ID NO: 218520 - DNA, 406 bp, Homo sapiens
tagggagttagctaagccggtatctgagggaagagatagccaggcaggagtccgagcaccaagcctatgggaatgagcatgagcaagatatctaatgaagatgagagctctaggcttctaaaaggaaattggctgcaaaatgaattcaacttaggtagtgaaataaaccattctcattccatatcccctttttttgcaaaacctcttcttgctatcaccacttactagtcttaaaggtatgcctcttcatgtgtttttcaagttatattcaagacacaaattcctttaagctaatagtaatcaaaccttaggaaagccatggttattccagatcatcttgtgcaatcatagtctttagataattgagctatactatattcctgtgaatatagtaacactcagaaga

SEQ ID NO: 218521 - DNA, 240 bp, Homo sapiens
atcgagggcagctgggcatggtccctgcaagaactttttttggccgtttgtcccctgctaaccttgcaccacccagggctgtgggtaggtgttcctgtcctagatattccaggggtcacttgtcccttgggctgcattttctggcatcccagaaaagtgagtggcttgtcatttccttgactaagtcatgtcaattctctgccactaattcagtttgcaaatgagtttcttcagctattt

SEQ ID NO: 218522 - DNA, 577 bp, Homo sapiens
acaaagattgtggaagatgcagagaagcaggggattcaagatacattttagagatagaattaacaggacagttcacaatgataagataacttaagtttttgcctcacaagtttagcgtttcttctattaaaccattatgaaatgtcattgttagctagtaatttaagttagtaattaggttattcagagtcattgatttagcctgtgtctaaaaccaagcaatgtagatggctgccaaattcactaatggcagcagcatgtggtgaaggttaaagaagatttgataactcttttaggtatttaaaatatttgtatatttttaaaaatcaaacttatgagacagtgcatgcagtagtgaaatgtatatatatagctcatttgaggagtactcttagggttgtggttctcaaatagggacagtctcttgccgtaccctcccccaccccccaacatttggcaatgactggagacatttttgattgtcacaacctgaagaatggtgctcatggcatctagtgattagaggccagttatgctgctaaacatcctgcaatgcacaaagtcagtctcctcccct

SEQ ID NO: 218523 - DNA, 371 bp, Homo sapiens
gccactgtggcaaaagaatagataggaacttagtttggagaaacaagatgggagccagatcacttacggacttatggaccaaagaaaggactttgaattttatcctaagaatgctaggaagccatggagggttttgagtagaagagtggcatgatctgatttataattgaagatgttcactctggttattctttgagaattccctatagggaagccaaatagaagctaaaagaccagttaggaagctattgcagaagacctgcaaaactagtgttgcaatgaaattggtaggattcaggatgtactctgaaagtggtggagaggtgatgtgttaatagattgaatgtggggtacaagataaagacaagaat

SEQ ID NO: 218524 - DNA, 379 bp, Homo sapiens
tttatccactatcttacgggctatgttggtaaatactgggatgagacaaccagaatactgttggagacggcacatggcaatgtttttagcctggggtcatctgttctattacagacaggtcagccacttgtctcatagaggaaattaaaaaggtctccgatccacttggtttttctctattactgtctcagaggaacatcactaaagaactttggcagcgaaggaaggtaactcgcactattgttttagtgtatcaccagcactggaatttacgacctgtgcaaaagaacctagaattccacatagctcttggtccctgcccaggcctcttctgcatcagccagcacacttcattttcactgcagatgtgtctgtgggc

SEQ ID NO: 218525 - DNA, 414 bp, Homo sapiens
agaaggtctcttaaaggacttggggaatattaaaacgtgtgcagagaacagaggggagcatatagttcatttgtaactagtatagctaggaagagtgtggccaatatgaaagggtgtgcctattgtggagataattcaattagttttttctttccacagcaatagaagagtttaacttcatggtacttcctatgtgcagcgtctgtactaaatgttttacatggattgtttcatttaaccctcataacacctgcatgagataggaaatagtcttcacatttgacagatgaggaaactaaggcatcaaatttttcagggagacatagctaataagaagcagaaccaggattcaaatttagcaaatgtgattcctcagcccgttcccctaaataaagtctttcgaacaatagaaaa

SEQ ID NO: 218526 - DNA, 474 bp, Homo sapiens
attttgttcttgcttgttgtgtctttgtctggttttggtgtcagggtaatgctgaccttatagaatgaatttgaagtattcccttcttttgaattctttatgagtttgaggaagattggtgttaattcttatttaaatgtctggtagaattctctagcaaagccatctggtcctgggcttttcttatttggtaagtttttgataactgcatccaatctctgtttactagttataggccattcagagtttttatttttcatgtcctcgttttgctaggtgtacatttttaggaatataccaatttgttctagattattcaattgttgatgtataattgttcataatattctgttataattcttctggcatcagttgtaatgtcccctctttcatttcagattttcatttttcaagtcttctctttttcttagtctagctaaagagtttattgattttgttgatctttttttaaaa

SEQ ID NO: 218527 - DNA, 248 bp, Homo sapiens
ttcaaggattcctgtttgcagttcatggagaatggtatttagaaataaatacttgttcactaggtatggttatttcttctgaagtgtcattgcttctaggccctctctgagtagacagctaggaaacatgtaaaaatatgcatatactgtttcatatacagacacatgtctatttcatggtcattctgtgtatgtttagaaccatgagttcacactaatatttccaataccacgttttattctagact

SEQ ID NO: 218528 - DNA, 580 bp, Homo sapiens
tgcctcagcctcctgagttgttgagaccacaggtacacaccaccaagcctaatttttaaatttttgtagagatggggtctccctgtgttgcccaggcaggtcttgaactcctggcctcaagtagtcctcctgccttggcctcctaaggtgttgggattacaggtgtgaaccactacacccagccttgctgtgtctttttactattgtatttccattgcctagcatggtgcctgtcacctaaaaaatattttaaaatatttgctgaataaatactcctatgggtttagaaaatgcagcataaatttagaaatgccccttctgttatgttctgggaacagaacaagggttggagccttggttctgccatttaccatctgtgtgaccttggttgagtcacttgaagtctctgagccttagtttcctcagcttagaaatgaggatcagtaactgctttatctatttcgctaggtttctttgtcagtcaaataagataatgcatgtaaaggttactttataaactgtaaagcactgtattatttttaatcattacgtgtttacacaagttgagctttgctcacaa

SEQ ID NO: 218529 - DNA, 139 bp, Homo sapiens
ggtgtgtgtttgcttgtttttggtggtttaacatgtgggagggtttgtgctgactctgggttccttgaggctggcctcatagtcactgttttgtcttttctttttttcttcctttatttttgttctgtcctgtcttgtc

SEQ ID NO: 218530 - DNA, 355 bp, Homo sapiens
aatttaatcaaaaattatggtgtagcattattgggaggataggggaggggattggcctgtgtggggaagggtagggacgtaagtggcccgaagcctcctcatccgtaagagaaaggcaagcgagagtgtctcaagctggagagtcaataaagaacagtacaagtgtgttgtttccaaatatagagaaaagttgcagaatcaaatatagagaaaagttgcctctgggaagtaggaattgggtggagagagataaggcagggacttttttggtttttttaaaaaataagccttatagttttatgtttgaaactctgtgcatgtgtttttaaattaaaataataaaataagcctatta

SEQ ID NO: 218531 - DNA, 2021 bp, Homo sapiens
tggagatagtaagttttcctttattgcagaatgtctgtgaaagcagtttataatgaaacaaacatttttgatgaaatggttaagaaaaaaaccaccttgatctcatgaggagcaaatagtaatagtagcagtaataataacaaacgttgtctattgttgttactggtactcttgacagctaagctctcctacccctgacacaggttcctggtggaatacctcaaatgtcgacttcctgaggtggttgctattttgttctgttttgattttaaacagaaagcaagggcggaccatggtttgattccagatgtgaagttagaaaaaacagtcccccggctgcaccgtccgtccctccagcatttcagggagcagtttttggttccagggaggcccgtgatcctgaaaggcgtggctgaccactggccgtgcatgcagaagtggagtttggagtatatccaggagatcgctggctgccgaactgtcccagtggaagttggttcgaggtacacagatgaggaatggtcccagaccctcatgacggtcaacgagttcatcagcaaatacatcgtgaatgagccaagggacgtcgggtaccttgctcagcaccagctctttgaccagatcccggagttgaagcaggacatcagcatccccgactactgcagcctgggcgatggggaggaggaggaaatcaccatcaatgcctggtttggtccccagggaaccatctccccactacatcaggatccccagcaaaacttcctagtgcaggtgatggggaggaagtacatccggctgtattccccgcaggagtcaggggctctgtaccctcatgacacgcaccttctccataacacgagccaggttgacgtggagaatcccgacctggaaaagttccccaagtttgccaaggccccattcctgtcctgcatcctgtctcctggagagatcctgttcatcccggtgaaatactggcattacgtgcgggctctggatttgagcttctcggtcagcttctggtggtcgtagccaggataggagctgaaagggcctgacatgcagacagcattcatctgttcactaatttcctgggtcctggaatctatagagacaagcaggactgaacctgtgtcctgaagagccttcactgcccagtggcagccctggggggctgagctccagcactgggcaggcacagagcaggggctgcccaggaaggagcacactccaggccaggggtgcatggcagaggaaggtggggagagcccagaaggacattgcagacagacagcctgcatggggactccggcatcagaaagccgaatgtttttgggaaacgggtgggtcacacaggcaggggtgaaacatgggctctgaggttggctacctgattcaaacccggccgcgctgcgcacctgctgggtgacttggccaggatcccccacttcgctgtgcccatatggaaaagagggcaaggccagtcctcactgccgagggccgagaaggcggtgccgagcccctgctgctgcatgaaccttagccgctgtcactgatcccaattactctgatccttttgcccttccttcccataacggcctgctggacgccacagcctgaatactggagagagctgggcattgcccaggtcacaggagagagtccgtagagacctgcgcaggagccgggacccctgctgagcagtgggagctttctgtcatccccatggctcaaggataacctacctgcctgcagagaagagcgaaggtcttgctggatgacttttcacccgcactcacccaggagcaggctcccaagtgaagaaaccaccaaaccatcaccagctcctagaagcctccctcccaccaccttctagtcaccatcccccagaagtaatgactctcaaacctgggggatttgaggccagggggagagccaggctctatgctttctgtaattgtgtctcgtttgtgtgcacgcaggtttgttttatgttttggccattaagattttccccagccctc

SEQ ID NO: 218532 - DNA, 2416 bp, Homo sapiens
gtcgtgatcagacgagcggtgagcgatcgatactcctatgctagcctctggctcctcaggggacacagccgagtggtcggaccaaacgcaacgagtcttcgccagcccaaaggcgactcgacaccgtcccagctgaagagaggcatgggactgaaccagctggtggtggcccgatggctggagacacccactgccccgcagagcccctggccagagaaggcactttatgggaggccctcagggcgctcctgccgcacagtaaagaagacctgaagttggacctcggggagaaagtggagaggagcgtggtgacattgttgcagcgagccactgagctcttctacgagggcaggagggacgagtgtctgcagagcagcgaggtgatcctgggctactcctgggagaagctcaacacgggcacatggcaggacgtagacaaagactggcgccgggtctacgccatcggctgcctcctgaaagccctgtgtctgtgccaggcacctgaggatgccaacactgtggccgcagccctgcgggtctgtgacatgggcctgctgatgggggcagccatcctgggggacatccttcttaaagtcgctgccatcctccagacacacctccctggaaagaggcctgcccgtggctccctcccagagcaaccctgcacaaagaaagcaagggcggaccatggtttgattccagatgtgaagttagaaaaaacagtcccccggctgcaccgtccgtccctccagcatttcagggagcagtttttggttccagggaggcccgtgatcctgaaaggcgtggctgaccactggccgtgcatgcagaagtggagtttggagtatatccaggagatcgctggctgccgaactgtcccagtggaagttggttcgaggtacacagatgaggaatggtcccagaccctcatgacggtcaacgagttcatcagcaaatacatcgtgaatgagccaagggacgtcgggtaccttgctcagcaccagctctttgaccagatcccggagttgaagcaggacatcagcatccccgactactgcagcctgggcgatggggaggaggaggaaatcaccatcaatgcctggtttggtccccagggaaccatctccccactacatcaggatccccagcaaaacttcctagtgcaggtgatggggaggaagtacatccggctgtattccccgcaggagtcaggggctctgtaccctcatgacacgcaccttctccataacacgagccaggttgacgtggagaatcccgacctggaaaagttccccaagtttgccaaggccccattcctgtcctgcatcctgtctcctggagagatcctgttcatcccggtgaaatactggcattacgtgcgggctctggatttgagcttctcggtcagcttctggtggtcgtagccaggataggagctgaaagggcctgacatgcagacagcattcatctgttcactaatttcctgggtcctggaatctatagagacaagcaggactgaacctgtgtcctgaagagccttcactgcccagtggcagccctggggggctgagctccagcactgggcaggcacagagcaggggctgcccaggaaggagcacactccaggccaggggtgcatggcagaggaaggtggggagagcccagaaggacattgcagacagacagcctgcatggggactccggcatcagaaagccgaatgtttttgggaaacgggtgggtcacacaggcaggggtgaaacatgggctctgaggttggctacctgattcaaacccggccgcgctgcgcacctgctgggtgacttggccaggatcccccacttcgctgtgcccatatggaaaagagggcaaggccagtcctcactgccgagggccgagaaggcggtgccgagcccctgctgctgcatgaaccttagccgctgtcactgatcccaattactctgatccttttgcccttccttcccataacggcctgctggacgccacagcctgaatactggagagagctgggcattgcccaggtcacaggagagagtccgtagagacctgcgcaggagccgggacccctgctgagcagtgggagctttctgtcatccccatggctcaaggataacctacctgcctgcagagaagagcgaaggtcttgctggatgacttttcacccgcactcacccaggagcaggctcccaagtgaagaaaccaccaaaccatcaccagctcctagaagcctccctcccaccaccttctagtcaccatcccccagaagtaatgactctcaaacctgggggatttgaggccagggggagagccaggctctatgctttctgtaattgtgtctcgtttgtgtgcacgcaggtttgttttatgttttggccattaagattttccccagccctc

SEQ ID NO: 218533 - DNA, 387 bp, Homo sapiens
agttagtgtgctctgaaaaaggaagttcttaaaaactttggaactccagagtcttgggtttgatttctgcttccatcatttaattgaatttcaggcaggttatctaaactctgcctcagtttgctcattgttcatgcaacagagtttctatgcagactacacatagtaatatattttaagctttagacataaatagagttcattcctcactgaccgattttcttttaataaataaatcattcttaaaatttcttttcttgaagtacgttataggtcagatacaatagctcacttctgtcccagcaatttgggaggccaaggtgggaagatggcttaaggccagtttttcaggaccttcttggacaacagagtggggctccatctcta

SEQ ID NO: 218534 - DNA, 426 bp, Homo sapiens
ggttggaaacttagtccaatgttatttacttttcgtcttaaactttgaaatcattttaataattattttggtttctctccacctgattgctgtagtactattaaaactgaattttaaataattctgtttgattctaaacagtcaagtttgcaatagattgccatgttttaacaatatcttcaaattctaggcaagggaaaaaacatttgcatataatttttctctaaacatatttatactatgtatttacaattagtaaatcctgagttacttcattgtttttatattaagtggtctaaatctaataaatggatgcactcacctcaactgcagatattatgaaaaattcctggatgtagcataagtatgagtttaaaattcaacatcaaaaccttaatccattttcatcacacacacaggatttag

SEQ ID NO: 218535 - DNA, 642 bp, Homo sapiens
cggtagctcatacctgtaatctcagcactttgggatgccgagatgggtggatcacctaagttcgagactagcctggccaacatgatgaaaccccatctctactaaaaatacaaaaaattagctgggcgtggtggcacatgcctgtaatcccagctactcaggaacctgaggcaggagaatcacttgaaccaggaagtggaggttgcagtgagccaagattgcaccactgaactccagcctgagcaacaagagcgaaattccgtctcaaaaaacaaaaacaaaaaaacaaaaaacaaaaaactaacgcatcaacataggagtatacattttttagtctatatttacatcatccacaatcagttgtatataattctcaggtggaaaagtcatggtgacttagaggcatacttctgaaattttattgtgttcagcaataaactgcagaactggttcaaatgcagattctgattcaggagatctggggctggggctggggctgcgtttccgcatttttaacaagcttaccagtgacaccaatgcctcaggtccagaggccacacttttgaatagcagagaggttgaacactgaacgaagaattcagggatgatgtggaattgagagttttatgaaatttacaggtt

SEQ ID NO: 218536 - DNA, 335 bp, Homo sapiens
cgcccttagcgtggtcgcggccgaggtactaaattcatagactgggagactcagtattgtcaggatatcaatggtcccactaatgatccaaagattcaacaaaatcccaaaaaaccagcagccttttttgaagaaactgacaaactgattctaaaacatacattaaaaaaaaaaaaaagcaaagcacccagaatagccaaaacaacttgaataaaagaataaacgtgaagaactctaattgatgctaaaacttactatagtcagccccctgtatccttagttccacgttcctggattcagtcaacctcggattaaaaatattcagaaaaaaacaa

SEQ ID NO: 218537 - DNA, 292 bp, Homo sapiens
ctgtgaggctagaaatgttcttcatctctgtgtaaatatagctagtgtgactaataaacttatgtttaatgttatttacttctaattaattaatattaaacttgaattggtgcattttaactgtccactggccaactttggctaatgctactgtacttatagcaaacttctaaattttatattaaaatgcataggtttatgaaaatacagtgtagcttaaaaatattagtattccgaattagtatacagtttatatgtgtgtgtatacacaggtgtgttggctaattgtcta

SEQ ID NO: 218538 - DNA, 506 bp, Homo sapiens
agaaagaatttaaagattaaaatttttataataaacagtgaaggattatcacctgaaaacagactaggaaatgctgttctaaaggaaataagctagtagtacaaaggataatagggtatatcacagaaaaatatttttagactcttctgagctttatttttctcatctataaaaaaatcaagattgaactagataggtaggtttcaaacttaaggcactgaatgggtgtggtggctcatgcctgtaatcccagcactttgggaggccaaagtgggcaatcacttgagctcaggagttcaagaccagcttgggaaacatggtgaaaccccgtctttacaaaaaatataaaaattaactgggtgtggtggggcacacatgtagtcccagctaccagggaggctgaggtaggaggatctgttgagcctggcaggccaaggctgcagtgagctggattgtaccactgcactcgagcctgggcaacagagtgggaccctgtctcaaaaaaa

SEQ ID NO: 218539 - DNA, 446 bp, Homo sapiens
agttaaggtaccagctagttcacacggcacccacgtcttgttgtgacagctccctggacaccggcttgatagtctcatgaatggagtccttcctgccattcagctagttccttgagcagcttagtagaggagtgtagcacagggacccagaagcctgatgcatccaatgcagatctctcacctcacagtctctgcatctcctgggtaaaatgtatacgccagtgctcgaacctcttagcttggtgtcaggattcaatgtaggcagggtgcttaccagaggcctggtacatactaagtgctctgtaagtggtattcatagctttaacactctttcccttaaatacatccaaattccttttaaggatatatgacttgtaatgagtttcaagagaaagtggccttagcatgtattccagggattacaaaacgtgcccccccccatccta

SEQ ID NO: 218540 - DNA, 323 bp, Homo sapiens
gaaaagtgttcaaaataaaatgattaagctatgaaaaatagaacaggccaggaacatgacacattcacttcccaaggaagaagaaaacagttactactgtgtaagaattcagtagagtaattagttaagcttgtaggctttgtagccaagacctgctgggtcccatccagtctctaccactcaccatccagctgacttttgagaattagatgaactaataaagtattcaaaatactgcccgacacatagtaaatcttcaataaatcttagtagtgatggtgatgttggtgactaggtgatgccactaccccacaataggttac

SEQ ID NO: 218541 - DNA, 459 bp, Homo sapiens
tcttataaactgttttttgcaaatggaagacaatgccatctcaaaacccaaaaagcaattctggctttttatacttttgtggagaacaggtagaagacaagaaaaggaatgaacatgctgctgatgtcacttaccccttcagcgacaagaaacaggtacagaattcatgaactgatattatttcttcaaaaacatgttccatgacctcgagtgacttgctaaagcctagcaagtacaggtcacattacagatgtcattgtcttgtaaggtggacaagaaagtccacatcttttttacactgaatggaacatccttggctttgagtcaagttttgttttggttcttttgtttttttgagacagagtctcactctgttgcccaggctggagtccagtgagccgagatcacgccactgcactcaagcctgggtgacagagcaagactccatctctactacaa

SEQ ID NO: 218542 - DNA, 175 bp, Homo sapiens
tttacctgtccaaaaaccggataagtcttacagattagttcaggatctgcgtcttatcaaccaaattgttttgcctatccaccctgtggtgcccaacccgtacactcttttgtcctcaatacgttcctccacaactcactattctgttctccatcttaaagatgcttttttcact

SEQ ID NO: 218543 - DNA, 476 bp, Homo sapiens
gggtttcactgtgttagccaggatggtctctatctcctgacctcgtgatccgcccacctcggcctcccaaagtgctgggattacaggcgtgggtcaccgcgcccggctaaaccaggtattatttaaggtcaatgtgttactatgactttttgtggcttcatattgcagatacatgagtagtcttatcatttttttgagcacttagactgagagcatggttattgaaataattccccaaagtaaaccttattattttcaagggatttacaatatattaccaaaacttgagcaatgataggtaaatttgagctagttctcctcttttccctcttccaaactgcttttacatattggtgatagattaatatttttcaaaaaaatgtaggtcttgttgttttatttccttatttggaactcttggcattctgatgtttcttgaagcagtgcaaacacctgagatagtattttaggtctta

SEQ ID NO: 218544 - DNA, 512 bp, Homo sapiens
cctattgcagattcatttgcaaacatcagaatagcaagaccaataaaacaaagtctagaatcaagcccatgctcatagaggaatataggatacaataaaagtgggtcttaagcaaggttagatagctgactgcatagaaaaataatatagatccatacttcactttatattaaaacttttagtagattaaaggttaaatataaaaatgaaactataaaagtaattgaggctgggcacagtggttcatgcctgtaataccagcactttgggaagccaaggtgatggggggattgcttgagcccaggagtttgagagtagtctgggcaacatgatgcacctctctctctacaaaaggtacaaaaattagctgggttttggggcatgcacttgcagccccagctacttgggaggctgaggtggaaggattgcttgggccctggaggtcaaggctgcagtaaacagtgatggcgccactgcactccagcatgggcacagagcgagaccaggtctca

SEQ ID NO: 218545 - DNA, 682 bp, Homo sapiens
tgtggtggctcgcgcttgtaatcccagcactttgggaggccaaggtgggcggatcacgaggtcaggagatcgagaccatcctgactaacacggtaaaacccccatctctactaaaaatacaaaaaaattagccaggcatggtggcgggcgcctatagtcccagctacttgggaggctgagacaggagaatggcatgaacccgggaaggtggaggttgcagtgaaccgagatcgcgccactgcactccagcctgggcaacaaagcgagactctgtctcaaaaaaaataaaaaagaaaaatgttctttcacttctccatttttctaaaaccaaattaataagaacagccaagaatatacagtacttattttagcacatcttacaagtttaagccgtattagtgaatacgaatgttaattcaacgaatatttaaaaactttcatcaaacgcagtatgctggggagctaaaaattgaaataggtaaacaacctgaaggagcccactatctacttcacaaccaatatgtaaccccccaacctataatacaatataaaatggtaattagttccctgaaagatatctaacatagcttattgaaaaagtgatgatttcaacaaatgattacaaataggaggaaaatctaaaccttaaataatgtattattttaattgttgccaaccctag

SEQ ID NO: 218546 - DNA, 371 bp, Homo sapiens
caacattattttcaatgtttatttcttatttttaagtattcctcaaatagataatgcatagttggattttgctttttaattcaatatgaaaattttaatttttaaagtagtataattacagttttatatgtgttgctttttttttttttagacggagtcttgctctgtcgccaggctggagagtaggggcgtgatcttgaatcactgcaacctccgcctcccgaggaggcgattctcctgcctcagcctcccaactactcagaaggctgaggtgggaggatcacttgagcccaggaggttgaggctacagtgagtcatgatcgtgccactacactcaagtctgggcaataaagggaaacccagtctcaaat

SEQ ID NO: 218547 - DNA, 316 bp, Homo sapiens
gcccgcgccccgggctccccgccttggccgctgcggcctgcatagagcggcgctgcgcgtagcggccaggggagagaagaaggagggcggtggcgggggtgatgtggcggcctctttgggaggcgcaggggccgcagccagccagacgctgcagcagtgtgggcagctccagaagcttgtgggcagctccagaagcttatccgcatctccattggcagcctgcgccggttgcgcaacaagtgcgctgtgtccaaggacctcacccagcaggagatacggaccctggaggtaagggggtcgtggacccaggctgggc

SEQ ID NO: 218548 - DNA, 508 bp, Homo sapiens
ctagaaattattaagctaagtgagaaaggcatgccaagtaagtataaatccggagttgtccaacttgagctgaagtgctattagatctaccaagtcataagactgaatggtcactgcaaccatctatcctataatggatgcaatatgttttagggcaagagaaaatgcaaaagacaaaagtaggctgaatgaacagttggcccagatccctatatcactgatgcctctctctcagcttatacatacagtctcctaggtccttccaaccagctgataccttagtaaacaagccaggcctaatgcaagggcactttggctaggtatattggcacaatatgtcaaccactcagatgtgggacctcaaatataatccatgagggtaaacctactctgataagtagaatacatagattcatccccatccatagaaagggttcagaaaacaggagctggccctgtgcttttacagagctttatccttcccataagggcaggaccagatattatc

SEQ ID NO: 218549 - DNA, 642 bp, Homo sapiens
  misc_feature (613)..(613): n is a, c, g, or t
catctgagatgctgctggctcagctctgctggtgtctcttttgagcatggagcggtgtcctcgttgtcttcttttcattgcttatatctgctgcttgctgttcagggaaagcacaaattcactttctcctcttgttaaaaaaatagtttggcgggcgtggtggctcatgcctataatcccagcatgttaggagaatgaggtggaaggattcttgaggccaggaattcaaggccagcctgggcaacatagtgaggccactgtctctataaggaataggctgggcatggtgacacactcctgtaatatctgcactttgtggggccaaggcaggtagatcacttgagcccaggaattcaagaccaacctgggcaacatggcaaaactctgtctctacaaaaattagccaggtgtggtggcacacacctgtggtcccagctgaggtgggagggtcactggagctcaggagatcaaagttgcaatgtgccatgatcatgccattgcactccagcctggccaacagagggagaacctgtctcaaaaaaaaaaaagtcggatacaaatcacctggccgcggtttacaacgtcgggacttgccccttgcggtacccacttntcgctttgcagtcccccttcgccggtgcg

SEQ ID NO: 218550 - DNA, 518 bp, Homo sapiens
ctcttcacatttgttatgagggtgtggctgacctgggacctggtgaaatcaattttctaaaataagaaaaataaaaaagaaaaagacttctgaattctaaggggtcagagaaggatcttccagagattgctgagtggggagggcctggggatatggttctacagtttttggtcataaccacaaagattagcatctctgctgcctggtcgatgaagcatcccaaatagtccatcagcgagggcaaagtgatggaaacatttggagtcactgattaacatgcttgagggctggatcccttatttgggaggtgggagtacttccagagcttcttttcacttaatgaaggctgggaagctcagagctcagtggtacagggctggaggaagtcattttcatatatagagtctttcttgtttggcctcttttgtagcaatgactccccaggaccctccagtaacaattttcctttacctgcatcccccaccatcctcaggttcctgagatcaccttgaaaaaaa

SEQ ID NO: 218551 - DNA, 636 bp, Homo sapiens
atgatgtgttataaagggcgcaaatagggtaataatatggccaggcgtggtggctcacgcctgtaatccagcattttggaaggcagaggcaggcggatcactcgaagtcaggagttcgagacaagcctggccaacgtggcaaaaccccatctctattaaaaatacaaaaattagccagacatggtggcaggggcctgtaatctcagcctcccaaagtgttgagattacaggcataaaccaccatacccagcccacccagatttttgaggaaggctttgtataccttttctcagaggcaaatagtgttaattttggaatttgactgattcacaattcttaggtgcacctcagatttacttctcattgttattaaaattggtttctgaagaggcaaattggaaataattgtttcctcccctcactcaccttgttagggatactgacactttaacatctttttactccatggttgcttcagtaaattaagagttcagttttcaggttttctctgcacactattatttttcacttttttgacagccccttcaagtttatcttcagtagtgtttactgaaaatgtgttgaagatatatgaattgataaagctgaaagctctgtttcactaaatcgtcagcc

SEQ ID NO: 218552 - DNA, 464 bp, Homo sapiens
caagcttgacctaaaggacatttataggttcttaattcaccaattagacaacatacttttttctcaaacacagaagggttataaaaattgatcatattctagggcaggattctgcaaaccttttctgtgaagggtcagatagtaaatattttaggttttgtggacaaggagccaaaattgaggatattatataggtatcatataacaagaggaaaatcagatttccaaaagatttttattgacaaaatttaaaatttgatttatgaacactgaaatttgaattttatgtaatttcaaataacaaaatatcattcttcttttgatttttttcttctcaaccacttaaaaccattctcagtttgtgggccatacaaaaataggtgacaggtcagatttggctcacaggccatagcttgccaatccctgttctacgacttaaataaaaaacagatttccagtgtcag

SEQ ID NO: 218553 - DNA, 268 bp, Homo sapiens
aaaaataaacaagcaaagagaaaaggaaaagaagcaggaaaaaaaaaaagtggacataagacgactcctccagggacagcctcatccctcttccctcctcgccatgtggctttcagaaagagcagcctctggctcttggtttgcttgccttcccttcacactgcagccctcctatcttctgcgccctatgttggtacagctcaatccaatgcacattttgcaagccttgattatgactttccagcagtatctcccctcggctgccgag

SEQ ID NO: 218554 - DNA, 1111 bp, Homo sapiens
tcccttttagtgtctcgggagtggattcatacagatgaagtgggcattgcttcttcctggttgcctggtttcccgatagactacatgtaactaagtgacacactgcttttcttttgttagtattttatgtgtgggagtatgtgactgcgtgtgtgtgtgcctgtgcgtgtgtgtgtatactcagcacatgtatgttactatgtgatgtggtttaaaactaatggaaaaaactgaaagtgcctgaaactagttttaagcttagacagaatctctttaaaaagacttgaatgttcagttgaacttttggagtttgctttttccacctaaatattgtttctaaaattttaggggcggagttgaaaaccaccaatgctggtaattttataaggtattttaaaattaagacctcttggttcatagtaattcaattggtgatggattgcctggtggcaccaagggttacagatctttttgtcagccagcaacttacacgatgtgtccgttttgttattcactcatgaaatacaatttaaaatatttaaaatattttgtattccaaaaatataatacaaagaagtacctctgagaacattgaaaaaaatgtataatttgaaaaatgtaacttataagggcagctgtcttcctgcaagagttctgttgccaaggaatttcttaatgtcgctcattctgtccagggggtttggggcgattgggctttgaaaaaatattcttaaaagtttgtttagcagaaaataatcacttttacattttgtgcaaaacattttacattttcagataatttaaatgagcactacatactgtcagtgtgaatgtagggccttgaaagcattttgcttttttttttttttttttttttttgagcttggttataaaagcaatctcctgtgttaaaaacgtgtgaatagtttgataatttgtacacataatcaagagcatctcagctggactttgtgttggctgctgtatagaacatgaacaaatgtcaagggatagaaaattactttggatatttaaaagagaagaaatatatagtctatttgttttgtaacaagtttctgtaaataaaataatttatactatttataagaaa

SEQ ID NO: 218555 - DNA, 1050 bp, Homo sapiens
tcccttttagtgtctcgggagtggattcatacagatgaagtgggcattgcttcttcctggttgcctggtttcccgatagactacatgtaactaagtgacacactgcttttcttttgttagtattttatgtgtgggagtatgtgactgcgtgtgtgtgtgcctgtgcgtgtgtgtgtatactcagcacatgtatgttactatgtgatgtggtttaaaactaatggaaaaaactgaaagtgcctgaaactagttttaagcttagacagaatctctttaaaaagacttgaatgttcagttgaacttttggagtttgctttttccacctaaatattgtttctaaaattttaggggcggagttgaaaaccaccaatgctggtaattttataaggtattttaaaattaagacctcttggttcatagtaattcaattggtgatggattgcctggtggcaccaagggttacagatctttttgtcagccagcaacttacacgatgtgtccgttttgttattcactcatgaaatacaatttaaaatatttaaaatattttgtattccaaaaatataatacaaagaagtacctctgagaacattgaaaaaaatgtataatttgaaaaatgtaacttataagggcagctgtcttcctgcaagagttctgttgccaaggaatttcttaatgtcgctcattctgtccagggggtttggggcgattgggctttgaaaaaatattcttaaaagtttgtttagcagaaaataatcacttttacattttgtgcaaaacattttacattttcagataatttaaatgagcactacatactgtcagtgtgaatgtagggccttgaaagcattttgcttttttttttttttttttttttttgagcttggttataaaagcaatctcctgtgttaaaaacgtgtgaatagtttgataatttgtacacataatcaagagcatctcagctggactttgtgttggctgctgtatagaacatgtccccgtacatcgttagaagcttgaattcgagcagtagtagtagtaggcggccgc

SEQ ID NO: 218556 - DNA, 587 bp, Homo sapiens
gctcacgcctgtaatcccagcactttgggaggccgaggcgggtggatcacgaggtcaggagatcgagaccatcctggctaacacagtgaaaccccgtctctactaaaaatacaaaaatttagccaggcatagtggcgggcgcctgtagtcccagctacttgggaggctgaggcaggagaatggcataaacctgggaggtggagcttgcagtgagccgagattgcgccagtgcactccagcctgggtgacagagccagactccatctcaaaaaaaaaaaagaacatatcacagtatttacccaaatgaattgaaaacttatctctacataaaaacctgcacttggatgttacaacagctttatttgtaattgctaaaacttggaagcaaccagaatatccttcagtacgtgaatgaatacataaattatgatacgtccagacaatggaatgctattcagtgctcggaaggtatgaggtaccacgctatgaaaagacatggaggaaatgtaaatgcatattactaagtgaaagaagccaatgtgaaaaggtcacacactgcatggctccaactgtatgacattctggaa

SEQ ID NO: 218557 - DNA, 616 bp, Homo sapiens
agtataacagtgatagaagttatttccattttcagcccttcattcatggacctgggaatcctagcttttagagaaagggcactatacataggtcactgattcagagcatatgctatatcctggaggacattatcccagccttcaaagcattgccacccagccagtgccataactgaatattccaaaaaccacttaacccatcaggtcagctgcttcgggttgatggtgtattagtcagttctcatgcttctaataaagacatactcaagattgaataatttataaacaaaaaaggctttaatggactcacagctcctcatggctggggaggactcaccatcatggcagaaggcaaaggaggagaaaggcacatcttacatggtgtcaggcaagagagcttgtgcaggggaactcccatttataaaaccatcagatcttgtgagacaaccatgagaacagtgtgggggaaaccgcccccatgattcaattatctccaccagagtccctcccacgacacatgagaattatgggagctacaattcaagatgtgatttgggtggggacacagcaaaatcatattagatggggacatgataacatcaataaattttattag

SEQ ID NO: 218558 - DNA, 645 bp, Homo sapiens
gctcatgccagtaatcctagcattttgggaggcaggggcaggtgaattgcttgagcccagcagttcaagaccagcctgggcaacaaggcaaaaccctgtctctactggaaaaaaaaaaaaaaaaagggtatttgacatgtaatagctttggatgactttttaaaaataataaataggagtaattaggccaggcacagtggctcatgcctgtaattccaacactttgggaggctaaggtgggaaattcctttgaatccaggagttagagactgcagtgagctatgattgagacactgcattccagcctgggagagagagtgacaccccatctcaaaataaaaaaaaaagaattctctggcttaggcaaagacttggttttatatggcttggggtcaatggacaggtaagatgatgctgattgatactgactatggcagctctcctccatgtttctgtttcttaagagttcacgggtgtagaagaggctacaagtattggaaagtactggtataactggtctcaaccatttttggagattgccagtacaaaggaatataacttacttcctgtatgaatcatataccaaaggcaattgctttcctcattgttgatgaactactgtaacagaaaaggtctgcttatagt

SEQ ID NO: 218559 - DNA, 239 bp, Homo sapiens
atcccccccaccccaccaccaacctttctcccagaggttttaatatccattgatgattatctctccaggtctgaatttcttctataccagcaggaagcccagcataaggacgagctttctctctcactgtttggtcactggggcaggaattgcaggctggcgtaggttgcagtgagctgagattgtgccactgcactccagcctgggcaacagaacgagactccgtctcaaaacaaaaa

SEQ ID NO: 218560 - DNA, 434 bp, Homo sapiens
ctggtgaattctgtcctaatctcctcttcttataaggacatcagtcgtaatggattagggtccactctaatgacctcattttaccttaattactttttttgtaaaggctgtgtcttcaaataaagtcacattctgaggccccggggcttaggacatcaacatggattttgggggaacataatttagctcataatacattataaatgtcattttaaaatgtttgttttaatgagaaacctttataaaagaaaaaattttcagtttccttagtattaacataaattattttaaaataatgccacttcaaaatgtacaaacatagaaaggtataagctttttatgtatatagctgttgtacaattatacatctaagtagatttccaagtgaatataagattccagaccaataaagttcatgttaataatgatataat

SEQ ID NO: 218561 - DNA, 525 bp, Homo sapiens
aaaacgccactgcactccaacttgggcaacagagcaagactttgtctcaaaaaaaaaaaaaaataccaattttattcaatatttacatgcacaaaggttttcatagaaaagaagatccaaagaaatggttaaatttggggggctttatactattgtgtccggaattggtgggttctcggtctcactgacttcaagaatgaagccgcagaccctcgcggtgagtgttacagctcttaaggtggcgcctctggagtttgtcccttctgatgttcagatgtgttcagagtttcttccttctgatgggttcgtggtctcgctggctcaggagtgaagctgcagaccttggcggtgagtgttaacagctcttaaggaggcgcgtctggagttgttcggtcctccctgtgggctcgtggtcttgctggctcatgagtgaagctgcagaccttcgtggtgagtgttacagctcataaaagcagcatggacccaaagagtgagcagtagcaagactcactgcaaacagcaaaa

SEQ ID NO: 218562 - DNA, 498 bp, Homo sapiens
ttctctttcaatcctcttccaccttcaggaaactgccttccatccgccgaggaatctccaggctgcacatgtggccacaggaggccccatccctgcagactggggaaggcgcgcccttctgatcttgcaagtagacacatggggcccaatcgcaagggttcctcggtcagtgttcgctcagataggggacatggctctgggcaggacagcgctggccaaaggacgaagtgactgacctgcagccactcagactctcagacttgagataggagccccagcactgccaagtcctacttgtgggctgggtcaaaccaggttagctttccgaggtcttgccaggacacctgcttcccaggcttgttgtgagaattaggcaagacaatgttcacagagtctctggtacatcacacggagaagacagaggaccacaggtattccctaggagacctgtcacttcactgctcaggatttcagcccctcccggtacgtgatctcatg

SEQ ID NO: 218563 - DNA, 190 bp, Homo sapiens
acttatggatacacaagcagtttattaatcaatacagaaggaaatactaatatcatttttattgaaaacgatggaccctatttgcaaccctatctctacaaagaatgcacatatatgaacatatgcattggcatgcactggtacaaatacacaccataaaacaacacaaaaacaaaaataaacccagaac

SEQ ID NO: 218564 - DNA, 388 bp, Homo sapiens
gctggttggtgcaggtactccaatctcaggctaaatgacaaagacatcttggagaatacgtttctattcggtattacttcttagatttcttgagttttcctttaggcatcaacgttgagaaatagaacaggtggttcaacataaatatgcaactacacagtttatattagctaaattcagcagacaagaaatggatcttgagtgcctagatacactgtgagatggaagattcaaattaacattttcatacaaaactgaacttctttgttgacattgtttatttgaggcacagtccttttgcaaagtcttgcacagatcttaccacaagtaatgctaaatgtttctgtttgacttcaattctaattatgatttacctaattccattgtg

SEQ ID NO: 218565 - DNA, 519 bp, Homo sapiens
cagtgactcacacctataatcagagcactttgggaggccaaggcaggcagatcacctgagttcaggagttcaagaccaccctgaccaacatggagaaaccccatctctactaaaaatacaaaaaattagccgggcatggtggtacatgcctgtaatcccagctacttgggaggctgaggcaggagaatcgcttgaacctgggaggcagaggttgcagtgagccgagatcacgccactgcactgcagcctgagtgatgaaagccaaactccatctcaataaataaataaataaagaggcaactagctaagccttttgcccttccaccttctgccatgtaagaacacagagttcgtccccttcagaggatccagcaacaaggcacctgccatctcggaagcagaaaccagaccctctgaacttgccagtgtcttgacccttcagaactgtgagaaataaatttctgttctttataaatcacccagtctcaagtactttgttatagcagcacaaagggactg

SEQ ID NO: 218566 - DNA, 493 bp, Homo sapiens
tggggcgttggtagtgacaatcaaaaaaatagcctcaatgtatccataattgatcaggacactcagagcattcttgtataactccccaatgaagctaggctactgacgaatttcactaaatacacttgcccacatttaacagagtggtcaccagtccgtggccacagcaaacataggaatttactcctaagaaactagaaataacctaataatgtaaaggatctttcacataaatattctctaaatgttcaaaagaaatacaggcataggatccataaaccaagacaaacacagtataacctttatagctcactttaaacatcgtttacataatacgcattgccatgatgtataacactgaaaggaaacctgattctatttccatgttttgcctttaatatcaataatgtatacagatattaaaaaaaggatattttgttttttgcttgtaaattcattaagattaataaaaaggacatattaatatatttta

SEQ ID NO: 218567 - DNA, 589 bp, Homo sapiens
ctgatctagaggacccggtgattgaaacagcccagagatcatttgacctcaagtatatctccctttcctggagttgtagaaggatgttgaaatatttattttctggatttggctttccagagggagatgaagaaagttatatatcaaacactgatgacctcatgggagcaataccacttttgtttctttataattcagtttgctgctgctatttcttctcctttctaggaaaaatattccatgggcttctttggaaattaaggtaaatttgatgactgggctttgatgcaaattttatgcatgatgttttattttattgtgtgattttaaaaaatgtgtataaataatatttttcaaggtcttttatgtgttagtgttaaaatgaatattctcctcttttgccagcgctcactattaacagaaaaatgtatatcttttaaaaacaacaaaccaggcataatataataatgctctgaaaattgctattgctgttttcccttaacaccttgtggaaaattatgtctgtacatacagatccacctcatccctgtgtatttgtgttctactccattgccagaattctttcagt

SEQ ID NO: 218568 - DNA, 331 bp, Homo sapiens
gggcagggctccctgctgggtgctaagaacatgataccatgtcagagtaggcccttgcccgtgtagggtttatgatctaaacaggtggacgggtcagtcacctactctaaggtgactaacagtactaaggcacaccatggaaagagtcaaacgtggttcagtgaccagaggaagatgaaagcacagaaccagtgtattcgggaaagaatttattaagaattaaactggacctggaagatgcagagataaggaagacttttatcctttttttctaggaaagaataagaaattgagcaaatgcttagtatgctcaggtaggaccaagaaggag

SEQ ID NO: 218569 - DNA, 405 bp, Homo sapiens
cattaattctcttatttctgtgcaaataaaaacatatttaagttcaccttcccataaaattaataatgaattaagaatcatagacctggccgggcacagtggctcacgcctgtagatcccagcactttgggaggctgaggcaggcggatcacaaggtcaggagatcgagacctgactaacacggtctggctaacacggtgaaaccccatcctggctaacacggtgaaaccccatctctactgaaaatacaaaaaaattagacgggcatggtggcgggcgcctgtagtccgagctactcaggaggctgaggcaggagaatggcgtgaaccaggaggcggagtttgcagtgagccgagatcacgccactgcactccagcttgggcaacagagcgagactccgtctca

SEQ ID NO: 218570 - DNA, 412 bp, Homo sapiens
agcaatgcacagtgtaatcagagaaagagtccttggtcaaatgagatcagtacaagagagaaggcaatactaggggtttgggagtccctgagccaactagactactcagtgaggacttcccggaagaggtcatgcctgacatgagtcttaaggatatgagaactggacaaagtataaaatacaaatgcaacaaaaagtccatgtgcctgcattagaggacacagtgagagaagccaaggtcagtgggatggcaggaagtcctcttagaagctgctcgttctcctttgctgtgcaccagcaggtgctctcaggtctgaactccttttcctaacagaagtctgcctctgcagtaactctgactcctccttagtgcttgttacagggaattaaatttcttttgaatagatctacc

SEQ ID NO: 218571 - DNA, 199 bp, Homo sapiens
attccgactaatgagtctggggggcaagccgagttcttccaagcagaaagcaagcaagtgaaatctctctctcacttacttctctctctgtggccaatgccatctgctagctttaaaaataatttttaaaacaagtgttttggttctcttcaacgtgcagcaaagacagatgctatttttaggcttgttttctattaaa

SEQ ID NO: 218572 - DNA, 256 bp, Homo sapiens
tggcataatttaggtgatataattacaattacatttttatacttcattaatcattacttccctaagatctcagaaagcagtcgtttactggtatatttgcataacactgataatgaaaaaattgcagtaagtccttttgtttaagatacagtcaagagaggccatcaatcattgtctaaaattcatacaattttactactatatgaaaacttgctgtctttatgccatttaaacttttaaatgaagactcacatta

SEQ ID NO: 218573 - DNA, 270 bp, Homo sapiens
aaagctgggtgcagttttggttatttaataactatttttttgttgcatcgtgttttttgagacttgctttgagtcttgctctattgcccagattggagtggagtggtgccatcttggctcactgctacctccacctcccagtttcaagtgattcttgttcctcaggaggctgaggcaggagaatggcgtgaacctgggaggcagagcttgcagtgagccgagattgcgccactgcactccagcctgggcgacagaggagactctgtctca

SEQ ID NO: 218574 - DNA, 366 bp, Homo sapiens
gcctcggcctcccaaagtgctgggattacaggcatgagccaccgtgcccagtctcaaagcaagtttttaaataagtaactggctgaataactaagaaatagttttcaaattaaaattcaaggggaaaataagaaaatgttatatcaacattaccaagagctgtctggaataaagacatagtaaaggcattcatgcatgcaacaactgtcgtcaatctaaatgatgcctaatcatgctactatttcaaacctaaaaggtaattcaaaattctctcgataatgagataatgccgtaacaggcaggcataaaggagctaaaaatacaaatgatcaaatatggataaatgacagaaaagggaaagaaaat

SEQ ID NO: 218575 - DNA, 534 bp, Homo sapiens
cctccttcttgggactggtctggtctgaggtgatgaggcctcgaatgaggtccgtggcagtggagcagggatgcagacatggatgacagagtcactgaaatggtacaaccagcattatgataaaacagagaaaagtcaaatgtgggcctggtgcggtggctcacgcctgtaatcccaacaatttgggaggccaaggcgggcagatcacgaggtcaggagacagagaccatcgtggccaacatggtgaaaccccctctctactaaaaatacaaaaattagctgggcgtggtggcgcgtgcctgtaatcccagctactccggaggctgaggcaggagaatcacttgaaccagggagtcggaggttgcagtgagcggagatcgcgccagtgcactccagcctggcgacaaagcgagactccatctgaaaaaaataaaataaaataaaaaataaacatgcccataacacggactccactcctaggtataatacgtcaccatagcagtactttcttggttttttttttgagacatggtc

SEQ ID NO: 218576 - DNA, 464 bp, Homo sapiens
ggtgcttgtcacaattatttgaggagtttcctcgaacaattcctaactttcctttccttctcccaaaatcacttcataaagctcctcagtgattcgctacctccctgaggtggaaagattgcacactattgctttgattattcaagaggtctcattacctgaatattcataatcccaggcattataattatagcactccacagagaagtaaaatattatcaataaattgaccacttacacaattagctccctcaatcatgcctccctgactaatactatcttggtagtatctgctggaaagcctagctgatttttggatggcatttcaatgcaaagtgattacaaaatgaagatgaaaagatggagaatttcatgaagttgattaaactgatgctggtgatgctggggaactctaaatcacaagcaagaaaagtgaaaatcagtgtatgaaggccagataattg

SEQ ID NO: 218577 - DNA, 447 bp, Homo sapiens
tttgaccattttgactcataattttaacttaattgggagggaaaaagaaaattcatactaaaaacccaaagcattaagtgtgacatcagggataggaatacattaaaatgctgggcttttaattgccacagaaaagcaatatgtatttgtgtgtaatagttcaagttgctgtgcaattcaaactgttctcggtggctcatggtaactcccatctttttttaaaaaataaaaaaaggcctcccccacatttatttatttatttcagatagagtcttgctctattgcccaggctagaatgcagtggcatgatctcagagcgagagtccatctcaaaacaaaaacaaaaacaaagttccttacatcctggagcatacattcatgatgtaacataccaataggaaatacagagtggtaatatatgacagaaaaaacaatgaagcagggtaa

SEQ ID NO: 218578 - DNA, 257 bp, Homo sapiens
gaagagatgggttttaaccaaccaagggacgtaatggttccattccctggggttcttccagttttctattcctggaggagagggaccaggacttttccatactttgcaacttcttactgctcaccatccaccctcgatcacaatcccagatgtgagttatggatatttaatacagatttgtgtgcaaatgaattggaaagaaggggatagaaacatcagtgggttaccccaagcgagtcagaactttttgcatcaat

SEQ ID NO: 218579 - DNA, 807 bp, Homo sapiens
acaatgctaggtggtagatatggttttatcatttactgctggaagcatgtagggacagatatataagaacttatccaaggtgggcacagtggtgcatgcctgcaggcccagctactcaggaggccaaggtgggaggattgcttgagcccaggagtttgaggccagtctgggcaacacagtgagatcaggtctcttaaaaataaataaataagaaagaaaatataacttatccaaggactagaaccaggaaatagagctgggattcaaatccagtgtgactcttctggtgattattttccctgaggtgctgagaaagcttttcagatcactgaacagaaatgaaatctttgttacatctggagaagcaggtagattcctccttgggagtaaaaaaaaaaaaaaaaaaaaagactcaggttgaagaaaacggtcacacccaggttccctactgagatgactaggccattcaattaaatcaaccagagggcaagtctcctgcctcctttctcagtgtagtctctggaaatttattaagtctgtctgctgttctgagttctggtcaagtctcactgtttggggaccactgatcaatgtgattaccacagatcttgttttcttttcctgtggctatctatattgcagccatgttactgcttaccagctcaatgttaaagcttaggcaatctgaaattctagagaggaagagataagtgcataacttgaatagctgttgaacagctgttgtaactggagctgttgtaacgtggagctgttgtaactggagctgttaactgggaccggctgata

SEQ ID NO: 218580 - DNA, 364 bp, Homo sapiens
agaaaattcttacttaaggaaactgaagccactatttgtgtttggaaaccaagagccttaacttacgtgaattcaatttagttattatacactacacctgtgctcttcagaattgtgccagattcccactactctccctctcattttactcctaatctttcttttcaaacacctgcccttctaccatttttttacaatattcattttgaaaacgtgtagtttttttctggagcaaactcaggcacagtcttttaaaagttggttaaattgattagtaaaattgataagattaatgataattaataataatagttattcaccaagatcagtggttatagtcaataaacaatttcttttcttttcc

SEQ ID NO: 218581 - DNA, 350 bp, Homo sapiens
tagccaagactattagtgcaagagctgagtaactgtatttatttctgtgtgagaagactgaagcctaagagtaaagcatgttagctgggcactgtggctcacatctgtaataccagcactttgggaggctgaggcgggtggatcacctgaggtcaggagttcgagacaagcctggccaacatggcaaaaccccatctctactaaaaatacaaaaattagccgggtgtggtggcgggcacctgtaatcccagctacttggaagactgaggcaggacaattaattgaacctagaaggcagaggttgcagtgagctgagatcgcgccattgcactccagcctgggcaacaaga

SEQ ID NO: 218582 - DNA, 382 bp, Homo sapiens
aatggaggatttgcacttaatgaccaacccataggtttactcttatattacaagatttccatactctgaagaaaggagctgctagattatttgttgtctcaggcagggttgagatgtgctgtcgggagatggtggctgtacttgggcaatgtcttccatcttcagagggaagagcatctgaactctcgggactgccagcccagccctttcataattagtgaattcacttagttgtccacccaactccaacccctcaccccagcttaaagtaacgttggagagaaagggttctaagtcagcttttctgaaggcagtggtagcagactgatttttacaagcctttctcttagtaggaagccatcgtagcatcaaagcacactta

SEQ ID NO: 218583 - DNA, 599 bp, Homo sapiens
tataaatgccagtgcaaaaaaccaattcaggcagccacttgggacaggagagccctggggatcagagaggtggcccaggacaacagcagtgaccactgtgtggcggccacagtcgagagatctgcgcccgagcctgtcttcctgttgtggagtcagtccctgtctctgccatttcagcaccagcttcctttagaccatgtggaaaagagagataaactgtccctccaaaccagcgggtgagataagggcactcctgtctgtccctgtgtgtcctacacggggtcctgggcatcagggcctgtgcctttgggaaaggcaggaagaggcggctccccatggggaggcagggctttggccaggaatcatttagcggggaaaggaaggaaaaggtcagcaaagtgttcccattacaggggggacagcaatcaaagccccccactgtcaatggcaggaggagaggcggtgtgaaaaccacatggcaatcagggtctagaaacaaaacctgaaatctcgctgtgcactgggagggtgggagactcacctggacccttgccaactggagtggagaaggtcacagatcccacagagccaggccctcc

SEQ ID NO: 218584 - DNA, 415 bp, Homo sapiens
attctttaaaaacttttcgagcacattttacatttcttctttaaaaaaaaaaaatctctgcgtatttattttactggattcttaaactgttacttttttattaaaaagaaaaagctttgggctgggcacagtggctcatgcctgtaatcccgtcattttgggagactgaggcaggtggatcccttgaggtcaggagttagagaccagcctgaccaacatggtgagaccctgtctccattaaaaaatatatatatatacacaaaaattagccaggcatggttgtgtgtgcctgtagtcccagctgctgaggaggctgaggcaggagaatcacttgaacccaggaggcagaggttgcagtgagcccagatcacgccactgcactccagcctaggcaatagagtgagactctgtctca

SEQ ID NO: 218585 - DNA, 199 bp, Homo sapiens
ctgtttcattcttttgtctcaactcaccacatggaaatttcttgcccttgagaatacctctcttgccactaagtgtgaggacgacgttggttcctgggtcccacctgactagtgtgacgagtcacgtgacgcaaggagaataacgggcctgtgttctcgggctttttgtttccgtcaagcttcatgacctgcaggaagt

SEQ ID NO: 218586 - DNA, 531 bp, Homo sapiens
aatgatgctatttcagattgagtaattagacaaggtaagttgatattttgattgatacctgaataagtaagggagccagtcatgcaaaaatatggcagaaaagcattctagacagaggcaataggatgcgcaaaggtcttgaggctagtgtttgatgtgttcttgggccaataagggagtgcattttttctgaagcagggtgagtcaggaggagagtaaaagatgaggtcagattgtgtagaacattttaaaccatggtaaggacttaggacttgattctgtaagaagtagaagccactgtagatacatgatatggcttgagttttaaaatgataatgccagcctgtgaattgagaacagactagagagtcggaagggtggaagcttggagaccagtttggaggctattgaaataatccaggcagaagatagtggatgaggttgacattgggatggggtggtaagtggttggcgtgggctatatttttaaatagtctggaggaattgctgatgaatgggacatggaatgtg

SEQ ID NO: 218587 - DNA, 218 bp, Homo sapiens
gctttttcccaagatctccagttgctcctggtaacatcaaatgaagacagaaattcttgtattgcccatgcgagattccccaagtccctcatcctacagacccaagaaggaagcatgtgaagagagcgaagctaaacgttgaaggtcctggttggagttggtggtcaactccactgttgcttggatcactaggcattaaagggttctgaggctgcatt

SEQ ID NO: 218588 - DNA, 330 bp, Homo sapiens
gtggtagatgtcgactcctatttatgtaagagtccttttcccttaataacatggatccctaaattttctctattaagctgttaaattttacatttaattaagcatgagttaaaattgtaagtttccaaaaccataactcaaataataaatgaagtgccaccttcatcatattaaaccaatgttctgaatattcattgttcagggttttatgatattaaaagtgaacatcttagttcactagtggtatggaagctagagctagtttttgttgttgttttgacacggagtctcgctctgttgctaggctggagttcagtggcgcgatctcag

SEQ ID NO: 218589 - DNA, 380 bp, Homo sapiens
cgcttttgtatgtcaatcatatctcaataaagtggttaaaaacaaagaaacaaaacaaaacagaagctagtcacaaggaaccacatattaaataattctgttcatatgaaacatgcagaaaacaaatcaatagagacagaaagtagatgagtggttgccaagggcttgggatgagatgggggactgaagagtgatgactgaagggcatagggtttctttgggggcttccaaaaactgtctgaaattgattgtggtgacagttgtataatgctgtgattatacaaaaattattgaattgtatactttaagggaattgaatagtgtgtaaattatatttcaataaagctgtttttaacaaaataaaacatttctaaatgctt

SEQ ID NO: 218590 - DNA, 441 bp, Homo sapiens
gaaagaaacaaattctctcaagcatcctaatcagtttccttttcagtcttcttatccaagcaaatggattatttctcaacaattttatcttcaatgttcattcagtttatatagtgactcagaagggttgtagctatacttcttgtagcctttccctgtgtagaaaaaagacccgtgtacactacagcatttaagttgagtttctctgcatcaaagtcaaaatgcaaaaatttgcacgcacacacacacacacacacacacacacccccactcacccacacaaaccaaaaaccatctactgaccctatcatctgcagacattccctcaaggggctttccagggagctaccaactcttacaggccccatcactctgaccaagctgcctggacagtggtgacaccttaccacccattgataaccagcttcctgtctggtggag

SEQ ID NO: 218591 - DNA, 495 bp, Homo sapiens
catggagctgccttccagctggggtggagagtgggagtgaggcaaacaaaaggacttttgatagggtctcagtgtgggggacagccagccagtgaggcctgaggcctcattattcctacaaagaaaagtacatgcctttgtaccagaagaaatgtcacatttgcacagcagagcaagaggtatctggaaaaacatacaggagtataagaaggacaaaatttaagagcaactttatggtctgttctaaagaccagaattcactgcagtatatttagaattgtgatctttgacaaataaggatcaccatgtctggacttttttgggaaagcacttttgaacccttaactacgaagttttgctcttgcgatgtctttgagacccttcttttagtttactccagcggaatgtaactcgtggcataactaagcatggcacaagagagtagacagatccagatgggcccttgggtcttctagaacgtccttggctatttta

SEQ ID NO: 218592 - DNA, 437 bp, Homo sapiens
gagtgtagtggcacaagctcagctcactgcaacctccacctcccaggttcaagcgattctcctgcctcagcctcccaagtagctgggattacaggggcacaccagcacccccagctaatttttatattttcagtagagatggggtttcaccatgttggtcaggctggtctcgaactcctgagctcgtgatccacccacttcggcctcccaaagtgctgggattataggcatgagccaccgtgcccgacctgtgcattttttaaaataaagttttggccatagtaatggtgcctcagtgtgaatcaggcacagccttacagatgtgggacacgtggcacttagagggcactccctctgctgtggctggggatgtcgtggacgtagatggtgacgggggatagggccaccaggggctcacgcctctgtgtcatcgccta

SEQ ID NO: 218593 - DNA, 107 bp, Homo sapiens
aactaatcctatttagctttatgctggtctacaataaataattcatacttgatatttcaaatgctgtattatttatgtaaattttctcctaaaagactcacctaaga

SEQ ID NO: 218594 - DNA, 396 bp, Homo sapiens
agggtgtttttttttttctcttcaatttcttactttggggaaaactctggaaatgctgtgtgtttttggagatttccaggggttattgtaggaagggtagaagactcccccatccacactggggtgaccctctgggaagggtagaagactcccccatccgcactgggatgaccctctgggtgccaccgacttccctgtctgcagaccctcggaagctgctgttccggctctagtggaagtgactcctcatgattagaaaaggcattttcagcacaaaactctatagttttgcatcatgctgccttactcttctttccattagggtgaacaaatgttttataacaacttatcaggtatctacttgtcacctataataaaaacgctgagcacttgcta

SEQ ID NO: 218595 - DNA, 638 bp, Homo sapiens
accaaaatttctcttttcaatctttgcaaattaaaaaggaatcttgccaagaataaacaaatcttcatttcatacctaattttaaaacgaattgtgtccccaaatatggtctattctggctaatcattttttaagcaaatcctcacttactttttctgagtcactttagtatgtaactaggataaatttcatagttgatcagaatgcaaatgttctaacttgacatttttgcccaagatacgttctttccaggtatagctgaattaagtaggaaaaatataaataattgctcttttaaaactataacaacttgaatgcctgcggttttatttccatctaatttaaaagttatctgtaacctttgtttgatagaaggtctgttgaagtgtctaagaaccatgttgaaatatttgtgataaataggccacaacttaaggatattatgcccaaaagtgaactgacagaggaaagtactcttcatataactgcacagtgaacaatttagaaagggaacagatgaccagacacagtggctcatgcctgtaatcccaaagctttgggaagttgaggtgaaagaatcacttgaggccaggagttcaagaccagcttgggcaaaatagtgagaccgtatctctaca

SEQ ID NO: 218596 - DNA, 405 bp, Homo sapiens
tacctcttcaatgcctctttcagcaatatgaagttaaaaccagaccactttcattacatcgccactgcgaataccacctgtactgtgtcaagtacaaaaaaaactccagacttggcccagtccggaggcacaagcccacttgcgccagcagcgcgcctcagcaagacagcagaagcaggaagagagccggccggaagacacttaccctggccggaagacatgtacccctgaggatcgcgagaggccatccggttgctgcgtagcagtcccgtcagactggaacacttcctgtttacaggacactgtaaaacccctgctcagcactcatttggtgctgacgccattttaggtctcataccgtctgcacccaggcgcccaataaaacagcatgttgctccacaccac

SEQ ID NO: 218597 - DNA, 379 bp, Homo sapiens
tctgctgctccaggctgagggtgggtccaggatcaggggcccgggagaaggagagtttggctaaccagcactctgttctggtggatcggcccagtccggaggcacaagcccacttgcgccagcagcgcgcctcagcaagacagcagaagcaggaagagagccggccggaagacacttaccctggccggaagacatgtacccctgaggatcgcgagaggccatccggttgctgcgtagcagtcccgtcagactggaacacttcctgtttacaggacactgtaaaacccctgctcagcactcatttggtgctgacgccattttaggtctcataccgtctgcacccaggcgcccaataaaacagcatgttgctccacaccac

SEQ ID NO: 218598 - DNA, 373 bp, Homo sapiens
tgctttttttagcctgcgtgacaaagacatgagctcacgattattacagcatccagccgaacagcaaggattcaaaatgaatatgggaagatatctccccaaatcactgtcttattttgtcttatgactacagcatttctgattcttaatttattcacagaccactttcattacatcgccactgcgaataccacctgtactgtgtcaagtacaaaaaaaactccagacttggtaaggagtcactttatagaaaaggattattacaagaggaaggggaaggggctgttgtaataggaagagggggactatttcaatagggagaacgctcctaaaatgaaatctgccagcatctcaaaggttgggtagaaagggg

SEQ ID NO: 218599 - DNA, 464 bp, Homo sapiens
gcttccagatagggaaaaggagggtcaggtgcctgaagctgggtgggggtgtgtgtccgcattttctcaaccattttctgaactctaaaagacagaccagaccccgctgcacagccttggggtgctggctgggccccttcccaacccagcacctcacttctggtctcctaaatcctctcctctctcctcctgaggggtagggtaggtggcgtcctgtgccacaggtgccacactggacatgtcaggccagagacactggaggccggcagtgggcaggaccaggcctccgggagggagcgtgcgaggacaccacgccctcaggccggacccccacccagctctgccaagtcccagtccccaccacctgaggcctccccagtacccctgcgaaaagggtgacaactgggctttgcccatctccccaccgccctcttccccagctagacccacaaggaaggcggccg

SEQ ID NO: 218600 - DNA, 482 bp, Homo sapiens
gcttccagatagggaaaaggagggtcaggtgcctgaagctgggtgggggtgtgtgtccgcattttctcaaccattttctgaactctaaaagacagaccagaccccgctgcacagccttggggtgctggctgggccccttcccaacccagcacctcacttctggtctcctaaatcctctcctctctcctcctgaggggtagggtaggtggcgtcctgtgccacaggtgccacactggacatgtcaggccagagacactggaggccggcagtgggcaggaccaggcctccgggagggagcgtgcgaggacaccacgccctcaggccggacccccacccagctctgccaagtcccagtccccaccacctgaggcctccccagtacccctgcgaaaagggtgacaactgggctttgctcaatgccccgggcaggcccatctccccaccgccctcttccccagctagacccacaaggaaggcggccg

SEQ ID NO: 218601 - DNA, 434 bp, Homo sapiens
ggctctgtcattcagtgtcctttctcctgctgggaagggcacatcctgtggctgggtggctcggctgggagatggacccagatcctctggagagctgccccccaacctccctgcaatgggaaaggtgcttaccgcacagcctcagagagcttcccactgggctgccctgtacaggacaggagtagcaactgtgccccagaggtgtagtccccatgtggtctgctccctgggcctttaaaatggggggaaataaagtcagaatgaagacttatagatctgctgagaagagcaaatgcgctggcatacaggacagcacactggccactgacacacactccccaggttacaacacaactgtgttgatgtggatgatgatgatgatgatgatgttaatataatacatttgatataattatatgtcataataattattg

SEQ ID NO: 218602 - DNA, 412 bp, Homo sapiens
acttgctttcctagagtttgacatgtggtgagggaggttttttttctttaaaaaagattactagcagttggaaaaaattaaaaggcatatggcaagtgttcaagaaaagtttttgatttaagaaccatcttgaccgggggcggtggcttacgcctgtaatcccagcactttgggaggccgaggcaggcggatcacctgatgttgggagttcgagaccagcctggccaacatggtagaaaccccgtctctactaaaaatacaaaattatccgggcgtggtggcacacgcctgtaatcccagctactcgggaggctgaggcaggaaaatcacttaaacctggaaggaggaggttgcagtgagccaagatcagcgacactgcagtccagcctgggcgacagagctagactatctc

SEQ ID NO: 218603 - DNA, 469 bp, Homo sapiens
gtacacacgagtatggctgtagaagtcaggatacaaaaaaataaaagctaggttaggagaccaaagaaaaactgggggcaaaatctaaatgatgaattggaaaaatatttttctgttggattgtaggaagagaagataaacaaagtagttagtatcttccattttaataattggtttggaaatattttttcatggaggataagggttttattggggtgctagtattttccataattaggcttacagtatttctgaagataatacataatttttaaaaggcataattaaatagaacatcctcattgtgtttttgtgcctcacagacttatgaatattgcagtttgtggattattctgttattacaaaatatttttacatttcgaaagaatatatgtggcaagatgagaggaatccaattttaaattctaaggcaaatattaaagaatacatgtatgccttcatagagtag

SEQ ID NO: 218604 - DNA, 1068 bp, Homo sapiens
tcttgggtagacttgtgactttaattgtttccgtactcactgttgggtttcacctggctggatcgcagaatcggaatcctgatgcccttactggaaatgtaaatgtgttggcagctaaaattgctgttctgtcgtccagttgcacgatccaagcctacgtaacatggaacttaattactctctggcttcagaggtgggtagaagattctaatattcaggcctcatgtatgaaaaagaaacggtcgagatcttctaaaaaaagaacagaaaacggagtgggagtggaaacttcaaatagagtagactgtccgccaaagaggaaagagaaatcttcataatctttgcaagcgcattgattaatgtctgcaaaggaatctgctctttgaggtttctttctgcactagagatttttctgtttttgaaaatagttcgtgctcttcggtttttgttattgaactgtttcatgtattttttaaagacatttgaggggaggaggattattatgaatgggaaaaaaagattttggttgagactaaattactcatcgtcaaaataatgtcaaaatagttttggggatcaccactatattttgttttgatttttaacctttcaacattttcctaatgatttgcagagataactgcacaattttgcatatcaatgatactggttcttactcccaccagtgtttcataatactaacaagatggtctctcctagcaagattatgtgtttaatgcttgctttggggtaaaataaaagtacgaaaaaggtggaagtcaaatcagtattctgtaattgttagaatttattttttaagaacttacaactcagaaaagattgctagactcaccaaaataataaatgttctttattttacaggtagtgattattagtgcttcatccccatttaaaaaaacacagtactaatgggtaacacatatggaggtttgctgccatatatattgcatcaaaatatcattaattaatataaaaatattaaaatcattcctgtccattccacttgtaaatgggaattcatgaaattaaatattactttaaaaagga

SEQ ID NO: 218605 - DNA, 460 bp, Homo sapiens
gtttctaactgatgagatctgtgacaaatccctgtggtcagcagcaggcattggatatgtaactttattctgtcccattgatcttgtagtcaaccctggtctgttctgtattgttttaattacataatctttgtaataatctttaatacctggtggagtgctctgtttacttatttctgcataattaaccacccctaagcttaacttactcatggttctgcaggatgactgctctccatggttataggggtttctgcatggggcctctcacatgtgctacagtcaaacattagccggggccacagtcatctgaaactcacttacacggctgacaattgatgttggctgttgcctggagaagacatatgtggcctggtggaatggaatggtgactagattcaagaaagagcttcccaggagcaaggctaccaagagaccgaagtagaggcttcagtttctt

SEQ ID NO: 218606 - DNA, 352 bp, Homo sapiens
ccttctgtgatttctttcctttattctttcaccgaacacatccttactgagaccttctaggtgctgggtgctgttctagatcctgagaaagatatagagacctgtgggagacaggctcctccctgccttcaagaactttgcagttgggtaggaaaataagcctaatcaagttactaccctgtaaaggggaaagaagggagtgtctcaaaaggtgtgtgaaggatgaggaatggggaggggctcattagtctggcagggagctgttaacagagacaggcatgggcatcggatgaagaggacatagtcagtgtaagaaattaatgattaaatcatgagaaatatttattgagta

SEQ ID NO: 218607 - DNA, 524 bp, Homo sapiens
gtaaagtttaccaagaacaactggtttgattcaaggtattatattattttgcagtataggaaatgttatttagatttaacaaagggctgaacagagcagccagtccaaagacccaaataccaaaggattatctttaaatttagagaatgaaaaatgcaagagcattgtattttgggcatcagatgataattctttcagagaatatgcctgggtttttgtgtccttcaaatttcgtttgaatgaacattttatggatttttgtgacactgagggatatgttaaaataccattgcaaacatgtcaggcaactcaagtttagaagattctcaacttgaattattttagcattctgctatttgaattacttgggggaaaacaggagttgtatgacaatttggaggtccttttctttgtctcccaagtgagtttgtaggttcactgaatttccccaaagaagatcctgagacaagaatttgagtctaaggacatgagggagggggatgtgagacaggaatgggggaggt

SEQ ID NO: 218608 - DNA, 676 bp, Homo sapiens
gcagtatctatttccggaacatttcgtcgtcctaaacagaaaatctatacccattaaacattaactcctcattctctctttcccttggttcctggtaaccggcattctactttattttttatttttcatttatttttgtttttaaattttgtttaaatcagggagcaactgatggcagaaattacagtcattcagggtgtagtggctgcctactctgctttccgactctgaacttgactagtccagatacctaccataagtggaatcatccaatatttgtcctttgaagtttgacttgtttcactaagtgtaatgttttcaagtttcacacatattttggcatgtgtcagcacttcattccttttttggctgagtaatatttcattgtatgggtgtatcacattttgtttattcatttgtcagtgaacatttaggttgtcttcaacttttggctcttgtgaataatgctgtggtttattctgggaggatgctggtagatttactccttagtgaatgcaagttgctcaggaaacacgccacttttaggaaaaagtgttttttcctgtcagcaaattccatttgagtctgtagcattctgcaaggacaaacttttagagtggagatattttgttttgtgaccatggggccctgcaagccttagagttgcttaatataa

SEQ ID NO: 218609 - DNA, 516 bp, Homo sapiens
cacagaccctgttcactgtcaccggttttcacctgcacatatttgtgtgtgtggttctctgtggttttctctgatgtatagatttatgtaacaacaaatgcaaccaagattcagaactgttcgatcaccacagaataactaccatgtgatatccctttatcctggctccctacgccatccaacagggagcattttgagttccgccaccacctgtctcatggtgaaggggccacagatgccaggcctaccctgggctgttgctgcgtgtctctgaggccattgctgcgtgtctgtgaggccattgctgcctgtctgtgagcaggggcggcccatcctgcctgtgctgctgtcttattgatataatatcttcttttacaaatctatcttgccgtctgctctgtccccccttccattgacgattgtacctttgagtggctcatagaatcatcttgtgaaattggctctttttataaatcatcctctccctgtttcgtgttgcatccaacctgattttgg

SEQ ID NO: 218610 - DNA, 527 bp, Homo sapiens
  misc_feature (27)..(27): n is a, c, g, or t
  misc_feature (29)..(29): n is a, c, g, or t
ctcaggatactcaagaaggcatctatngnaaaaaacactgaagagcagtagtatctccaaaagcattttgaaatgtttaggtgtcagaagagttactggcattcagtgagaattaaggatgaaattaaacatcttgcaagaggccaggtgcagggctcacggctgtaatgccagcattttgggaggctgaggcaggaggaatttcccaaactttgactatatcttgttttcctttaaaaacaaaaaacgaaaaaaccagctgggattagaggtgcgagctactgtgtctggcctgctgtttcttgagtacattcgcttctcttttccttacatgttcatggctttcctgtgaccttatctttcctttcttggtatttcccatcatcaagagtaacttctaaaaatgttcatttgatcattttgtctgttattaggcaaaacaggcctaaaacaaatccaagataacagcggcttaacagagtaaaaatgtatttcttcctcaaataattttcattgaggatgtttca

SEQ ID NO: 218611 - DNA, 390 bp, Homo sapiens
ccacaagtgttggaaagattaatataactctcagaaaaaaaagaaaataaaaaagaagcctaaaataatttcagtgggaggaaaagatctcttggattccactagtcacagccaacactactctatggaaacattgtcctcttttcttctgtgcctgaactcccaaattaatttctagtttgaaaatattctgaccgggtgcagtggctcacacctgtaatccacacactttgagagactgagatggggggatcacttgaggccaagagttcaagaccagcctgggcaatgtaatgagacctctctataaaaaacacaaaaattagccaggtgtggtggtgcacacctgtagtctcaactactcagggggctgagcgagaaccctgtctc

SEQ ID NO: 218612 - DNA, 216 bp, Homo sapiens
acagacaataaacaaaataaatgaattttaaaaattagaggctgatagatgttttgaagaaaaagaatgcagacgagggaagtaagaacactgcagtggcaacatgctgcgtgtgtggagtggggggaggagcgttaattttaaacggtgttaccgggaaacaattactgaaaaggtgaccttttaatagaggcttgaaggaggggaagtggtgag

SEQ ID NO: 218613 - DNA, 436 bp, Homo sapiens
attttaggtggtctcccataaccatcatatacacgtttgtgacgtcatttacaaatcaacttgaaaatgtccctaagtagctgaatttaaccagttcacatttactatgattaacaatatgcttcaacttactcctgccatcttatcctttcctgtttttttaatttcttctcctaatgtttactggatcaagtgaggcaagcaaaacacagaggattcagttctttccagacactgcctgtttcaactataacaatgtggcaacaacagctccaggaagtagggcttgctgctctaccagactctcccgtcatcctccacagactgtagaaacaggacttacccttgagactaagtccctgtgggtcttgaccttatctcagaaaggggagcggggggcacacaaggatggaagagtatcaggggtaaaaaaaaa

SEQ ID NO: 218614 - DNA, 194 bp, Homo sapiens
ctgaacccatcttcagatgaatggatcttaaagagtgacaactgacggcctggcgtggtggctcacggttgtaatcccagctttgcaggcagaagcaggcagatcacgaggtcaagagatcgagaccatcctggccaacacggtgaaaccccgtctctactaaaaacacaaaaattagctgggcgtcgtggctc

SEQ ID NO: 218615 - DNA, 494 bp, Homo sapiens
agtctcccatctccagctaatttggccaagaatagtcacctggcgcaaggtggggagggagctctcaattggccagcaacttctgacgtgtgacctgactgaacaatgagaggctcgagtgaaattaccagctggtagtaggacagaggatatagatacatggaatggagctgagccaaattaatgacaaaggactagacaagaatgactgttgatgatcacctatgctgagatcacaaagctgccccgagtccagaagcaggttcactgagggaggctcaaccatgttaccaatcttgtttgagattaatgttccttgttgtaaacctcaagtctgtttcttgcaatcaaaccattctaaattgaaacaactacttagaaagtgtttctatgggttcagtgggacatttcaaccaaatgaaatatgataatgatcttaaatgaactaacaatagtgttgcagaaataaaatacaaataccagaaagatagcca

SEQ ID NO: 218616 - DNA, 594 bp, Homo sapiens
agcttcctgagcacaccaccacgcctggctaatttttaaaatttttttatttgtagagaaggagtcccactatgcagcacaggctggtctcgaactcctgggctcaagtgatcctcctgccttagcctcccaaagtgctggattacaggcatgagccatgttacctggcctgaatttttaatattaaatttccatttgaatttgggctatacaaaaaattaatagaattaatgttaattaaacttagaatttaagttacttcacaggaatttttatttaagtctgcttaggaattttttaggaacattaaattaaacattaaacattaacattgaaacaaacacagtcatctccattttaagcagaattcaaggagaactcattttattcttaagattgcttaaaatggagatgatcgtgtttgttttaattagacttcaaggctttgggatggggagtggaaacaaaaacaaaatacttagcctctttttctctttttctttcaatttaattaatttttttttgagacagggtctcactctgttgcccaggctggagtacagtggggccatcatagtttattgcagcctcaat

SEQ ID NO: 218617 - DNA, 324 bp, Homo sapiens
agctccatgaagataaggagcatatctttttgcttatctttgtggccactgcgcctgtcacatagaaggcactggataatcctttgttaaatgaataactagacctaaaaaatacttcaaggtaggtgatgcagtcattaagttcacactacaatgaaagacagttcttcccaacaggacattatatgttttttctactgtcatttctatttgctaaattgactttgagtttgagaaattgggctatgacgcaatatgtgcataaaatgttcaacaaatactgtgttccatttttttaaagcaaggataaggatgagtcgacgc

SEQ ID NO: 218618 - DNA, 472 bp, Homo sapiens
agtagtagagacagaatagagtaaaaaataagctatgtgtggctctcatgagactaatttagactttcatgacttcttttttcccttgatttttctttaaaactggaggcaaaacaacaaaaataagccaagctcagggctgatatcaggttgttttgattgtaagaacataaccttgccaatattgtaccaactccactctatgtaggcatgttgttctttggctcacttagagatgaagaaatgaaggttcatggatttttgagtcactggctaacccaccttcctccccaccactctctctgttgccagcatattcttcattcagcctttgtcccatgagggatataaatttagaagagaaacctgtaggtaattaacagtccggcatgtctgtcattcctttgataaaatgtgttgggtgtggtttctcagcatgcagttgataaaatgcattggtggtgttccattt

SEQ ID NO: 218619 - DNA, 468 bp, Homo sapiens
atttttacatagcaattcttcacgatctattgacattgtatttatagtcaacctgagtagatcatcataatgaccaccatttattgggccaggcacaaagcttaagacccaaagatcatacaattagcaacagcaattctggggttcaacctgggtcagtctttctatcatatcgggataccacacatgctttggacctatctacataagtctttccacttcttggcatgatgaggtcaagcagagtggtgatcgtggcaggacatggggagagggtgaggatacacttctgtgtgttcagatgtagccctccaactggcctatatccctgagtccttcccaagaccaagcactaatgatcacctggttgtctagacatctcctagccatcagtttccaaaatctatttcccagagtcctcaggtttggtggaggttattttggaggttgccttaaggagcaagaagg

SEQ ID NO: 218620 - DNA, 540 bp, Homo sapiens
tgtgaattttatacaaaaaatgagattgataatctgaatttttaaatgtttaaattaattgagcactttgtagcctataaacaaacatcttctttttaagcatccagggaacactttaaaaaattgatcaacttcttggtcacacatttcaaaacatcagaaaagttgctcgggctgtattctctgaccacaagcctataaaactccaattaaaggacaactttttggtgggacttttaaagcaatctcctcaattacaacagagaattcaaaactaccgttaaaggctattagaaaattacaacaatgatgaccctgtacgtaaaaactcaggatgtgaccaaaggtgtactcagatgaaaaacatccttaaagtttttcaggcacaatggtgtgcactgatagccccagctacttgggaggctgaggtgggaggatcacttgagcctaggagttcgagccagtagtggactatgattgtgcctgtggatagccactgcctcagcctgggcaacatagggagaccccatttttaataac

SEQ ID NO: 218621 - DNA, 458 bp, Homo sapiens
tacacgaacctcctgctctgatcaaacagcgctactcaccattgcccaacgttccactttctcaccagtgtgtttttgttcacccccatcttctcctcccacatttctcctccctaatccctccttcttgaccataccaaaaactcagtatcctctatttaaatcctatatgccttttacgaggcagtataatttctggtcctccgtgaggacagctgcagagaaattatagatgacctactgtttattcctgtagttggcattttcaatttagattatgttttgcctttaaaaaaatgtttttagattttaaactcctaaagggcaagaacggactctataactctgcatacaaccaagagccctgtgtaatttagaactcaaaagttaatgcttttaatgtcactgatattatgaagataaatagaggaatgcaatagggagagttgttaattact

SEQ ID NO: 218622 - DNA, 574 bp, Homo sapiens
gcagtgcatcctatcttctcatagtcgttcttgagttataccccgttacctctgcctgggatatgagaggatgtaactttttgaagtgcatcaacttttaagaagtctcgttagggaatccacattgttataaaaaatatcttgaggtgagacacagacacaatgggcaaaattctccattaatattcagatttcttgtattgcctgccccccacccccccaaccccccattttataagcagttcaagtcagggctgaaatgctgtttgtttaagatagagaatagtcacccaaatgggagtccctgtgatctatggggctttgtgtcaagctgaatagaaccaaggaagtttagcaattattcaactgttcctaagtgccaggtttcagcagcttagtatgatttcatttaattctcaccacaatgttattatgtagaactggtaatattctcattttaccaaaggagaagccaaaacacagagaggtcagtaacttgtcccaggccacaaagctgaaggctgtgttcctcatggtctttgccctcatgggaattaggctccagatggtgaaa

SEQ ID NO: 218623 - DNA, 380 bp, Homo sapiens
ggcttaccaggaccatggggaatatgaaggtgacgggggccctgcccttaaggagcacccagcctggcatccttatggccttccgctggctggaccattctctgcccactgttgacactacagagctggaagctgcttctacttttgttttgttttgtttgctacagcatcttgctctgttgcctggactggagtacagtggcataatcatggctgactgcaacctcgacctcctgggcttgagcaatcctgctgtcccagctcctggggagtcaggcaggagaatggcgtgaacccgggaggcggagcttgtagtgagccgagatcgcaccactgcactccagcctggccaacagagcaagactctgtctcaaaaaaaa

SEQ ID NO: 218624 - DNA, 337 bp, Homo sapiens
ccaagaggcctttacctttcttggcctgtggagtaaatagacaatatattatgaaaggacttgtatgtaccctttctgtttacaatgagatgtttaggtttcttaattttgaacaaattcaatttaccaaatattccagaacacttgatttcttctttttctttgatttgtttcttatctattcattgtctgtgtcttacttttttcatagtaagattgttcttgaaaaatgaaacttctaggctttctaaaaggctggagtgcctttttagaagaagtcaacagctaatagatttgttcttatcattgaaatttcaaaagttataccaaccctcca

SEQ ID NO: 218625 - DNA, 397 bp, Homo sapiens
tgatctgtctgcctcggccttccaaattgctgggattacaggcatgagccaccacccctggcctgtagtgaagaggggtcgttgcttggtcacaaggctgctgagtctgcactagggtccgcctttagttggcttgttacaaggggcttgggtagttgtaatttccattttatttttggactttcctctgtagggcagaacactagggcagttttttgcagtcgggtctgcatatggtgggctttatatcaggttgtggatgagtgcggttttcactgagtaccagagaggatttccccaggtaactgtgtgggtttctagttaggcagaactggccataaaccatggctcagggagctggaacagtcattgaactgcttcagggtccacagtaaag

SEQ ID NO: 218626 - DNA, 676 bp, Homo sapiens
tggtaaagacattcaggcttgctaaaatctaggaagaggtcatttggcaggatgggttacataatgctatctgatactaccaaataaaatgagagagaagccttaggcatgtaacgtttggagatagaaaatgtaccttcactatgaaggtagtgtgtgtaagatggcagttgaaagcattgcttgtgtttatgtttatacccttgatctctgatgcccttacctaccgtacttaaaactctgttaatcattgtctttctccccctcccacaacttctgcataaaattttaagatctgtgtttcattagttcaagagtgcctagaatagggccaggcactgttatacagtatgtggtaaaagactattgagattccagttttcaaggaagagtgccattaccgttttgttaaagctggcaaacaagacaaagttgtgaaatagactggttgctttggagccctctgaccgcttttcctgtagctccttctacctcccttgcctcccaatagattttttaatatgtcacattatctatcgaaattagtactccacatttatatgcactggcttgtgctaggctctgccaagactcctgaaataaaaccgttttgtcaacagtggcacaagatgccaaggaaaagtcaagctatgaaggattcttgaaaatagaacaa

SEQ ID NO: 218627 - DNA, 554 bp, Homo sapiens
ataaaaataatcacgagataaattgtgctaagctaaagaaaatatttattattctacaacggaaacttgtataataaatgttaaattactattttgcccacaaccagcattcaaaattctatcctgccaccttgtgttacttatcggtgaagtatccatgtctgtcaatactttttttttttttgctgcctgttaattcctccaagcagtatgttgccacagatagatgaaaaagatataaatcaaccaagtgaaaataattacttactagaagaagctgggcacagtggctcacgcctgtaatcccagcactttgggaggccgaagcaggtggatcacgacgtaaggagttcgagaccagcctggtcaacaagctgaaaccccgtctctactaaaaatacaaaaattagccaggtgtggtggcacacacctgtaaccccagccactcgggaggctgaggcaggagaatcacttgaacccgggaggtggagcttgcagtgagctgagatcatgacactgcactccagcctgggcgacagagtgagactgtctca

SEQ ID NO: 218628 - DNA, 208 bp, Homo sapiens
atttgcactcccctttcttcctggcctttcaacccctccctttccttcctcctcacccctcccaccccgcacccgagagacagcctgccgtcccaggtccagcccgcgcctctgcgcacctcccggcacccggcgcaggtcgccggccagggcacacacgcgtccccgcctgctcgccggcccgcaaggcccgggctgcggcggccgc

SEQ ID NO: 218629 - DNA, 417 bp, Homo sapiens
ctatcaataatagcattgaatgtaaaagggctgaatccttcaatcaaaaaacagagtggttacatggataaaaaataagacctgtttactctgctgactgttcctttcgctgtacagaatctcttcagtttaattaaatcccacctatttatcttagtttttgttgcatttacttttgggttcttagtcatgaagtctttgcctaagccaatgtctagaaggggttttccaatgttatcttccagaatttttatagtttcaggtcttagatttaagtccttgatccatcttgagttgttttttttataaggtgagagatgaggacccagtgggagataatcttcacagtcaatatatccgacaaagggctaatatccagaatctgcaaggaactcaaacaaattagcaagaaaaaaa

SEQ ID NO: 218630 - DNA, 463 bp, Homo sapiens
ctggattttgacatttctctacctatacagcttgcctgctgggtatccatgtaaatcactccctgcatccttttcttaaatgtcactttctcaatattctacttaaaactgcaatgcctccacagcagggcactccttaacccctctgatgcctttatttctcccacagcatttgtcaccacctgaaaatggtggcctctgagagtcagaataaggtgtggagaggtgaggcacaggactactacttttttaagtcttaagtttgtgaaggattatttgacatttacgttgtatacatgtatatctttcacttgtttattggtagagattaaaaactgccagagaataaagtctgagttcccatcaggcttcatgaatgaggatgttgagttcagcctcagcttcatggccagtagacgagtactgtgggcaagaaataaatctttgctgtttcaagccactg

SEQ ID NO: 218631 - DNA, 552 bp, Homo sapiens
ggatataagggagtttgggggctgggcgcagtgactcacacctgtaatcccagcacgttgggaagctgaggtgggctgatcacttgagcccaggagttcaacaccagcctgggcaatgtagcaaaaccccatctctaccaaaagtacaaaaattagccaggtacagtggcacatacctgtattcccagctactagggaggctgagatggaaggatagcttgagcccaagaggttgaggctgcagtgagctataagcatgccccactacattccagcctgggtgacagagcgagaccctgtctcaaaaaaaagatttttttgaaaagttgaaaatgagtatattcgctgaatacgagatgagttttcccaagaatttatccctcagaatctttcacgttcttcctcctccttctcctcctcctgctttcttcttcttctttcttctttttctgtttcttcttcttgcttttataaagtcttagctcctgtggagttttctctcagttacttcttatttatttatttgagacagagtttcactcttgttgccca

SEQ ID NO: 218632 - DNA, 531 bp, Homo sapiens
ggattgtggcctatttctttgacttggcttatcacatgtgttagatgcattgaacactcaaaaggggactatattgactgtgccagatggaatgagaatttctttgtttcctgcataggttagttgggtgtaaatctaggtacctcacttatctcctttatctttcctgtactacctacgttgagtatacctatatatctgtttaaatcttggacaatccaatattctgaaagcattaaaacaggagtacttagccctactattatattaaggcattaaaccaattaaattgagaccctactatggacaaaatgctttactatactgagaaatataaagaaaaatgagacatggtctttgccatccaagaactgacaatccaattgggaaaacttgtgttgaagaagctccaataaaagtttacaaaaaaattactggccaggcacggtggctcatgcctataatcccagcactttgggggctgaggtgggtggatcacaaggtcaggatatcaaacccatcctggctaac

SEQ ID NO: 218633 - DNA, 493 bp, Homo sapiens
tgagacattctctgttgcccaggctggagtgcagtggagtgatggagtgatctcggctcactgcaacctctgcctcccaggttaaaccggttctcctgcctcagcctgccgagtagttgggattacaggtgtgtgccaccacgcctggctaatttttgtatttttaatagagacggggtttcaccatattggccaggatggtctcgaactcctgacttcgtgatacgcctaccttggcatcccaaagtgctgggattacaggcatgagccacagtgcccggctaatgattttgagcatagaatacggttaagccaggtttatccccctcttccctggctgggcctgactcctaagccttttcacatctggcagaagccctcccactcattcttatccttcctccaagcttgggaccttgagcaaggctgaggtgtttgatttggccagaagagcagaactgaaggtgtctagggggagcctaccccctgcctc

SEQ ID NO: 218634 - DNA, 365 bp, Homo sapiens
gccctcaggaacttacaatcatgtcagaaggggagaaacacatacttcttctcatggcggcagcagggaaagtgctgagcaaaagggggaacacccttataaatcatcagatcttgtgaggactcactcactatcacgagaacagcatgagagtaacctcccccatgattaaattacctcccacttggtccctcccatgacacgtggagattatggaaactacaattcaagatgacatttggttggggacacagccaaaccatatcagaggctattcagaccagtggggagcactggcttcccattaagctatttccatggactgacaaccagtcagctttcaaaccaaaggtcccaggatgtgc

SEQ ID NO: 218635 - DNA, 273 bp, Homo sapiens
gactcattccagacaaactcacagtttttttcagtgctccaactgttgacctaagggttgtatttagcatctatcccattaaaacaattatcttattgtatttaaatcatctgagtttctatcatccttgaagagctgatactttatctttttgactgataatccttactccttgaacagtatatattatacatttgtcactcaggacatgttttctttaataaatatttgtctgaaaatttgagtttgattctatattactccatctatcag

SEQ ID NO: 218636 - DNA, 763 bp, Homo sapiens
cgtcactgaactccagtctgagcaacagatcgagaccctgcctgaaaataaatcaataaataaactcaaccgaaatgggtatgaaagttgaaatgggtatgtaagttgaaaaccagaagttttgagaaacatcctttgttaactttcatcctacaaattgggtcattcatgtcctacgcagctaaaacagagcccaggagccagggaggaaaagcagtcaggccacacaccattgctcccaaaatggacttctctgcaagcctgactcctgaaactgtgcattgtaccctgaaaccagctttatccatagcttctgcaataaatggctgtaagtcttggactccttgctataatcgcagctattcagcaatggaacctcccagttcccaacccttcctagtgcccatgggctttcccataggacaagagaacatttctccttttctttttttttttctttgaaatggagtctcgccctgtcacccaggctggagtgcaatggtgcggtctcggctcactgcaacctctgcctcccttgttcaagtgattctcctgtctcagcctcccgagtagctgggattacaggcgtccaccaccaaaccaggctaatttttgtatttttcataaaaacgggtttcatcatgtttcccaggctggtcttatttttattttattttttgagatggagtcttgctctgttgcccaggctggggtgcagtggtgcaatctgggttcactgcagcctctgccgcctgagttcaag

SEQ ID NO: 218637 - DNA, 608 bp, Homo sapiens
aacgctgtctcactaaaaatacaaaattagctgggcatggtggcgcatgcctgtagtcccacccactcagagatcttaaaaagactgacgctgtgccagaactcttggacagctctgttctcattaaggcattcaatcttcagttctttctgcagttgctatcttagacacagtttgagcagcctcttttacaaagtgtcttttcagctacctggtcttggaagcaggagccctctgatactcatcatgacaaggtagtttaatatacctgagagagccctctcaagaaaataaggagatttttgtcgtctttaacttttgagcttttcccccactccttttttgctgtgatctaaagccataatttgccaccttggtttctgaaatatgggaaaagaagttcgtgtacttatttaggaaaatcgtatttctgttacctaaggagcttgcattgttgacagggcttctttcgctacagaaggccccatcaatgtctgcttgcttgggctgtgtatgtctggttggtaaacatcactaatgaaactcgtgcggtcttgacatgtcaggattgcctgcacgaagagagctgctggcagcctttctccttg

SEQ ID NO: 218638 - DNA, 634 bp, Homo sapiens
gccctgtgtgcccccgtgcccggcccagacttttttttttttcttgaggcactgaagttggctcactgtgttcattctgttttcccacccactcagagatcttaaaaagactgacgctgtgccagaactcttggacagctctgttctcattaaggcattcaatcttcagttctttctgcagttgctatcttagacacagtttgagcagcctcttttacaaagtgtcttttcagctacctggtcttggaagcaggagccctctgatactcatcatgacaaggtagtttaatatacctgagagagccctctcaagaaaataaggagatttttgtcgtctttaacttttgagcttttcccccactccttttttgctgtgatctaaagccataatttgccaccttggtttctgaaatatgggaaaagaagttcgtgtacttatttaggaaaatcgtatttctgttacctaaggagcttgcattgttgacagggcttctttcgctacagaaggccccatcaatgtctgcttgcttgggctgtgtatgtctggttggtaaacatcactaatgaaactcgtgcggtcttgacatgtcaggattgcctgcacgaagagagctgctggcagcctttctccttg

SEQ ID NO: 218639 - DNA, 451 bp, Homo sapiens
tagccaaggcttccagagtgcaggatggagatgggagtggtgaggggcaaagcccttcaggaaggcccactgcaatcaagcaagtcttggggtccatgttgccaggaagggagcaggcaaaaggccaagcctcactggaatgtagaaggtggtgctgctctccagaagctggggatattcagagaggagtgattgctctctctgccctgggtcttagacctttggaaagacctgatttaagcccttcattatcagggtgaagtttcttgataaaccacacaggtgactccttttctctttacgtgagagatggagagtagcttcccatatagtaaacagtcttcccacacgatcatgagttatgctggaaaggaagcccctcctgacactaaacagggtattgggactgcactcagcattgacctgaatagttcatcttaaagtcccactt

SEQ ID NO: 218640 - DNA, 424 bp, Homo sapiens
agctgttaaaatttaaaaatatatatataataaaataacaaaataatgatgaagccaacacatgttaagaatttatcatatgcaaggcattctgagaaactcatcacaaggattacttcatttaatactcacatagtcctctgaagtagttgctatcattattccagtttgcagatgaagaaatgcaggcacagagaaggaaaatatttggccatgggtcacacagctaatggacttagttctgtataactgcagaactcatactgttagcaactgtggttgtctgtaattaatttaaagatagaataagttaaatctggtattttcatttcatagtgtttaatgtcctaatgattaatttttaagtgtataaattaatgttttattatcttcaaaagcaaataaagcaagcatttttttattg

SEQ ID NO: 218641 - DNA, 431 bp, Homo sapiens
gctgtgccctgccactccagggtacttgccgccactgtagcctgtctcccagaacctgggctactgtgatgttccactagcccaagatttggagtcaccattgtgtggtgccctgttccctggggcctgagttgctgctgcactgacactcctgtgacctaacttgattctctgccccacactctggggcatgagcctctaaagcacctgttaattccctgagccatgtcactactgcactctgccactcaaagtcaaagagctcatgaacaattagaaaacaaaatacaaaatggcagtagtatatcctcacctatccgtaataaccttgaatgtaattggactaaattcaccaatcaaaggacataaagtagctgaatggataatgaaataagatgaaactggaggagccaagatggccgaataggaac

SEQ ID NO: 218642 - DNA, 341 bp, Homo sapiens
cacttagtctcattattcactcattcattcacactcgtctactctctatcactctcctgctcacgcattccctcatcagcacaagctttcccagggagtcagctacaggcacagggcctggcctcactgagggagacagacgaggaccaaatggccgaacagcccccactgagtgagagaagagagaggagcgtggtcccatcaggaacgcaaggcccagggaagccctgtggggtcatctgagccgccacgtccatggggaagggcatggaggcccaggaacagcaggagcgtgggaggagcgttaggaggcagcaggggtggccccagctgggaaagcg

SEQ ID NO: 218643 - DNA, 539 bp, Homo sapiens
atgtatcaataatttgttcatttttattgctgcatagtattccacagtatagatgcaccagtttgtttaaccattcaccttctaagaggcaactgcaatattgacagttttgggatattacaaataaagctgcaatgaacatgtgtgtacaggtttttgttgtaaaaataagttttaatttttctggaataaatgccccaaagtgcaaattactgggccatatgatgtgtatttttaactttataagaaacagtcatattcttccagagtggctgtagcattttctattcccaacaacaatgtatgatctagcttttctgaatcctcacctgcattttgtactgtcactgttgtctattttagccattttgataggtatgtagtgataacatagttttaatttatatttccctaatggctacgcatattgaacacctttccaagtgattattatcacatgtatatattatttggtgaaaagtctgttcatgtcttctgcctactttctagtgatataataaactttattattttttgca

SEQ ID NO: 218644 - DNA, 502 bp, Homo sapiens
tattatgcttctaaatccaccattctgtgtagattccaaattcagagactcctcatcgtttcatattcttctctcaactgaacagccagatttaattactaaaacattttcagaattaagttttgcagtaagcatagatctggttttcttaggcttttcaagtaatttcttcttcacttagcccctcctcttatccctggtattgaaagtgagttttacaggccaggcatggtggctcacacctgtaatcccaatactttgggaggctgcggtgggcggatcacctgaggtcaggcattggagaccagcctgaaaaacgtggtgaaaccccatctctactaaaaatacaaaaattggccagacacggtagcaggtgcctgtaatcccagctacctgggaggctaaggcaggagaaccacttgaatccgggagatggaggtagcagtgagccaaggtcgtgccactgcactccagcctgggcaacagagggaggctctgtctc

SEQ ID NO: 218645 - DNA, 977 bp, Homo sapiens
ggtcctctagcccagttgagccttcagaagacgacatgaggatttgctgcagttctgcccaacatcttgatttcaagctcatgagacagcctaagcccaaaccacccagctaagccattcctagattcctgacccaaagaaactatgtgagattatgtgtctggtattttaagcactaagttctgggataatttgttttgaagcaatagttaagaaatacaatgagataacactaaacgcaatgagagagcactaaacactatacttggtgtagataaggtcatggagccacaggaatgctcattttgtgctagtggaaaaggaaattggaaaaaccattttgcaatgtataaccaggtggcaatatctacagttttaaagctatgcctattatatgatctcacagttccacttctaggtatatagtgcatgatcctgtgcacaggagacatgcacatgaatattcatagcaggaatgtttgtagtagcctcaaattggaaaccatccacatatccatcagtaatggaatggataaataagttttggtagcagttgagccttgaacaacacgagtttaaactatgtgggtccacttaatatgcacattttctgggtccacttatatgcagattttcttctacctctgctacccctgagatggtaagaccatcttccttgatccacttccacagtaaatacattttctctttcttatgattttcttaatatcattttcttttccctaagcttacttgattgtaagtgtacagtatgtgataaaaataacatgcaaaatatgtgttaatcaactgttaatgatcagttaatacttctggtgaacagtaggctgtaagtagttaagttttggggaagtcaaaagcacatgcagatatttgactgtgtggggtgttggtatccctaacctcgtgcattgttcaagggtcaattgtatttgtacaataaaatgttatacagc

SEQ ID NO: 218646 - DNA, 724 bp, Homo sapiens
ctggtgattattttctagcagagcataaaatagtagtaaagactcatatttttagagtaagttttaaaaccaagtgttggctggatctggtggctcacacctgtaatcccaacactttgggaggccaaagcaggaggatcacttgaggccaggagtttgagactagcctgtacaacataccaagatctcatttctacaaaaaaataaataaaaaattagctgagtgctgtggtgcacacctgtagttccagctactacggaggctgggttgggaaaattgcttgagcctgagaggttgaggctgcagttagccataattactccactgcactccagcctaggtgacagaactagaccctgtatcacaaaaacaaacaagaaaacaaacaaaaaacaagcgtaactactgttgcattgccttctctatataagttgtcttgtatataaatcatcttattttatactgcctaatagatcagtgtatgcagtatacgctcaggaaattgattatctaatagtaacattcaaaacatttagggcaactgatagtaatgtggttttggaactaataataacatattgtccctattattttaaaaaattcctttttaagggaagtttggacttttgactttcttcactgtcaaggtgtttgaatgttgttagtctagtgctgtatgtttacgtgtgaggtggtggtatcaccaattgtaaagcaaaatag

SEQ ID NO: 218647 - DNA, 455 bp, Homo sapiens
gtgacacgtcacaggagaggtgggcagggcccggtcatgagaaccaatttggaactgaagaaaacaaatggtaaattcagtgttttccttacagtttatattgcattcccctgtaaacttgaagtgcctcgtttgctgtaaagtaaaaatgcaattcttttcctgtagctggaaatagaatggtattcaggactaagtgatgtgttcggggttgccatgacctgcatcagcgatctaaccaaaaaccaaatctgccaagccactatgtcatggggtgtccttgattatgactgttttagttgtgcagagtatatcagtagtacttggcaaagtttaacttgtttcctgttcattttggtttctctatgttagcctttgttttgataacttttagaccttctacaaatctttcgaattttaacttttgaattttaataaaatgacctaacaacaac

SEQ ID NO: 218648 - DNA, 381 bp, Homo sapiens
aagattgtgccactgcactccagtgtgtgtgacataacaggactccgtctcaaaaaaaaaaaaaaaaaagaaaagaaacacatggaaccaaatcaggatgaaagaaactggaatagcagtttgttataggctgggcttgttggcttgttcctgtaattccagcactttgggaggcccaggcaggaggatcacttgagtctatgagtttaagaccaacctgggcaacaatgccagatcccatctttaaaaatatgaatagcacattaaattcattgattttttttttttaagtcttgctctgttgcccaggcagaggttgcagtgagccgagattgtgccactgcactccagtgtgggtgacagagcaagactgtctcaaaa

SEQ ID NO: 218649 - DNA, 428 bp, Homo sapiens
gctgtaggttatcagaccaggatgaagagggaaagatcaagcaggagtatatcatatctgacccctccttttccatggtgacagtccaaagggaagatagtgggataacctgggaaaccaattcaagtagatcttctactccttgggcttcagaagaaagtcagacttctggtgtgtgtagtcgggaagggtcaactgtgaattctcctcctggaaatgtttcctttattgtggatgaagtgaaaaaggttcggaaaaggactcataagtcaaagcatggttcaccatcattacgccggaaaggcaacagaaaaagaaattcttttgaatcccaagatgttccaacaaacaaaaaaggcagtcctttaacttcagcaagccaggtactaaccacggagaaagagaagtcatatactggcatttatgat

SEQ ID NO: 218650 - DNA, 834 bp, Homo sapiens
tggatctttctctggatccgttaattattctccttccctgaaagtggactcagaagccaaatgactcacacattggggagtcttacagtaagagagtgtttggagcttcggcagagcatatctgtgtcactataaaaacaagaagatgacacatcttgttaatgtggtcagaagtgctacgatggtgtataagtgtgtgtgatgtgtaaaacatatggtttctaaaagattctatgaataactctattttgtcctgtacatctggcaattactaagcatcatctgtgtacctacaacatgcaaagctttttatatacatgctctgtgttaggtgaatgaccatttatctctgttactgggaatacagcctcacctgcagtatacactcaatagatattttctgaatgtataacacacaaatttggaccattgccactatctatgttataggtgggtcaaccaagccatgaagacaatgtgtgttttgcccagtcacacagccggaaagcaccagaaccaagattcagcgaagattttctgaatccaaagtcagcacattgcccaattgtctagtgaaaccaaaatataatgtaggaaaaataatataatgtgaaaattcataatcagtccaagaggattttgaacttgtagaaaagagatgacaagaagttttacctgattcataaatggaaatgagcttgagaaggaagagactcagctgaatacatgagagagaataatacaatttcagagttcataagaaaaagaaaaaagataattgccaataaagaataaaaatatgtaaatttgctgataataaagtcatgcaaacta

SEQ ID NO: 218651 - DNA, 755 bp, Homo sapiens
taatctggctaagttagcatttgaagtctgcaaagctggacttaaagagttcaaattggagctggaattgctctaagcaattccagggccttgcaattttacaattaaggaagacttaaatatatacatagtcagggtggcaaggtaaaaggaggtctgatttcctctgcgatgttcttcagctaagacctaaattctgaaaccgttaaaacctgaagtgcctttaaatatattatttcatcagagccccaggttcattgtgtcacttatcaaggtctgatttagggtcctcaaggactaatcttgttagtgtttaaaagcaactaggttttgtttttggcattttagttccatcttctagattctgttgtcttgcagatagagatcagggagcccagctacacattcattcttctagtcccttgtactcattgtatttccttctgccttagggccttagtttgtgctgttccctgtaccaggaactctctttgctgtttctcggtttcttgctcaaatgtcacttcaaggaaggctttcctgactgacttcttattttttaagttgttacaacattgtgtacctttgttttatagcacttacatttatttctatgaatatttccttaatgcctatattccttcctaaatcgtaagctgcacgagagcaggatcatttgtgtctgccttactaaccttttcatcttgagtgcctggcacagtgcttggtacctggattgatacttaataaatatt

SEQ ID NO: 218652 - DNA, 562 bp, Homo sapiens
ggaaacagcagggaagcctggggagcgccaggtcatgcggcccggagagtgaccttgagaaggtgtcactgccgtccaacacctcagaaagactacatgagaaagacccaaatgaagtcattgtttctggcgacctgtggtccttggcgacctctagaattttgcagtgtttgggctgtgggagactgatggggatattgcatttggttctttcccacaggtggttttagaagccactgtattccagtacgctgttgtgtccttggctgataacacccctcacccccatgcctacaaccgggctgtgtctctgggctccagggaaaaataaaaagggtggtgagaaagagccacttcgtaagaaactctgtatggcattggggtgtgaggttgcgcaactgagaggcctccaagagggtcaccccgtaagtggggagagaagaggggatagaacctgatgttgttgcccagagcaacatggcctcctctcttccctggctgcacacactggaatacacttcccagcctcccttgcagttagatgtggccacgtgactgagtc

SEQ ID NO: 218653 - DNA, 734 bp, Homo sapiens
accgaggccacggagctcgtggaggcaaggccaaggataaggagtagattcccatcaccaagctggggctcctggtcaaggacatgaagatcaagtccctggaggagatctatctcttctccctgcccatcagggaatctgagatcattgactttttcctgggggcctctctcaagcacaaggttttgaagattatgccggtgcagaagcagacccgtgccagccagggcaccaggttcgaggcgtttgttgccatcgaggactacaatggccacgtcggtctgggtgttaaatgctccaaggaggtggccactgccatctgcagggccatcaacatcctggccaaactctcgattgtccccgtgcgcagaggctactgggggaacaagattggcaagccctacgccgtcccttgcaaggtgacaggccactgcggctctgtgctggtgcgcctcgtcgcacccccaggagcacgggcatcgtcttggcacgtgtgcccaagaagctgctcatgatgactggtatcgatgactgctacacctcagccaggggctgcactgccaccctgggcaacttcaccaaggccacctttgatgccatctctaagacctacaactacctgaccccggacctctggaaggagactgtattcaccaagtctccctatcgggaattcactgaccacctcgtcaagacccacactagagtctccgtacagaggacccgggctccag

SEQ ID NO: 218654 - DNA, 449 bp, Homo sapiens
caacccaaatatctatcaactgataaacaaataaaccaaatgtggtgtactcatacaatggaatatcattggcagtgaaaacgaatgaagtatgtactgatacatgctataacatggatgacacttaaaaacatgctaagtgaaagaagccagacacaacgaccatatatgattccacttatataaaatgttcagaataattaaatccacagacaaagattagtggctgcctagggctggtggggagaggcagaatggggaatgactgctaatgggtatgaggtgtctttttttaggatatgaaaatgttctaaaactaggtactagtgatggttatacaattttgtgaatatgctaaaaaccattgaattgtatactttataaaaatggatgaatggaatggtatgtgaatgtatctgaataaaaagtaaagaagaaaaaacatatat

SEQ ID NO: 218655 - DNA, 445 bp, Homo sapiens
ctgcaatcccagcactttgggaggccgaggcagccagatcacctgaggtcaggagttcaagaccagcctgacccatatggcaaaaccccctctctactaaaaatacaaaaattagccaggtgtggtggcaggtgcctgaaatcccagctactcgggaagctgaggcaggagaatcacttgaacccggggggcggagattgcagtgggccaagattacaccactgcactccagcctgggcgacaaagcgactctgtctcagaaaaatacaaaataaaaaaataaagtggaaataacttcctctgcttctaactatgcagtttgcttgaaaaaaaaaaaaaaagtaacctgtaggtgcagtacaactatcagcacaaatgtaattatcttagagtatcttaatagttcctacttcaagtagaacttatgaaggagtttaactgtggt

SEQ ID NO: 218656 - DNA, 577 bp, Homo sapiens
taaccgcccaatttctaatgttacattcaacagtactttaaaccttaatgaagtttctgtgtagattaaataaaatatgcatgtaatgtgcttagtacattaactaccagaatgtcagtacccatatgtagcatcaatattattattatcgttattcatttttttgagacagagtctcactctgttgcccaaactggactgcagtagtgtgatattagctcactgaaaactccacctaccaggctctacagattctcctgcttcagcatccaagtagctgggattacatgtgtgcgccactacagccagctaattttttgtatttttactagagacagggtttcaccacgttggctgagctggtcgcaatctcccggcctaagtgatcctaacgactggactgcccaaatgctgggattacaggcatgagccaccgggcctggccagtattattattactaatacagtaattattgtataaaaattcctgatagatcagtgatgccatcattaaataatcaatgcataaaaacattcaaataaatgatatggacatctttatgcatgcttatgaagt

SEQ ID NO: 218657 - DNA, 607 bp, Homo sapiens
caacaaagctatgacattttgaaagattctgcttactcaagagcagttactaggaataactgatccattttcacatttataactccagccataagcagagcaacctcatgcttccacagcttgcttaaccttacaatattgtctccaaatatagaattaccacgagacatttgaaatactaaacttggctcatgggccccattactctttcagactctttggggtttagggggcataattggactagataacaccttagggtctttttcagctctatcatttagtcatttcagcgtttgatcactggcaacagtatcaattatgcaggcacttatcagagaaagggattggcatctgctctcttgatatgagccatttccctctaaggtcatactgctcctgacagctctcattaaccctgaaagctgcaaaagcagcaaaaggcatggatgtatgcaaagaattaatgtattttaatgctggaagagtctttagaaatcacctggcccaatactctccatggcatccttctccaagtgactcgttcaacatcacacatctgttttggggtagaactactatcctgcctcttgacgcagtcctcttc

SEQ ID NO: 218658 - DNA, 562 bp, Homo sapiens
gaggggaccaatcagaggtactttcatttttcaaccgccaggcagaaaaaggaggggcagcaactgtcgcgcagaaaaagggggtgttgaagagtagcctctgatatccagtgagcatgaaccggccttaggtttcctgcctccagaccctattctcctgcctcatttccccccctgagagacaggatccccgtaagtctttatgtgagacagagggactgatggtcttttttctgtaactgcgtcacactgacttgactgacagtccctgcctattggaatcacagaactctcaccctgctctgtctagtggagacagggtagtttcttgatggccaggggtggtgaattcatttggaactggctggaaaccttactgcacaatcatctccaggcaagaggaaatgaatggttaaaagatttcatgggaacttcaggaggtggacacctatgctgtcaggaatgtttgttatagaaatgaattaaaagattctacttaattactatgaaggaagtgattccaactgtttgaaagaaggtaattaatctgcaaaaaaaaaaa

SEQ ID NO: 218659 - DNA, 489 bp, Homo sapiens
aatagtttccttttatcgagaaactttaaaaatattaaaatgtcatactatagcctaaaaggcaaaaagatggaagtcaagactatttttattcaatgcaaaataatgccaaatgaatttagacttatggagtgatctggagagggaaagtccatatgaaatccatatagttttataattaccttttggaaaagcatttcctctgagacagtttgaaattttgtataaaaacctttttgacagtttgaaggatcattattttaagaaaattgttatacttcactagcattcatttttctctgaagctttactgcctttaattgcacattaaactgtatcaactttaagtatcaaaaggggaagggggaaaacacccatctggagtttgtttctgttggaggcaagatttctaattgcacttggttgtactcttgctaactctattgttcattcaaaggttttctgtttgttaaataaacataatattag

SEQ ID NO: 218660 - DNA, 312 bp, Homo sapiens
tgtttagaggaggagagggctggggtttgagagccagctccgtgttttccaaacggctgcccacttgtctcctgattctttggtgaatgatccatttagcccactgaattgaaatgtcacctcaatcaaatgcaaattttccctaagtcctggaggactctacaggttcatactgaacacatttcttaaagcaatgtttcttttacttagcagataaccagtgaacacaggtaaatggttaaaaaatggttagttgaattttcttgctaatcttgtctttctaagcaaaatctagaaggaattttctttccc

SEQ ID NO: 218661 - DNA, 832 bp, Homo sapiens
ttctactgaattccctcttagagcatcattcagtagtagcttactggtgataaagattactattgatgtctttactattctgggaaagttttaaagtttacaaggagaatgttagaattcagtatataaaccaggaaaaactttactttgttatctgaaaaagacctaagtggatataaggcctcattataccactcaattttcattcacttcgcaaaattgacttttatgaagctaatataatacaaggtgaaaaaaatggtccatgatcctggcagtgttgctatggactaatttccatcactttgagtcatattactataaaagggcagaaaacactgggggaggctcttagcagatttctaactactttgtttactttggttgatagggagtttgctgtcatatttttgaaaggtggtggtggtgggattgtctgctatctcctttctctgccacctcccaggtatataggtgatggttacaatttggaaaatatagaaagaaaaaaaaatatacaccccattaccttgagatacttaacattttagttttcttcttgcttttttctctttcttacatgggtttaaaaatagtttttaaaatattaaatcatataccattattttctcctttttcccccctttaacactgtgttcccttctgtacagttttttttttttttttttttttttggagtactgtttttaagggatagcatcattttgttctttggagctatcccatttaaccagttctctgttgttagacagcaacgtcccccctccaaaacaacttttcctctcaattccaacattatttccttatgata

SEQ ID NO: 218662 - DNA, 753 bp, Homo sapiens
cagcatttcgcaggtgcatagactgcaagccacagtaaggaactgcttggctttctaactttgaatgaaaaactcagagctgataggaaggctgactgtccccagatgcgtggttaatgaggtgcttctaacagagcgacatgttcagtttactggaaggataagaatctcacataaagaacagggcatcctgttcatacaacaacagtataccttcaacaagggaaacgattcttcatgttaccccacacgacaagtctgcaggatcccagaggccaagcctactgtgtaacagctgacaatgccatcaatttctgtggtgtttatggcatgttccagcacatcacacataaggtatcatgtgactagctgaatgtgattttaagagagtgatctccaaacttttcatttgccttaaggatgacgcctctgtgcgaaaacactttaaactctcttttagaatttccttcaaaatctacagcattttttcctgaaaaacccttcacttttaggtcaaagttttattcgcccaactgggtacctaactcccactggtctcagtctccctaagggaaccttcctctacccccacaatcttagctggctcccacaacactctctcaaggcctcatcaactctcccaagtgcaaaaagcaccacaccacctcaatggtttctcaggcttaaaatgtttacttaataaaccagtggattctgcaggccagtgctgcctaacgcagcacccacgagcca

SEQ ID NO: 218663 - DNA, 630 bp, Homo sapiens
taaatctcacttgactttaaaatcattaaggtcaaccatgggacactgctgtatatttcagggcatcctgttcatacaacaacagtataccttcaacaagggaaacgattcttcatgttaccccacacgacaagtctgcaggatcccagaggccaagcctactgtgtaacagctgacaatgccatcaatttctgtggtgtttatggcatgttccagcacatcacacataaggtatcatgtgactagctgaatgtgattttaagagagtgatctccaaacttttcatttgccttaaggatgacgcctctgtgcgaaaacactttaaactctcttttagaatttccttcaaaatctacagcattttttcctgaaaaacccttcacttttaggtcaaagttttattcgcccaactgggtacctaactcccactggtctcagtctccctaagggaaccttcctctacccccacaatcttagctggctcccacaacactctctcaaggcctcatcaactctcccaagtgcaaaaagcaccacaccacctcaatggtttctcaggcttaaaatgtttacttaataaaccagtggattctgcaggccagtgctgcctaacgcagcacccacgagcca

SEQ ID NO: 218664 - DNA, 366 bp, Homo sapiens
cagcatttcgcaggtgcatagactgcaagccacagtaaggaactgcttggctttctaactttgaatgaaaaactcagagctgataggaaggctgactgtccccagatgcgtggttaatgaggtgcttctaacagagcgacatgttcagtttactggaaggataagaatctcacataaagaacaggtattcttttccaattttagaatacaactaaatgtggtttatatctagctactgcatgtcagtgtcttctcattttactgacaagacctccaatttccatggtgtatatatggtgtattctagcactgttcaatttactctcagtgaactgccaatattttatataaaatatttccttgtca

SEQ ID NO: 218665 - DNA, 388 bp, Homo sapiens
cattgtgtagcaagatactttatacattaatcagttatataaataagacttgtattatcttccttagagctaaagaaaacatgccaagtgccaaaataagtgctctaaaagctttcattcaagactggacaccatggctcatgcctataacccgagcactttggaggccaagctgggaggatcacttgagccaggagttcaagaccagcctgagcaacatagggagaccccatatctacaaaaaattttttaaaaaatcagccaggttggccgggcgcggtggctcacgcctataatcccagcactttgggagtccgagacgggcggatcacgaggtcaggagatcgagaccaatcctggctaacacggtgaaaccctatctctacta

SEQ ID NO: 218666 - DNA, 411 bp, Homo sapiens
agtatttccaactccgagtcaggtcctctttgcactgctttttcctgtttcattgcaatttattgattttattgtggttttttgtttatttggggcaagaacggagatgtgaaccaggacgagccagcagacccccgagccagtatctcctccctgggcagggaacaccgcctgcaccggtgcatactaggagaccctggcggagaatgtaaacaaaccgggcgccgagcccttgatctttatttaaatagaggcttgtttatcggtgtcatcctaggaggattaattagatacatctcttcacaatttggtgtctgacactccatcttaggaatgccttatcataaggtgttaattggggccactcagccacttacgtttctattaaacactgtgagggacttttcacaa

SEQ ID NO: 218667 - DNA, 630 bp, Homo sapiens
tgtttgtcattcaaaatagctgaggtggttgggagaggacagccagtattccccaaatgtaatcaggttccaatgaatatacagttaccatttattcctcttctttccccactgtgaatcctaacagctcctcctcaccaagcagtgagtacacccttggattccccaaacgattgctgattatgggtctagagagtcaatgatggctggcgagttaggtcactgagtctttgaaatgatgttttctgggaaatgcctgaaaggttgatggtacaatagtagataaaaataaactcaagattagtgtctggttgcatagaaagtcttggtgatggtgagtaatcaggaggacaaaaatcagaacaagtcatccaggctcctcacttagcaattcttttcataaggcaagcaggaggagagaaaaaaaatcccctaaataacagtagtcactaaaaaaagcattaagtgcttctttttggtagagtttatccctctccaaggatgtattttcctgtaacttttcctataggtggattttgaaatggagactattaaataaatacaacagccatactgcatatgatgctttcagatgcaagtaaaagaaaacccaactgaagatggcctacc

SEQ ID NO: 218668 - DNA, 650 bp, Homo sapiens
cagcttgttgagaggcagtggaagggggaagggccatagcctcaatgatagatgtggaagacactatagcatagcctgcctttgccagtgattggtgattgggcctggaagaactaccatcaataaaccaagtgtggtctgggtggggaacaggaaacagggaaatatggggaaatggggagaatgtcatatggattagagagatacaatcatggggttcagatgtagtatcaggaataagatgagaggccggattgaagtctgggccaggaacaatggtaattgtgggaaattcaacgaatggtgagtacagttgaaggagccagggggcagaaagtatatgtgtcaagtgtgaggaacaaaatagatattgaaagttatgggaactgtagagagtaaatggagcatagcttgtggttttgagggcctctaaaagtattaaagtggtggcagccaccacatggagacatgagggcaagcctaaaacagtaaggtcaagttgtttggacagaaaggctacagggcgtggtcccagctcttgtgtaagaattccaaccacacagttctgtacattggctgtgtgtaatgaaaagggttgggatgagttagggagagctagtgtgggagcagcttccagggctgtttttaag

SEQ ID NO: 218669 - DNA, 444 bp, Homo sapiens
agctgtcccagccaccagccctgtgacatcgtagcccagagatgggctagtcagcaagcagcaccccctcccctcccaggggtccacaaagaacgccccctcccttcccagccctcacactagcagctgaggctgggtcacccctcctgctttcccacaatagagctttctatgtacagccacgtctacacaggcactgcttccccccagccctcctccccggcacctccccgtgggggtctggaccccccctcctccccggcttggaggcagacacagggtcccttgcaagacacgacccagcaccaaccacggaacagctccaaggcccctgggcccctctccggcctggggctgggagctacgcgcgagggcccccgcgggcccccggggcgcgcaccctgggtgcgggcccgcgcgggaggggcggtgccaggccctgcg

SEQ ID NO: 218670 - DNA, 331 bp, Homo sapiens
agacatgatggaaatctcctaggcccagccttcaaggagatgtggctttgtcagtgagccaaggctcagttggaaatggtcaaggtacattcatctggagtcactggggagctgggcctcagaggatgcacaggctggaggtgggcaaagggaagacacttctggtgaaggcaggggcctgtgccaagacccggaaacaggactgcttctgggagctctgggacctgacccagaagtttcgcgggtagtttgaggtgagcttggaaagatcaggcagggtcttggatgccaggccaggagcctggacttgtttggggcagggatgtgatta

SEQ ID NO: 218671 - DNA, 436 bp, Homo sapiens
aaatatatcagttatatcttttttcattatgatcttgatattttctatatctttactgactttttctgttcatttattagctactaatagaagtgtgttagaaaacttccattattatatatgcgtgtgtgtttatgtaatatgtgtattttccttttgttactgtcagatttactttatatattttcagatgatgttaatcagagcatagatttagagtaattgtatcttcttaattaatgaaatattccatttatctttagtaatgtttcttaaaatttaaattgtcttattgcagctacatcagatttcttttagttagtgtttgtagcatatcttttttcgcttttacgttcacttctgaatacatgtatctctaggtgtatctcttgaaaacatttgatatttttattcaaataaatcatctttgacttgt

SEQ ID NO: 218672 - DNA, 216 bp, Homo sapiens
aatacaaatagtacagtataatgactatttacatatcatttacattgtactaggcattataattaacctagagatgatctaaagtatacgagatgggaccaggcgcagtggctcacacctgtaatcccaacactttgggaggccgaggcaggcagatcaactgaggtcaagagttcaagaccagtctggccaacatggtgaaaccccatctctact

SEQ ID NO: 218673 - DNA, 1792 bp, Homo sapiens
  misc_feature (146)..(146): n is a, c, g, or t
  misc_feature (445)..(445): n is a, c, g, or t
  misc_feature (605)..(605): n is a, c, g, or t
  misc_feature (1581)..(1581): n is a, c, g, or t
taagatgattaagataataaataattgttaattgaattaataccctgttcagatttagtctctaggttagccagacattttgtgaataaatacgattctttaaattatttttattaggaacattcctttgtgtagttatcccaacnttgaccttctgttgaccttataaattccatatcttgttctaataaattatttgcatgagattatccctaggactttccagagcattattgtccaatagaactttttatgatgctgtccaatatggtagacatctgtgattattgcgcacttgaaatgtagcaggtgtgactttgagagacaacatttttaacatatttgaatagccattgtggctagtggtgaccttattaaacagtacagctccagagagcaaaagcaagatgagtccagaaactaacagtaccctcccgcctgcccntgcccccacccccaaagccacccagctttggagcttacctagagaggacagtaacagtgtaaaagatctgtgtggactcaaagtgaaatcattcccaattaatttatacattctaaaaaatagagaacatttattaaatctcaatcgcagctcactgcancctctgtctcctgggttcaagcatttctcttgcctcagcctcctgagtagctgggactgggactacaggcgcccgccaccacgcctgaccaaattttgtgtttttagtagcgacagggtttcatcatgttggacatactggtcctcaggtgatccactctccttggcctcccaaagtgctgaaattacagatgtgagccaccacacccagccttaagtctcttaaattgtgaataaaatgtaaatcttaaaaacaaaacttgagaaaggttcttggattctttggtggggttttttgttgttgttgttcgtttgtttgttttttggggtggatgctatctagctcttgtgtgtaatgtacatgagagtctcaaatgttgtactttaagtccttaggttgtatgttgaatttaaactgttacttgttacaaagcccttacctttaccttatgccttcaaaagctcatatttaaataaaatggctctcaaagtaacctaccttttgcacgttttttgcccaccttgattgtacatgtcagtcaagcaaactaaaagtgcttatttatataaagtatatgtacatccctgtgactgtccttaaatgcttattagatcattgaattgctgaatatagaataacaaatatggaagacaaaaaattttaatttgcttatttttattaatcatgtttaagagtttgaaagactgcaagagtaagtttgtaaaagaaatcaaagactttgttgttcattatagactggctatctccctatagtagccagagtttgctttttattagtttaagcccctaggcactgtagtatgttattcagcaatgtttatttttaattttttagggggaagctaaagagctactcaaaattcttgctaggttactgtttctaggtcagaaaggttatttttgtttgtttgtttcagacttgcaccataatgtgatttgagtaggtctttttttnttaacgtgtatatattttaaatcaatttttaatttttggaaagccaatacatccacatggtttaaaaatcccacagtgtgcaggcacctgtagtcccagctaccaggaggctgaggcaggagaatggcatgaacccaggaggcggagcttgcagtgagccaagattgtgccactgtactccagcctgggcgagagaatgagactccatctc

SEQ ID NO: 218674 - DNA, 677 bp, Homo sapiens
atgtgtcagatttttttgtgtaaagttccttatgtctaaaatattttgtacatatgaagtggttttagattccagatgtaattatattctgttgagtagctggtagcactgtcactcagtaaatgcacagtgctgtatatgacaacatcacatttttcaaaccaaactgttgtgtcattaattgagggttattgttcttctgaggggtgtgaaaggagaggggaaatacatggttctttagctgataattgtccatggtcaatgaagtaaaaccatgtttgtgcagacaaaaatgtatggtttcagttgacgtgtatgcttatttaaaaatacttctgttagatctctgctcctttatgaaaaacctaggcctctccaagagcacttaaaaaaaatcctacttggaatcataacttttattattcatttttgaacattatcttttgataccattacttttgctcttaagtgaaatttcgccaatattatatttaaatttgctaatgcataaatggatgcaccaaactgggtgtccaaactgggaagttcagttgcaatggataaagagttatttggaaaagtaattaccagataattttacatctaattaaccatgtatgtttatgtaaacataagtacattatatattgatcttgaaacaaactttcatgatatct

SEQ ID NO: 218675 - DNA, 267 bp, Homo sapiens
ttacaaattagggtttcttttttgaaaacaaatccagcaattcccttggccaggggcggtggctcacgcatgtaatcccagcacgttgggaggctgaagggggcggattacttcaggtcagcagttcgagaccagcctgggtgagagtgtggacagaggcgggctcacccaagggaagcgtggaccaagttgggctcgccccgggagagtgagcaggcagaagggcgccgcctgggtcctcgggaccccggagcctcaagacctgcg

SEQ ID NO: 218676 - DNA, 824 bp, Homo sapiens
tgtttttaaattataaaagaaatacatgcttatgtgataacaaatgaaacaaatacgaaagcattttaaaaagttaatctttttcctacttcacccctccccagttctacccatctctacctccaatcagccaattcatgtttattgtattttcagaaggctgctgagaaacttttgggatgatgagtatgttcattatctgattatatgattgtttcacagatatatgcatatgttaaatatcaaattttacactttaaatatgtacatttaattgtatataaattatatctcagtaaagctgggtgttttcagatgtccaaacttgttaggtatttcttttggtctaggggtgcagtgaagaaattactaagacaccaagggcattgtgaaccaagaagttttgggaacttatgacctagtgaatatctttccataactttttttaaattaattttttatttacatatagtgaaattcactctttcttgtggccagttctcggaactttgataaatgtgtatagtcacgtcttccgcaccacagtcaggatatagaacagtttcttttggttttgtttgtttgtttgtttgtttgtttttgagacggagtctctgttgcctggctggagtgcagtggcaccatatcagctcactgcaacctccgcctcctgtgttcaagtgattcttctgcctcagcctcccgagtagaagaacagtttcttcagcctccggacctgggattacagggattcgctaccatacctgtccactttaccttaatacttccttcttttccctatcctttcttttttttttggggcc

SEQ ID NO: 218677 - DNA, 321 bp, Homo sapiens
gaagccagtcatagatcatggcaatataagggccccttttgataatcttcaggatacatttgcttatagcattgctaaaatacagatttagcactctgtatttgaatattctttaaacagaaaagccccattattttcaaatttttgacttactaattttcataaatacaaatgaagatgtccctcagggtagcagcatgcctgctcccctctaccatgggttggagggtggtcatttgtgagacgtcactttgggcatattccagggcaagttggggaggcggaggggctttgaacagtgtttaggaacttaaacctgtt

SEQ ID NO: 218678 - DNA, 351 bp, Homo sapiens
ggttctgttgcccactggatttcttctgtacattcactcagatttcgtgcctgttactgtcagtttcttaggacttcagtgcgatctttttagaattaccaaaatattaccaagagtttatataatacctcgttcagaagagtcatattttattctcagataaaaatcagtgctatccaaatggaagggatttaaagtacttaacctgcatagaaagctggcttgtctaagaactcttgaaaagttcagtgattttgcccttttgtaattattaaaacataaggcaatgtgccgtgctctagcatagcacagtggtctctctctaatggattttatggccttaacctcttt

SEQ ID NO: 218679 - DNA, 518 bp, Homo sapiens
tgtagatgacaggttgatgggtgcagcaaactaccgtggcacatgtatacctatgtaacaaacctgcgtgttctgcacatgtatcccagaacttaaagtataatttaaaactaaaataaattaattatttaaaaatttaaaaataaataaaaatagtggcttggtgcagtggctcaagcctacaatcctagggctttgggaggccaaggcaggaggattgcttgagcccagggatttgaagctgcagtgagctatgatcacaccactgcactccagcctgggtaatagagtgaggccctgtctcaaaaaaaaaattaaataaacattaaaatatcactttttctttaaaaaaaagaaaaagaaaccaaaatactaacttattgcttttaaatcattttgttataaaatataacacttagaaaatgcataaaacatacagtttacctagtagtcataaagtaaatagacaactaaacactacccaggagaagaaatagaacaatgccagcacactagtg

SEQ ID NO: 218680 - DNA, 414 bp, Homo sapiens
tctaaataagtttttgaaaccttccccccacctttagtgagtggtatgttttttatatttagaaacaatctccctcctccacaaacatgcaacattcttacacaataatgtggtataagaaaaaatagcattgctgcttatactgccgggattttttcccccccataagcttcttgatttaattcttttcttataaataatttagtctggaacaagatagggagttaatgacttaagtgctgctgatactgaaataagttaatatttattttaaatataatttggaggccaggtgcggtggctcacacctgtaatcccagcactttgggaagctgaggcaggtggagtgcttgagtccaggagtttgagaccagcctgggcaaaatggcaaaatcctgtctcttaaaaaaaaaa

SEQ ID NO: 218681 - DNA, 396 bp, Homo sapiens
taacacttttctgcagtctttgatatcatcttcctgtcaaatcacagaaatcaagggactgggctgcaaagcgggacactcgtgtgctaatttccatgtcattgctttgaatggttttctagcatggagagctgttacctgacttctggagacatactaaagtgctgagacccattgtagatggcctaaaaattcacttctcaatgttcataagccagaattatagaatgcactgccatatggcttttttttcaaataaatattgttctgtttgagctctgttatgtcactggaagtcacaataaatcacacacctagtatgctttctaatgaatgcttgttgttcaaaattcccaatacctgaaggaaagaaccttctgtccccaaagtctgtga

SEQ ID NO: 218682 - DNA, 210 bp, Homo sapiens
ctgctaaacatcttccaaagcacaggcagcccgcacaacaaataattatctggccccaaatgtcaatagtgctgaggctgagaaaccctgacttgcagagaactcagccaccctggctaaggaattcacactcttttttttttttttttttttttgaaaaaggcaaaaagtgagggggggcacccccgccccaggggcccctcatccctc

SEQ ID NO: 218683 - DNA, 463 bp, Homo sapiens
ggccggcgcggcgctggaaggcgccggcgttaaccccgcgaggcaggcgacggagggggagcggcgctaatacataagagcactgcatcacgctaatcttctcccagaacagtatgcgtcagcagtacattcacgttctgactgaaggacaaaaggatgagagagcagtctgcgtggctgccgcctgcaacaccgcgagcccggcgcgaggaggagacggtgggcgccgcgcgcaggggccccgctgctgctgctgccgccgctagccagcggggactatgttcctgggctccggagcgtttcccgcagccgcgacccccgctgctcacgccgctgcagcagtccgctggcggcgcggccactgagggcgccgggagccgaagccgcgaactcgctccctccgcacaaagccggagccggcggcgcgccgggggccgggcagcggcgggcggcgacgggcggt

SEQ ID NO: 218684 - DNA, 163 bp, Homo sapiens
gctcagttaataaactagctaaaaatctagcagttactatatattttgctctaaaatatctttattctaggacaagtgcactcattaagaagttttaatgaaaattacagtgtccatttgattaatgtgttataagttttagagacccttctacgtgatagtc

SEQ ID NO: 218685 - DNA, 726 bp, Homo sapiens
caattaaaaactgtacatcaaaggacaaaaatcaacagagtgaaaagtcaacccatagaagatatttataaatcagatatctggtaagcagttaatatctagactatctgaagatctactataaaaaaaaaacactgaaaatcacacaagtgttggtgaggatgtagagaatcggaacctttgtgtaccgttgatgggaatgtaaaacagtgcagctgctatggaaaatagtatggaggttcctcaaaaaattaaagataaaattagcatatgatacagcagtcccacttctgagaatatatccaaaagaattcaaaataggatcttaaagagatatttgcacaatcatgttcattgtagcattattcacaatagccaagaggtggaagcaacctaatgtcggtagaccaataaatggataaagaaaatatggtgaactgccagtcgtggtggctcacacctgtagtcccagaactttgggaaactgaggcaggaagatcacttgagttcaggagttcaagaccagcctgcacaacgtagtgagatctcgtctctataaaaagtaaaattacccaggcatggtggcatgcacttgtagtcccagctactgaggaggctggggcaggaggatcgcttgagcccaggaggttgcagtgagctgagattatgccactgcactctagcctgggtgacagagtgagaccctgtctcaaaaaaacctcaaaa

SEQ ID NO: 218686 - DNA, 772 bp, Homo sapiens
  misc_feature (605)..(605): n is a, c, g, or t
aaactatgtgtagcacaactagcagaaaaccgtctggtcggccatccgggagaaagcgcggatcagaaacaagcgacttcgatgcagggaaccgcgcagccactgaagaaagtgacccacgtggcagtggtgccagcgaaacactgcagtttggacggcagctgtggggatgccacagagaaacatgcactgccactgaagtacatccagctccgcggagctagtgttcatatgatcaagaaaccgccagttgggctctgctagaaacttttagtcctcccttaacggctatcctacccacaacagacaatgcctttacccagcacctagcggtgctgagacccgcctgggccagcacagagcgcagagcagtacgggtacggagaaacgccggactcagtgaaaccagccttgcctccagcggattccccggcttcgccggacgccacaggcagagtgccgcggggaaacctctggctccctaaaccgattagattgtgggagtgggggggacactcacaagttgtgtggaagggaaccagcggcaatgggacccggcgagcacttgcccgcagcaaatgcctgcgctgctgcaaaaaaaaacngaaggggtgcctgtcgggcgcctgggaccgagcgatttatatcgagcatcttatacatgaggcgaatttgagctactaggcaattctcctatagtgggtgtattacaattatggccgcgttttccgtgggactggccctgggttcccacttataggcttgggacatc

SEQ ID NO: 218687 - DNA, 354 bp, Homo sapiens
agcgcctagctaagccgccgcgtctgtggttgttcctctccacaccgggtcttagacctgggttgctaagagctggcccaccgagccctgctccgctccagctccctggaggcgtctagtgcaggagggtgaagtactgcttgaggagaaggctttgaccaaatgggatctcttaccccagttgcttgaggctgagcgtctcctaacctggacgcttttggatctgcagactttgcccacaggagtttcctaggtgtagagaccaaagcttgcaggccagcgagaggtcccgagatcttgcattcccacccctcgccccaagctggggcacttttggggggctgcagcggccgc

SEQ ID NO: 218688 - DNA, 286 bp, Homo sapiens
ctatgaagacaagtaagaggacacatgtaaagcactcagcactggaccaagaaaaggctccataaatgttagggacacaggtgtctggggctctgagagcacttggttatgcggcggtctcactgcactccaccagccttgtgagatgggtaagaaagcactcggaggcttcagaagccttttcccttctaaactattcagatcatcttagcaattcaaggaacagctggtcttgagagatgagactcgcccacatcccctggaacccgttggacccaagcagcac

SEQ ID NO: 218689 - DNA, 417 bp, Homo sapiens
tgtggtggctcatgcctgtaatcccagcactttgggaggctaggtgggtggatcacttggggtcaagagttccagatcagcctgaccaacatagtgaaactccatctctactaaaaatacaaaactagccgggcatggtggcatgtgcctgtaatcccagttactcgggaggctgaggcaggataatcgcttgaacccgggaggcagagggtgcagtgagccaagatcatgccaccgcaccccagcctgggcgacagagcgagaccccatctcaaaacaaaacaaaaaacccccatatatgtattacctttgtttcctaaaccataagctataaacatcatggaccattctccataaaaacttgggtatgtatttcctaagaataaaaatattctcttacataacctgaagacagtt

SEQ ID NO: 218690 - DNA, 491 bp, Homo sapiens
gtcacagagacagacaaatgctcttagatgtttgggtttttttttgtttttgttttgatttgcttgtctttttgtatgggttggtaggtaggttggctcagtttggtttggcttgctttggcggcaagacacatccacatttctaaattaaccctgacctcatttgcaattcctgcttttctctgatatttctacatgactattgagctttgccatgacaggcctacaagtgctcctgacttgctcattgttgtctagtgtactattcattctacctataacacttagaactgaagttgagagttatggacgacttctggtttcataggagatagtttcttttctgttttcttttctccctccttgttgatttgaggtgttttcagagataagatctgtgatgagatgtctttaatttaattattattattatccttaattaattatcacctagttgctatttatcctaaaatttgatctcattatgcaaa

SEQ ID NO: 218691 - DNA, 573 bp, Homo sapiens
ctataaatcatctataaatgctgaaagtaacaaaggatgcagcttatgttttctccattttctttataagttttgtttgcatctaatttatttccaggtacccctatgatgtaaattaccatccagtcttcacctactaccagaaattgaacttttttatttcttctgaaagtttaaagagttctaatatggctctgtattttttttagctaaaatgtcatagtgaatttctttaaacggtggttattgttgactcagtgtttatctctttttcacaaagggtttgccagtgtctttctttgacaaacatgtgttgttactattatgtgctcactgggatagtgagcaaaaatagacataggtcttgatctcccggaacttatatctaaagatagaaaaggatattaatgaaataatcatacaaataaatgcaaagttggaactgtttcagttgctgtagagaggtacgtaatatgagggcttttagaaggagaatttactcagtgcgatcaagaggaatttttttttggaggaagtgtttatttagctgagatctcaagtaagttaatttga

SEQ ID NO: 218692 - DNA, 472 bp, Homo sapiens
caatatttgttttatttttattttttaaagacctatgaagtagatgataaaagtgtaggttctggagctagattctgtaagttcaataccttgtattgccatatactagctgaatgatcatggggaagtttcttaatccttatgatgtggattgtctcatttgtaaaatggcaaataacaggccaggcatggtggctcatgcctgtaatcccagcattttgggaggctgagatgggcggatcatatgaggtcaggaattcaagaccagcctggacaacgtggtgaaaccccgtctctactaaaaatattacaaaaattagccaggcatggtggcaggagcctgtaatcccagctactcaggatgctgaggcaggagaattgcttgaacccacaaggcagaggttgcagtgagccaagatcatgccactgcactccagcctgagttacagagagagacgagactagttcacca

SEQ ID NO: 218693 - DNA, 528 bp, Homo sapiens
catgacaaccaaagaagagttattctttcttataacaaatacagaagacagaatatttttgacaagcttggctagcctttttccagggttttctatgtgacgctagccagatcagaaagaaatctaagtaacatgctgaagtggaagcttggcagactggaaattttatatgatgtttttcagtgctagaattaaatctattatgtgaaccattatggaaggtctgcttcaggaagcccagctgattatattagggtcagtgaacacatcagggaatatttatatcttgttttcagaaggtgtattatggtcactttgccattcattgattatgattatttaaattggcttcaaatgacttgtttcttagatcatagtccactcttttgtggaacagatgggaaggattatcaaacccttggaagaaggttcagttaaaaaccagtagtcaaaatgcatatattacttactatgtattagaattaattctgctgttacctatttctatatcataaaggccctattata

SEQ ID NO: 218694 - DNA, 258 bp, Homo sapiens
tagttttgatcctaaagcctcagagaaagtctgtctgtgacccgctccagagctgcctcactttctgacatgagcggtgctcttggacagccggcaacgaagccacgcttgtgaaggacgcagcggttctcacctgtggcacccggggcaccagtggctggccactgccctacactctaaagagggaaactaaactttggactgagaattatatatttaagaaagccttcagaaataatacatttacattatacatga

SEQ ID NO: 218695 - DNA, 371 bp, Homo sapiens
cactccatcctgggtgacagagaaagaccctggacaacacactggacagatttagcatcttctgcacaagtttaaacagttgagtaagggaaaagtaggattggaacccgtgctgttcctgattttaggacactagtcttagccccttccttaaacagattaacttaggtgggccacttgttatgcaaggaaaacttcagttactttgactggtgatttaataaaactcgacatcatgaagattccaatttacctgccttcccttagaatctctggtaaccatatgaaggtgcaaatcattcattcccacgttcacaagcccttcattagctgactaggccatggaaagaagggacttagaaatgattaac

SEQ ID NO: 218696 - DNA, 450 bp, Homo sapiens
atcatgggcagataacttcatctcagaccttctgcttgcttctctgtaagcctggagagaactacctgtcttctcatcaagttgtttttattggagttagtgtagcgaaaactctcaaaccgtgtttttttctactctcacaccaccacaaaaatcatcatcaatacagaagaagacttctgtgaccaaaggtatgggggtttttccctacacaccaagcagtgcacatcagctgggtattctccagttcaattctggcactgtctacctggagaatttaagaacatgccaacctatccttaagataccagtcacaagtccgggccaccccatccttcagacaccagttgcaaatctgggcctctggaacttctgaccaactggtttcaagttgggttcctctttgggcccacttcctctttgggctcaattaatttgctggagtggtgc

SEQ ID NO: 218697 - DNA, 494 bp, Homo sapiens
caaatgttcatagcaacactattcacagcagctaaaacgtggaaacaatacaaacatctatcaatgatgaatgggtaaataaaatgtggtcttacccatacaatagaacattcttcaataataaaaagaatgatatatgaatacacattacaatatggatgaacctccaaaatgtactaattgagagaagacagtcacaaaaactacatattttatgattccatatttatgaagtgtccagaagaggcaaatccatagacacagaaagtagtttcctggttacctagggctggaaacactttggggaagtggaggaggggtgtgattgctaaagggtataggtttcttttgagatgctgaaaatattctgaaattaattgtggtgacagtcgcacaattttgcaaatatactgaaaatcattaaattatgctaaaaatgggtgagctgtatggtatgtaaattagatctcaataaagctgttacaaagaaacaa

SEQ ID NO: 218698 - DNA, 405 bp, Homo sapiens
tccactgcccctccctcacgaaggccaggttgacatcccaccgtccctgggaggtgggagaaggtcccagcctgtgccagctgagattcactcccaggttcaagttggcctcttttggccaggcgggaaggctcatgcctgtaatcccagcactttgggaggccaaggtggatggatcacgtgcggtcaggagttcgagaccagcctggcccacatggtgaagtcccgtctctactaaaaatacaaaaaaaaaaaaatcagccgggcatggtggtgcatgcctgtaatcccagctactcgggatgctgaggcaggagaatctcttgaacccgggaggtggaggttgcaatgtgttgagattgcaccattgcactccagcctgagcaacaagagagaaactatctg

SEQ ID NO: 218699 - DNA, 642 bp, Homo sapiens
acccggcctatccccatcttaaaaaggaggcagctaagtgctcagagaagtcatattacaagtctagggcagagcggggactatattctggcttcctgactctgagttcagtaacctttctagaatactgccctccctaaacctacactgctgcagcctggaggttccacaagccctttctcatagaccccagcaaggtgctttctccctggaccccactcagcacctatttctggacctttattggcaggtgggtcagagaggacacctgtgtgatcagagaaacaaagtctggtgagaggagcaagtgcagttatgcacagggagcagctggtccctcagaccttgccagccacttctgcggtggttgtcggtcttggaaaagctccatcttcagaggggtttgtgcccagcagctgatctctgcctgtaatcttcagagggcaccagttcttaccagacaatagctgtctatgacctcaagccaggcctaggacaaagtggagacgtcctgtgaggcaggcaggcctctgtctcagcatcaccaatagctcaccctcctgtccactcacattgtggcgcccccgacccttgccaatcccgtgcaaaccacgcaatgtctgccagcgctcactgccttcc

SEQ ID NO: 218700 - DNA, 443 bp, Homo sapiens
agctccagccacaccagccttctctcaccccttcaccccatctcactccctgctgccacaggggctttgcatgtgctgctgctggatctgttggaacactcttctctcttctcctagtttacctttagctttcagctgtgggttactttctaactaagttaaatcccccattaatgagccctctttatcataccattgatctctcctttgtggcacttctcacacatgaagtttttcagtccctaccactagactgaaagccctatgagggcagacagtgtctgtttttgcttcccattgactcctaggacttgtacctaatagtcttaagggcagactgtgtactgggcacatagtaggtgctcagtaaatatctgctgtgtgaatgaatgaaaaacacaaattacatttttaaaaaacactagagggagagcttggctgga

SEQ ID NO: 218701 - DNA, 426 bp, Homo sapiens
agtactatgttgaagaggaacggtgagagtaggcatcctggtcttgttcccgttctcagagggaatgctttcaacttttccccattcggtattatattggctgtgggtttgtcacagatggcttttattacattaagagaagacagctataactccaaaagtgagagaaagtagaagacatgccagtgctcaaaagctacaaatgtaaccagagccgtggcataaaatgaaatacttctggttcatatacttccactgagcagcattgcattttatacacttcttctttaatggttcagacatatagttcttaacatcacatggagactcataaccttcagaatacagcatgaatcagctggctgcactgcaaagagaatacaaaataccatcaagaatgtcctaactggaacagtaaacttttaa

SEQ ID NO: 218702 - DNA, 675 bp, Homo sapiens
gccgcggctggacatgcacacccagtgccggctccgggcgcgcacacatgcaggtagccacactcacctgagccggtgcagagggcggcctgggctgggaaggggccccctgcgccgcgggagtggggagagcgggaggtgccacagcgcggacctgcgaactgaggtgatggcccgttttccttaactctcctgcagcacctccgcccctgcgccggctcggctctggccacagcagcgaggacagaggggccccgggcgcggcggactcgcgggcgcacgctcccaggagcgcgccgagaggggcgccgcggcgcaggaaacttgggcgaagttagttgcaagtgccaggcggctgccgagaagagcgaggcggggacgcggccggtgccaggcctgcggcgccgcgtggaggctgcgctgccctccgcggccggcgagctccgggagccctaagtcggcaggcgcgcctgaaggggctcggagcgaacagagccggcatggcccaggggacggccggacgcggctcctcggcgagccgggagaacttcctctgaggccgggcgacccacgcttgctcaagcctcatccaccctccttcctcgccccacccgtcagtccagcagcgggagaggaagactcgagaggcaggtgctgcgggggacagctcccccc

SEQ ID NO: 218703 - DNA, 1222 bp, Homo sapiens
agcgggaggggcgtctctgcccggccgcccatcgtctgagatgtggggagcccctctgccccgccgccctgtctgggatgtgaggagcgcctctgcccggccgcgaccccgtctgggaactgatgagtgtctctgcccgatcgccaccccatctgggagaggaaaggccatgtaaggacagagcaaacaggcaactgtctgcaaaccaggaagagaggcctcaccagatatcaaccttcatggcaccttgatcttgatctttccagactgtgagaaaattaacttctgttgttgtttaagctgcactccaactccgtctgtagtattttgttacggcagcccaaacagactaatacatcaagtaaccacacaaatgcatgtacaattaaaactgacctaactgttaagaagaggagatagggcaagagtatatttatcgagggtattctatctggtcagagatgagagagaaagatttttctgggtaaagttaacaaggtatatagggtggggtgaatatggagtggggaatggtcccagatagggccaattgcttgtgcaaaggccctggggtgagacagagcacagtttattagagaaaccaagtggcagctgtgtgattggggtgctaagagtgaagaggaaggtgatacaggtgagggtggagaagagggtgaggcctaacttcccaggaccatgcaggattttcactgctaacttgggccacttgcacaccagactggagctggaaatggtgggtatgggagacagagatcaaaataacctctagatgtccacttgcatagctggtaggtcacgggaccattcatgatagggaagcccaggagagaaccagatttcaaagagaaagtcatgaatttgcacgtgtcaagcttgttgtgcttttgagtcacttagaaagagacatttgtttgcggacctatctacaagtctagactcagacagagacctgagtcatgtcattacactgacaaggtgggagaggtgattcaggacagtcattctcagactttgagtttcaagacccctttacactcttaaaaaccatcaaggacctcaaagagcttctgtttatgtgggttatatctgtccatatttactgtattagaaatgtaaactgaaatattaatattaatttataataaacctgttttaccttaacataaaaaaaagaaataaaacatgcaaaaataaaaaacta

SEQ ID NO: 218704 - DNA, 591 bp, Homo sapiens
ggcaaacatggtaaaaccctgtctctactaaaaatgcaaaaatcagctgggtatggtggcgggcatctgtaatccccgctactccgaaggctgttgcacagagaaatgcttgtaacccgaaagttgggggttccaatgaaccgagatcgaggcactgcaatcccgcctgggtgacagagcgagactccatctccaaaaaaaaaaaaaaaaaaggtacagatccccacaccccacaaccaagtttctgattcaggaagtctagggtggggcctggaatcttcatctctaacaagctcccaggcaatgatgatgctgccggctgagaaccactgcttgacccaatctccatccaatcattagcccttttggagcctctccgcctttctcatctgtgaaatagaaacaaaacagctgccccaccgctgtcactggagggattaaagagaacatccacaaagcacctggcacagagctcacaaagtacacaaggcacttagcacgtactcaaaaaacagaaggctctattattagtcacgttacaatggaggtgtcggtgtgctgtacgcgtgcaaccctgcactggcccaacct

SEQ ID NO: 218705 - DNA, 428 bp, Homo sapiens
aatataaattaagaaatctatgctggcttcaatgtataatttatttgctacattggggatatactagtcctcagtaatacacgtttctagctttacaggaccctggaagactctatgcttttcctctccttgaggtaattataatcttccctgttccccatcccctgtgaataactcagaagtatctatttagatcctttgctcatgttgaattgggttatttgggttatttttcccattgagttgtgtgagttccgtatgtattttaaataagaacccattaccagatataagatttgcaaatattttcttccatttcataggttgtcttttcatttagttgattgtttccttttctgtgcagaagcttttttgcttgatgtagtttgacttattttcgcttttgtttcctgtgcttttattgtcac

SEQ ID NO: 218706 - DNA, 468 bp, Homo sapiens
tagagctgacagatgctttcctttgagtaaacacattatgtcacctatgaaattttagtagctacagagtaatgttcatacagtatgtagtcttatactgctgaaataataaatttaatgtctttatgttgtcacattttaagaccataatgaagcagataaattgatatcttgtacctgaaataagtattttgaaattaagattcaattaagtgagccactttgacacttaattctagatttcccagatgaactgaagtgtgttgctctgtcttgtggtgcttttccttcagtggctcttttatgtattttagttggcataactttattttgattcatatcaatgtgacttaagtctgaaaatatgtcagtctcacattatgtatttttctgaccacttaatattttaaagacatctacttgttataaaatcacaatttggaataaatgtggtaaattttagcaaaa

SEQ ID NO: 218707 - DNA, 644 bp, Homo sapiens
agtcgattttccggaaaaaggctaaaactacaaagaagattgtgctaaggcttgagtgcgttgagcccaactgcagatctaagagaatgctggctattaaaagatgcaagcattttgaactgggaggagataagaagagaaagggccaagtgatccagttctaagtgtcatcttttattatgaagacaataaaatcttgagtttatgtaaaaaaaaaaaaaaaaaaatcaggataattatgagattcatccatgttgctgttatcaacagatctttttttattgctaagtaatattccactgatgaatataccatggattgtatccattcacctgtgggtggacatttgggtttcttctagtattcatttttcttaaatacttggaagtggaataattgggtttaacgtttaaaacaaactgtttccccaggtggttggtttgagaattcttgatttattatacacacgagcccttgtcagaaggacaaaaatatatttgttttttaagcctgtatattgcttaccttttatttgtattcttttgtgtaccaccaatttccattggtatcattttccttctgtctgaaaaacttcctttaacagttctcacagtgcgaggtggctggcaattaattcagctttt

SEQ ID NO: 218708 - DNA, 534 bp, Homo sapiens
gtacgataatagtctctaatttatagatgaggaaattgaggttcagaaaggttaagcaatttgtcaaggtcaaacagcttgtaagtgacatagcagaaattccagatcaaaaactctttccaccaaggcgggtaggagatgagctagctggtgaaactctgagcccctcagatggtggggaaactgagtcccttaggtgttaaggggactttcccaggcttctggtgttagtcaaagagattgccgggaacagaacccatctgttctagccctaaccactagaccacacggcttctccatggcttcagctgggaaggtccaaagagaaactccctttctagccccagtgtggagtgtagactcttccccagctaacacggttatccctgcggaggccaggctgggccagggtgcagtgggggatgctggggggtttctgcccacacatatggtttccagattccaggggatgaaaaggaggcccttaggggcggaaatgggggatgtgtgatgacaaatttagactgattgctt

SEQ ID NO: 218709 - DNA, 285 bp, Homo sapiens
atgaatgggattagttcccttataaaagaaccccagaaaactctctttcccaccctctttcccaccgtgtgaggatacaatgtgaaatcggtagtctgcaatactggaacttggccaggctggcaccctgatatcagacgtccagcttccctaactgtgagaaataaattcctatttttttataagccactcagtctgtagtatccaattatagcagcctgaactaaggcattttacaatgggtagattttaatggtatgtaatttatactcaataaagttttta

SEQ ID NO: 218710 - DNA, 477 bp, Homo sapiens
tggtaatagctgcttgcaatgtcatgggcttgtactggttcagctgggaaagtgccacaatcaatcaccaatgtttgcgatgggctccatatttgacgttggtgttgggggatgtgggagttgacagctataatactacataaactaacttttgggtttgaatattagaaatctagtaattcttttcaaacatattcatttagtctctcttatgtacaaggcctcaatatctaccttgcaaaaatgtgttgtctcttggttaaattgacatctctgtgtccagaaaacctaaactgaaggattcttctatcttagtgttgtaagagtggctttgaattgaaactgaactgcatgtaagaaaaacaaatttttcagacaatgtggtaaaagaaggcctgggttagcagtatctgacactggaaacaacagtaagacttgactaaaatttatcctaataaaacaaaactttatattgta

SEQ ID NO: 218711 - DNA, 346 bp, Homo sapiens
  misc_feature (150)..(150): n is a, c, g, or t
  misc_feature (231)..(231): n is a, c, g, or t
  misc_feature (234)..(234): n is a, c, g, or t
ctaaatcttctctccagatgttttgactcattagacagtctgtgagtttcatcttcttgaggagatttcttcaggagcattttggtctggaatggttaccaggtatacctggtagtataaagctctcatcctgggattgaccttcaccantcattttggagacttgcttcatctctcctttgttggatcttctgtttcttatatctcatatcatcatattacccgaggcgntgngtggctcacacctgtagtcccagctactcaggaggctgaggcgggagggttgcttgaggctatgagttcgaggccagctggggcaacatagtgcgactcctgtctttgttta

SEQ ID NO: 218712 - DNA, 476 bp, Homo sapiens
cagtttataagcatacaggaatgacttaattgctttaataagtaaagtaaatccaaaagaagacatttatgcgaccagcaaacatattataaaaagctcatcatcactggtcattagagaaatgcaaatcaaaaccacaatgagataccatctcacgccagttagaatggcgatcattaaaaagtcaggaaacaggccaggcacggtggctcatgcctgtaatcacagcactttggcaggccaaggctcccaggatcatgaggtcaggagatcgagaccatcctggctaacatagcaaaaccctggctctaccaaaaatacaaaaaattagccaggcgtggtggtgggcgcctgtagtcccagctactcaggaggctgaggcaggagaatgacgtctacctggaggcagaggttgcagtgagccgagattgcaccactgcactctggcctgggcagcagtgccagacaccgtctca

SEQ ID NO: 218713 - DNA, 519 bp, Homo sapiens
agtactctccatttccacaacacttttcactttagcaataaaaaatttgtgtacataacttttcttcaactttatgtgtaaattcagaagttaatgtatatttaaaatttattattatacctttacttccaagtaaaatttgaggccactatcatactaagacatttttcaaacatcagacaaataagttcatataaagattaaggcaatagttaggcttttaagagaagaaaatcgattactacagaactctaatgttgaggccaggcacagtggctcatgcctgtaatcccagcactttgggaggctgaggcgggctgatcatgaggtcagaagattgagactatcctggccaacatggtgaaaccctgtctctactaaaaatataaaaattagctgggaatggtggtgcgtgcctgtaatcccagcaactcaggaggctgaggcgggagaatcgcttgaaccagggattcagaggttgtggtgagctgagatcacgctactgcatgccagtctggt

SEQ ID NO: 218714 - DNA, 474 bp, Homo sapiens
ttaaagactctcagacagaaacctcagtccatccagtctcttcctccagctgcctttcaagtgcgtgaagttttgaagtctgcacacgttttctcagggtgaggcactgtacacatctgggtcagctttattccagttttctttttttttaaatatataaagtcaatcagtgtgagtaactgctacatgagaccacggagaaaatgaaataaatatgttggaaatgctagaaagtgatctgcagttgtttattcgcctcagtctcacttcctggcttattttaaagcattcaaagggtttgaacaatcttttgagttgtttggcgtgctgcaaaaaatatggtctgttctctaatatgaaagaattttacactgtgcttcctggcctggaagtgtgtgggagagtgaggaaaacagggagaaactagtctcaagggacgggacctcttgtgctgattaacattctcttaacaag

SEQ ID NO: 218715 - DNA, 501 bp, Homo sapiens
ccaggtggctccttctgcatggcctccacctggctcttggcctcctggcagtctctgatcacccttaccccaggaggacccttgacccccagcctggccccccttgtcttccttcctggatgtcccctggcccacgggctgtgctgtgcttggaaggcatactgtctgagggtacgagccctgtggcactgcctgggacttctttcagggctacgatggccctggcttgcttcagtccttctctgcatgctggcagcgccacagcctgtccaggccccatggacgttggcacctccaggtcagctgtggcagagaggccccttgcactaggaggagaggctatcactgtctcctactagggtggcgtggaagaaagctgttgtgtttcgggtgctttcctgtttggtgtgaggcttgttggccagcttgctaggagcaggggtgggtttggggtagacttgatggcattttctcctcctctgcctcctcctctgctgactg

SEQ ID NO: 218716 - DNA, 104 bp, Homo sapiens
aaccaagcctggttaagtcatctgggcacagagaagttaggggaatgagagagcggtgtagtcattacagaggctggtgtccttgtctactgaaatgtaggtgt

SEQ ID NO: 218717 - DNA, 436 bp, Homo sapiens
tttttaaaaaaaaaaaaaactttttcttcttctctcttatttttcctataccctgtcatttaagcatcacataattaattgtgtacatcctgtgccacatgcaattgccacagctttgaagtcccaatagatcattttatagagcagtgggtgccattttaaagaaaaagaaagaaaaagaaaagcaaaggcctggcgccaggacacggctgtgtggatttgaacatatccttctccaggtatgataaagaaactcgtgcaccttctgtttgtttttctgcatttcctttccacactggccttttcaatatataggaaagacctcaggactgagtttgttatttttctctctggagctaattccttttccaaaaccagcacgaactgcctcatttggtgctgaggtgaggtttgctttttttctttcaaatttgga

SEQ ID NO: 218718 - DNA, 450 bp, Homo sapiens
catctacatgactgaacagggggttgggaagatgtgcagagtgtcttaccccagactaggtttaggggtgctagactcctaggctttgatgcagggagagagggtaatctctggtccaggaagaagggatattcttgccacttcactcaacttgagagagccccaacggtcaaacccgaaatactggtaggaggggaagccgctgacaagctttactcaaaacgggctctctgggccgttgatggggtgggtgggccttggaggatctgttgttctgctcttcatctgcccagcaaggagcaagaggtgggtgaggagggagggtttctgttacacaaaatgaaaactcccaagcagggctgagctggcctttttcacggtttgaatgagcagctctgaggcaccctccccaccttcgagcaatgagaccgaagatctttcataattctc

SEQ ID NO: 218719 - DNA, 465 bp, Homo sapiens
atattccagtagtaaatacttgatagtaatggcctacagtatttaactcctgtcagtactgtattacagggagagtaaatgtgttgatatttaccttagacacttttttcattaatatttaatgtgtgtgtgtgttttgctgtccttgtcactggcatgtttcctaaggtttgaagaggaaattgtaagagttctgagttaatgaagccaatttggttttaacatcagttgttaggaaacttcatttggccatgataacaatctagccagttaaagctggcagctctcagagggcacattattttattttaataggatatttgatttttctctgaatttcttgtttggtatctctcttccagcttgagacctaaaattccaggtttgatcctgaacattttttctttataatagattgtagtatgtgtatgtttttattacaaagtacatatgacttcttagaaa

SEQ ID NO: 218720 - DNA, 537 bp, Homo sapiens
gtattttttttatgttcctaatccatttaaataaagctgtaggtatgaccatggaaaccaattagcactttcttagtttgcattatccaaaaggtgttggatttgtcggattgcaaattggtttagagttctcagtcactgaagggacaacacaaaccagagtacacttcaatagttcctcaatttgtatagaaaagcctgaaacctttccttttttaaaatgcaaatcacgtaaagttaatatctgtacacaaagacctacctgcttaagaagtttgagagctaatttagctttgaagataatttgcaggaatgattaggcctgaaaggaattatatttgacctgaaaattttgtattggatttgcccatatttaccaaagtcagtttcattattatcactgtgtttctgcttcactggacacatttatatctgctttttccagtgttgttttgtaaaaccggtatccctttggttattaatacatgttttttgaataaaggaattctgtggccaaataagtttgaaagtcctcta

SEQ ID NO: 218721 - DNA, 391 bp, Homo sapiens
cgtgaacaatgcagggtttaggggtggtgacccctgcaagtcaaaaccccacatacaatttttgactccccaaaaacttgactctaacagctactgttgaccagaagccttactgagagcgtaaaccatcgactaacacgttatgtatgctgtatgtattacatactgtattcttacaataaaataagctagagaaaagaaaatgttattaagaaaattgtgtggaggaggaggaaaagaaggagttggccttgctgtctcaggggtaccagatatggaagagaatgcgcatataagtggacctgcacagtttaaacctgtgttgttgtgttgttcaagggtcagctgtaagagagttcacataaagatgttatccttcccattgcttcca

SEQ ID NO: 218722 - DNA, 473 bp, Homo sapiens
aaatgtttgatcatatgcaaggatatttacttgtttaataaaaagaataaatagtagtaagttaaataaatgaagctctaattataggcatcaactagcaaggtaaggagctcaaactttggccagtgaggacaggaaaagacaaaagcgctgagctctcataagaatgaaaggcgacaggttgggcgtggtggcccacacctgtaatcccaacactttgggaggctgaggagggtggatcacctgaggtcaggagttcgagaccagcctggccaacacggtgaaacccccatctctactaaaaatacaaaaattagccgggcacggtggcagatgcctgtaatcccagctacttaggaggctaaggcaggagaatcgcttgaacccgggaggcagaggctgcagtgagccaagatcgtgtcattgtactccagcctgggcaacaagagcaagactccgtctcagaaaaaaaa

SEQ ID NO: 218723 - DNA, 830 bp, Homo sapiens
tgcaaagtctcagcaggtcacatatgatttatctcccaaactgggacaccattgagaataatgaggtgccgctattagatacactgggacaccaggattaaaccagaacgaacagggctttcagtgacttaatagcatggagtctgatccccatgggtgacctggagcaaattataccacctctctgaacctcagtttccttatctgttagtgggaatatacctctagatttatgagagtagaggtgacctgatgtaaaactggcaagatgcctggcacctgagaggccttcagtaaatgatttgaggtgttactactattaccaagtggcagtaactagaagagatcagtagcaggagttgactggtgaaatcctggcgctggcatggctggagtggatactccagaaacatggcccgtgctgagttgcagcgtcagcatgaagcccagtgaatgtgactgccaggcccttagaagcaaggcaggggcgtgggggaagggtgtggtctggcatgagcctgtttgggttctacaccacccatcttcgtgacttccggcaagtcactttacctcactgagtctcagtttcctcatctgtcaaatggggtgagaactgaatgagattatatctatccgttgaccctccggattcacatttgatagctgatgtcactgtggtccttatcaagtaacgccaggagtttgagggatttctgtcattaaccccccagctggcctgcctgaactctggcttgcctggaaatcgcctctcagtggcaggaactattactttgatgtgctcaaatagaagagcaggcaccctggggcca

SEQ ID NO: 218724 - DNA, 783 bp, Homo sapiens
atagaacagggggagacttgaatcctagagaaaacaaaacaaaacctaacagaacagaaatgacccttgatgaacctcttgctctggactggtgccctgaaaatgaatgaaattgttttaaagattaccaagaagatataaaatatcaaatgcggcattaatgtatctgtgtgatgaaaactctagttcagtcatttgaagacatggggcttcctccctacctcgctctcagtcaagggttacagttttactccaggaacagcatgaacatgtcattccactccagccctgaattgcagaatctctattctgggtagccatgagtgggaacactgatctcctttaccttccccaacacccactccaatggcagaagttatgccccaagcacaacagatcgaggaaactggaatctataacagccctgcccaacttgcttagggtagaggttcaatgtcaacaaggacaagttcaaaagttcaggatctatttccctgcccagagtaccacttgttgagtagaggtgtcaccctaaaagaagtgggccactgccttcaccatcagcccagctaaagtggcacagaagttctatccagaggagaggcagaaaataagaacaaagagctcagatctcttcctaaatgagtttacttaatttggaagaaactgtgagttcatgactgagggcatttttgaacacaatggagatcaccaaatgagcaattaagaagagacttgtagctctctgatacccataaaaaaaagcaaaattgtagatgagat

SEQ ID NO: 218725 - DNA, 536 bp, Homo sapiens
atagaacagggggagacttgaatcctagagaaaacaaaacaaaacctaacagaacagaaatgacccttgatgaacctcttgctctggactggtgccctgaaaatgaatgaaattgttttaaagattaccaagaagatataaaatatcaaatgcggcattaatgtatgtcaaaaagaggaaaaggtgaagatcaggaggcacaacattccaaggatataaaagcaaatgtgaaaatgccataaagtggacatcggcttggcctgttgaaggctgaaaaatccaagcaaagtctatgttgccttcaccagtgttcagatacacctggaagctgctttctgaaaagatggagaccatttttacccaacagcatcagctcagattcttgtgattataacacagcatgattgctgcttcatgccttctgccatgtgaggacacagtgagaagatggacaactataaccaggaagtgagccctcaccagacgctaagtctgacagtgccttgatcttgaactttctggcctccagaaatgta

SEQ ID NO: 218726 - DNA, 742 bp, Homo sapiens
gggtgtacctgaaaaagagaagagaaaggagcagaaaaaaatattttaagaataatgagtgaaaactaaaaattgatgaaaaaatgatctgcacatcaaagaagcccattgaaccccaagtaggatgaatgcaaaaagatctacccaggtatatcagagtaagaatgctgaaatctaaagacagaaaatactgcaagcagcaagtggaaaatgactttgcttggacacaggaaacttagtgagattaagatcttctcatcaggaataatggcgaccaggaaagagtggggtgacatattcaaagtactgaaagaagaaataaaaaacaaaaaaaagctgtcaaccaagaattatacatccagcaaaactatctgtaaaaatgaagatgaaataaatatattctcagataacagaagcactgagaaaatatattcttagcagactcatcttacaaaaatacttagaaatttcgtcaggctgaaaatccaagcaaagtctatgttgccttcaccagtgttcagatacacctggaagctgctttctgaaaagatggagaccatttttacccaacagcatcagctcagattcttgtgattataacacagcatgattgctgcttcatgccttctgccatgtgaggacacagtgagaagatggacaactataaccaggaagtgagccctcaccagacgctaagtctgacagtgccttgatcttgaactttctggcctccagaaatgta

SEQ ID NO: 218727 - DNA, 658 bp, Homo sapiens
agaaatgccacccctcatcctgaactccatgcactgaaacattcatcaccaccctcgccatcttttctatcagcctgttcaaaagttccagatggctcttcaatgactctgtcttcacatttgaccatatgttaattgattcaatatatgcctgtattacagatccaagcaaagtctatgttgccttcaccagtgttcagatacacctggatggagtctcactctgttgccaggctagagtgcagtggcatgatcttggctcactgcagcctcttcctcctgggttcaagcgattaccctgcctcagcctcccgagtagctgggactacaggtgcccgccaccacgcccagctaatttttgtattttttttttagtagagagggggtttcaccatgatggccagatggtctggatctcttgacgtcatgatccaccggcctcggcctcccaaagggctgggattacaggcatgagccaccatgcccggcctctttttactttttaattgtggctaccagtttgaaattacatatgtgacttatagcagcaatacagcgggataaatggaaagtatctagttattctagattaaataatcgatcccttttccactaaatttaatggccatcttttacctatattaaattactttattaa

SEQ ID NO: 218728 - DNA, 511 bp, Homo sapiens
ctttctagcccatgaattttaatgtctggcttagaagaaaattgctacaatttgggatgctgaacttgtggcctgggtgcccttatagtgccctctcctatgctagatagcagaagctctttggtccttgtataagggatccatattagaaaccacttgcctacttggtccatgtggacaagttcctagtatggctgccatcatagagagatcacagtgcgtgaaaattgagacaatttagtattgaaggaagtatttcatttctccttcacttatgaagcttagtttggctgaatatgaaattctgggttgaaaattcttttctgtaagattgttgaatgttggcacccactctcttcttgcttgtagagtttctgccgagagatcagcagttattctgatgggcttccctttgtgggtaacctgacctttctctctggttgcccttaacatttttttcttcatttcaactttggtgaatctcacaattatatgtcttggagttgctgtt

SEQ ID NO: 218729 - DNA, 609 bp, Homo sapiens
tggcatagaattcatctattaacaggatgttttgaggccagacgtggtgactcacacctgtaatcccagcactttgggagacaaggctggaggatcacttaagcccaggagttggcaagaccagcctgggcaatacagcgagacccccagctctgcaaaaaaaataacaaaattagccaggcatgattgttcatgccggtggtcccagctactcaggaggctgaggagggaggacagcatgggcccaggagtttgtggttatactgcactccagcctggcaacagagcaagaccctctctctttaaaaaaaacaaaacaaaacaaaacagaaccgggcgcagtggctcacacctgtaatcccagcactttgggaggccaaggcaggcagatcacgaggtcaggagttcaagaccagccagaccaacatggtgaaaccccgtctctacgaaaaaatacaaaaattagccaggcgtggtggcgcatgcgcttgtaatcccagccgctcatggggctgaggcaggagaatgacttgaacctgggaggcggaggttgcagtgagccgagatcgcaccactgcactccagcctgggcgacagagcgagactctg

SEQ ID NO: 218730 - DNA, 422 bp, Homo sapiens
tagcatgtaactttacctataaaataccataaagtaaaattgaaaaagttgatcctgtcaacgttgttattaaaagctattgcaaatgtaaagaatgaggaacaatagctaatataataatagctaaaatttgttattgagtgctttgtgctgggtagtattctgagtcctttaccatgtaatttttataatatcattcctagttttgcagatgaggaaaccgaggtacaaatgagttaatacatgtgaccaagagtgaccgctcttttttttttttctctttttgaggagagtctctgttgcccaggctggagtgcaatggtatgatctcggctcactgcaacctccgcctcccgagttcaagtgattctcctgcctcagcctccccagtagctgggattacaggcatgcgccaccacacc

SEQ ID NO: 218731 - DNA, 463 bp, Homo sapiens
aatcctatatccagtcaagagaccctcttagctaaggacaaaactaagtcttattctttgatataaagaataatatttgtgaaattcagacatataattgtgtaatgcagacatatttttggcttcctgttaaattgacaattagggaaaagggcttaaattagttgcttttgtgggatagagtatgaattcaaataccatctgtaaatttcccgattctttatccttgttgtggattgtttagtgtttaggagtaatctgtacagacatacttatgaaattgatgtgttagtttgaatactaattttgaataatttcaaactacagatttgcttatgagtagcaaaaggatgggcactcgttgttgactagtatatgtgtaatattttatatgttatttgacaaaaatgtataaaatgttatctttaaactatatcattaaagtggacttcattttaatata

SEQ ID NO: 218732 - DNA, 647 bp, Homo sapiens
ggggcctgaagttattttgcagtggctaatggcactgaggaatttcttttttggtgcatttggtttacactcatttcctctcctaattgttagttcatttgtaacagtgggtgagtgtttggaggaaaggagggagaagaaaggagggatactgtttctcccatgaaatagtctaattggttgggttgatggcagaaggaaacataggggagccttccagctcacagccaagggttgggctcttaaacactatgcctagtgttttctgaatgctgtcttcatggagcccagctcttactctctttgtactttacatctcacccccactcattacagatgctcataacattcttaaaatattttagtacttggcatttttctgttttcagtcagctagaacacactagagtcctttcctcagatggcataatcctttataggctctgagcctgcctagccatctcctatcggtgttattactcctcatctcaggctctgagatgatactcagaccctaaactgattggactttttggaggagggtgccagtagagaggtcaggaagatgtggagatgatgatggagagagatgtttttattttattttattttttcagacagagtgttgctctgtcgcccaggctgga

SEQ ID NO: 218733 - DNA, 575 bp, Homo sapiens
ggggcctgaagttattttgcagtggctaatggcactgaggaatttcttttttggtgcatttggtttacactcatttcctctcctaattgttagttcatttgtaacagtgggtgagtgtttggaggaaaggagggagaagaaaggagggatactgtttctcccatgaaatagtctaattggttgggttgatggcagaaggaaacataggggagccttccactcttactctctttgtactttacatctcacccccactcattacagatgctcataacattcttaaaatattttagtacttggcatttttctgttttcagtcagctagaacacactagagtcctttcctcagatggcataatcctttataggctctgagcctgcctagccatctcctatcggtgttattactcctcatctcaggctctgagatgatactcagaccctaaactgattggactttttggaggagggtgccagtagagaggtcaggaagatgtggagatgatgatggagagagatgtttttattttattttattttttcagacagagtgttgctctgtcgcccaggctgga

SEQ ID NO: 218734 - DNA, 587 bp, Homo sapiens
caggtaatctttctccttccctctgttcttttgtttctgttgttaacattacaatgccagacccaagaagggtgagtggttggctctgtctgtgtgtttaggcctgctgagctttaaccttacctaaattggaaaatcaggctttctgtttttcttctgtattgacttgcaaaataagcaaactattctgacttcccagtaagtggcaattagaatacttgttttagaaatacatttgcaactgaaaaaaagtggaaaatggtaaacattttgcattcctaaagtaagaaatagtttagcacaaatatagtaaacaatgtaaataaagcccccctctaaaatgctaacatttagagagatttagttatagcacagaggatgtaggtgactgaagtgaaggcagcataattaattgcctttgaaagagctatttgaatgtaatgtagctaagaaaacaaatctgcaatgtctacttctttttaaaaagaattatgagaatgtatttccctttccctgcataacttctgttttattgcataaacccctggagcataaaaataaaagtcaaataaacttaacatagcaaa

SEQ ID NO: 218735 - DNA, 410 bp, Homo sapiens
tacacatacacacacacacaccccccacaaaaacatttgtttccctagacaactttcatttaatgctttctagaaaggggaattggtcgcagtgtcctttgttgtgtagaaaaccccagtagatgtgggctgcactcagtggctcatgcctataatcccagcactttgggaggccaaggtgagaggatcacttgagcccaggaattcaagacttgcctgggcaacatggtgaaaccccatctctacaaaaaatacaaaaattagctgggtgtggtggcgtgtgcctgtgggcctagctactcggtaggctgaggtgggaggatcgcttgagcccaggaggttaaagctgcggtgagctgtgattgcaccactgcacaccaggctgggtgacagagtgagaccctgtctca

SEQ ID NO: 218736 - DNA, 439 bp, Homo sapiens
tgggactggggagtgactgataatcagtatgagatttctttttggggggttgttctaaaattagtttgtggtagtacgtcaaaaacaacgaattatactctttaaacaggtaaactgtatgtgaactatctcaataaaaagctgtttaaaaaaaattttgcactgggcacagtggctcacgcctttaatcccagcactcaggaaggctgaggtgggaggatcacttgagcccaggagttcaacaccagcctggacaatatagtgagaccacatctctacaaaaaaattagccggccaggtgtggtggcttacgcctgtaatcccagcactttggaaggctgaggcgggagaatcgcttgaacccgggaggtggaggttgcggtgagcggagatcatgccattgcactccagcctggacgacagagcgagactccgtctc

SEQ ID NO: 218737 - DNA, 422 bp, Homo sapiens
agtgggtcagaggtgcagttcttccctgatgtggctgctgcctgctccgaagaagcagatctttgtcagcctccagagctgcagaaggacactatcttgggcatgaatatcccacagcagcagtgcttttcttctctctccgccggacctggctcattcttgtctggcagaggaacaagcgatttctttttatgagcctgcaaacctccagcctcccagcctcccagctggctgggtgccagggctgggcctgacacacaggctgacgtccccacccagacccatggtcctggctgctccgaattctggagcgtctgagtcaccatgcctgagccggcggcgtctccatgaaagagttcagaagaataaaggaacaggctctcctatgggcctgctgatagcaatctatcagcatgactaca

SEQ ID NO: 218738 - DNA, 458 bp, Homo sapiens
gagtttatcacttctccatagcaacggttataaggaaaggattctaagtaaatggctccctggtagtcatgtatgttcaacataaagtgtcaatactaatttagcatacaagagtcatttgctgctccttatttgggcattccaaagttaataacccttcaaatgagcatcaataagattctagtatctcacaaggctgagtgaaggacatctgaagagcaagattcctccatagtaattaattataaaaccccccatttttttttttttgagacgaagtcttgctcttgttgcccaagctggagtgcaatggcgtgatctcagctcatagcaacctccgcctcccgggttaaaaccattctcctgcctcagcctccctcccaagttgctgggattacaggcgcatgacaccacgtccagctaatttttgtatttttattagagatggggtttcacca

SEQ ID NO: 218739 - DNA, 303 bp, Homo sapiens
gactctgtctcaaaacaaaacaaagaaacaccaatggatggaacaaggtattaaatggatagaacaaggtattaaaatattaacaatggcggccgggcgcagtggctcacacctataatcccagcactttgggaggccgaggcgggtggatcatctgaggtcaggagtttgagaccagcctggccaacatggcaaaatcctgcatctactaaaaatacaaaaattagctgggcgtgctgctgtgtgcctgtaatcccagctatttaggaggctaaggcaggagaatcacttgagccaaggagg

SEQ ID NO: 218740 - DNA, 259 bp, Homo sapiens
gcagagcttccactaagccttttagtgttttattcttaaatatatgagtggatggccaaggtcactaagcataggaagaaaccccctggtaagaaagacacgggtcaggcgcggtgcctcatgtctgtctgcaagcccagcacctgggcaggctgagatgggaggatagcttgaacccagggagctgaggctacggtgagccatgatcgcactgctacacttcagcctgggtgacatagactctgtctcaaagaagaaa

SEQ ID NO: 218741 - DNA, 394 bp, Homo sapiens
ctgttccttgggaacagaatatctttcttcaatgaagtgggttgaaccctggtacaaagcatctaatttaaacgacttttagagtggagctcaagtattctgacaaaaacacaataccaatactcagccagattctgcaaccatcttcctcctgtcagtctttcaagctatagaaggatggtaggactgtgaaactcctagcattccatatgtggctcatagtggtggaaaagcatatgatgttatttatggaagggaaagacttaaatcaggtgcactctttcatgacaaatacagagtcttgtctgaaatgtccaaacacatggaacatggggaaaaatatgccatggcacaacatttatgcaaataattatacaagcttattagatctaaa

SEQ ID NO: 218742 - DNA, 454 bp, Homo sapiens
aaggggctatctccagcctccagcctctcttctctgggggttatctcaggcatctctgtacatcagaaggcatctttcctatgttatggaccttgaagttcttcccacactaaggaggctgtctcaggagtttctgttccctaggggctatcttatgaattttcttgcactagaaatataggaaggatgcatcagagatccctgttggcagcaaggtctgcgagaaaggctctccaactctctttgcaagttgggtgctggctctgggatccccgtgcgtcatgtagtctacctggaggtctgcctcaagggtttcttcacaccagggcagggctctccatgatcaatagtcctgcaatggcagtcctttcttttttgtttgtttgtttgtttgtttttgagatggagtcttgctctgtcgctaggctagagtgcactggcacgatctcggctc

SEQ ID NO: 218743 - DNA, 323 bp, Homo sapiens
gattctcttagcgatgacacaagcgacatcttggaagaggcaaaacttgagacaggtcttcaaggattggtgccatctggacaggttgaagaggagtaggagggctttcggatgtggagaatggcatgcacaaaagcacggagatctgcagcaacactttatgccagttggattatggtccattgggagaaagatcaattaaggtgaaaccccagtagagaaagcactggagaacaacattcattcttccttaataaatcttagttttaaatatttgctttgagttttgttccattaataaagaaaataagaaggaaaaccaa

SEQ ID NO: 218744 - DNA, 271 bp, Homo sapiens
ttccattgccctctataacacatggcacaggccagctaggaaatataaaatcaatcagtggtttaaatcaagttttttactttctctctccatctgcagcaacactttatgccagttggattatggtccattgggagaaagatcaattaaggtgaaaccccagtagagaaagcactggagaacaacattcattcttccttaataaatcttagttttaaatatttgctttgagttttgttccattaataaagaaaataagaaggaaaaccaa

SEQ ID NO: 218745 - DNA, 261 bp, Homo sapiens
tctgagtttcctcgactgacttcaatggacctgtttctagaggggcatgaaggtggctgtgacttcataagcagaatggaaatctgcagcaacactttatgccagttggattatggtccattgggagaaagatcaattaaggtgaaaccccagtagagaaagcactggagaacaacattcattcttccttaataaatcttagttttaaatatttgctttgagttttgttccattaataaagaaaataagaaggaaaaccaa

SEQ ID NO: 218746 - DNA, 332 bp, Homo sapiens
tacaaatctctggaaaatgttaagagcaaaattggcagctattgttttaaaaattcttccctagtttatttgaactatttctagcaagatctttcagaaagcatatagattcctgtgttgtaagttcttagaggtcagggacagtttttttcaactttctctccttaatattatgataggattaactcttatttattcttagggtctctgatgaaatgttatttccttcttgactagatggaatgccctactataaatttgcatatttctctgtaatttcccaatctggtcactcatcacacttccttgtaataaactgattaattatcctt

SEQ ID NO: 218747 - DNA, 511 bp, Homo sapiens
tgtccataggtttctattctcaccatctttctgttacaggcgacaggaatttcagagaacttttctaatcacaagctctccagagtccatctgcaatgccatgtattcactagacccgatccagatcctattaaaactcagcatactgcttagtatgctgagaagaaagcgctcatcagtttgatgcaaacttctcagattgggcagctacaattagagtaaatacaactgttgtatcctagagaccaaggccagctccctatgactttcccttggtgttgccacaactgccaaatagggatgattacaaatcttgttcctttccacaaaagggctcttatgaactgtaatgataaaatattgacaaaacacttttgaatttgtggttaagatattcctggaatatctcaatgaacgcagagttttgggtttaaagatcaaagaatgaggtctaataaatgatgtatttcagtttaaggcttaaattatatctttcagcctccacgattcc

SEQ ID NO: 218748 - DNA, 426 bp, Homo sapiens
tgtttctagcagcattatttatagtagcccaggttgtaaataatccctgcctattaacaacagaataaattgtgggatggtcattgatatggcttggctgttatgccccacccaaatctcatctcgaattggaatccgcacgtgtcaagggagggatgtgtaacccccacgtgttgagggaaggaagtgattggattatgggggcggtttccccaatgctgttctcgtgatagtgagtgaattctcacgagatctgatggttttataaatggtaatttttttctttgctctcccactctctctcttgcctgctccgtgttaagactcgtcttcttccccttctaccatgattttaagtttcctgaggactccacaggcatgcagaactgtgagtcaattaaacctctttcctttgtaaattaccca

SEQ ID NO: 218749 - DNA, 234 bp, Homo sapiens
agtgagtttagctaggggaggagcattctgtgctgaaggaaccgcagctccaaaggctcaggtgggtgcatgcctggcatgttcaggaacaaggagggcattatgagcagagtagatgattgaaggggacggtggtaggacatgaagtgccagtggttgtaatgaataggcagatcatatagggctttctggaccatagtgaggaccttagctaattaccctgagtgtgttgag

SEQ ID NO: 218750 - DNA, 1481 bp, Homo sapiens
  misc_feature (1066)..(1066): n is a, c, g, or t
acctggccggaggagcctttcaagtgggcgtgtctttcggctggggaaaagggaggagttagactctgggcaacatcactcctccctggtcagctgggagagcaatcaaaactgcagcaagtcagaggctccggccagagagcaggagctgcccagaggcttgtggtcctgaaagctcctctccggggagctaaccagggagaggaggtactgaagagcgactaaactggctgcagcggagagatcagcccgaaggcgtccttgaggagcatacggaactccaaggaaggagtagaataaggagcaggcagagaaaccagacccggtggaatctctaagaggtaacaaccgggtttgacatggatcgctgaaagcgtctcttctaccatctggatggtcagggagacttggcttctctgactgtcctctaagacgcagattcacagagttcactccaggaacggccagtgaccgagagtctggaaatgtcaaaaacttttgtaaaatccaaggagatgggagagctagtcaacacaccatcctggatggataaaggtctgggctcccaaaatgaggtgaaggaggaagagagcagaccaggtacttatgggatgctcagcagcttaactgaagagcatgacagtattgaggaagaagaagaagaggaagaagatggggagaaacctaagagaaggggtcccaagaaaaagaagatgaccaaagctcgccttgagagattcagggctcgaagagtcaaggctaatgccagagaacggacccggatgcatggcctgaatgacgccctggataacctgaggcgagtcatgccatgctactctaaaacccaaaaactttccaagatagagactcttagactggccaggaactatatttgggctttatctgaagtcctggagactggccagacacctgaagggaaaggctttgtggagatgctgtgtaaagggctctctcagcccacaagcaacctggtggctggatgtctccaactgggccctcagtctgtcctcctggagaagcacgaggataaatctcctatttgtgnctctgccatctctgtccacaacttcaactatcagtctccggggcttcctagccctccttatggtcatatggaaacacatctccttcatctcaagccccaagtattcaagagtttgggagaatcgtcctttgggagccatctgcctgactgcagtacacccccttatgagggcccactcactccacccctgagcatcagtgggaacttctccttgaagcaagatgggtctcctgacctagaaaaatcctacagcttcatgccacattacccttcttcaagtctaagctcagggcatgtgcattcaactccttttcaggctggtaccccccgttatgatgttcctatagacatgtcctatgattcctacccccatcatggtattgggacccaactcaatacagtcttcactgagtga

SEQ ID NO: 218751 - DNA, 407 bp, Homo sapiens
gtaattgtctgtggctcccatagtagcatttgtccgtgctctcctcttgcttgtctcccataaagaccatgcaaagtccttgcagtcaaggccactgccactcacctttgctatcctcatcacctagcagagcccctggcacatagtgtgttgaatatctgggaatgaggaacttaactgcaactgaactttcaatctaactgacttggtgatgagaaatactagtcaggatgctctcatgggtgagacctgatgtgacgccaaagcttggttttctccagcttatgttttatttggactgcctgtctgaaagggctagacagacatttatgttcagagaggccatataagaagaatataaatgcggaaagtcataaacttcagctctgctctgggctccactctca

SEQ ID NO: 218752 - DNA, 371 bp, Homo sapiens
acattgtttgttgtctgaagctgtgttgtcacagcaatagagggaaagcaactgaccaaagacagcatctggtgtctgaaggcatttgacctcaccattggccctaggcacccccctcagatgccgtccagcaggttacacaagttcaaaaatgatgttttcttcacagaagctttaaaaataaatagagtttgaaaaggaagagtcaagttgtaggttaggatgagtcaatgtgagatttttgaccctttggctcacaatccttccaaggcaacttaataagctgatcattcttgtttgtgcaatgaaaaactaatttcagatgaatgcttagaggatactaattaattatcctttctgacatgctctgc

SEQ ID NO: 218753 - DNA, 340 bp, Homo sapiens
ttgaaaggggtctatggaaaccaaagcacgcataagggaatgaggactcagaagttgagaaacctgaacagagggtgcgggacagttttactttggatctgtattctgcctcttcttttcttccttctttcttagtcttccactttttttccctacaaatatttgttgaattacttgtatgtgtatctgttctttaactgtaagcagaaacccagttcatcatgagatttttcattctctcttcatgcacacagaatagttacatagatatatactgctgtgaatgtctgtttcaaaagctcactttaatgaaagtctgtttttgtcgtaggttttatga

SEQ ID NO: 218754 - DNA, 559 bp, Homo sapiens
aaccaatgcctccttcctgtctgctgctagcaaggattacacacaggcatctccacaaccgcattctctagtccctgcaaaggaaggtgcttagagctagtgagacaaaagcaatctattctcctgccagctctgggtgattccctgccctgaaattttcttgtgtccaggataagcagcattattggttctttcgaccaagttcttatctttaaccagcttgccctctgctgtgctctgcatcccagccccattcccccaacctctccaccccgccgagctccttagaagggctcaattcttctaccttatcatgttattgagagtcaagactttggtggcagcattaatcattatcaccaccatcatcaattcaccacttaggtttacatggcactgtaaaaagtacaaaggtctagggctttgtacacattacctccttgaatccaaaagtgaaacccatgacgcaagtaaaataatttccattttcccagcagcagctgttattgactgaaccatcacaacaagtcaggcgtgatgctaagtcctatatatgaat

SEQ ID NO: 218755 - DNA, 428 bp, Homo sapiens
ccaaaaccaatagcctattaaaaggactatacaccagaccaagaaggatttatttctggaacagaaggatggttgaacataataaaaatcaatcactgtaatataccacattaatataatgaaggagaaaaaatatcatttcaattgatgcagatatagcatttgacaaaattcaacaccctttcatgattgaaaaaaaaaaccaaaacactcaacaaactagagatagaaggaaactaccaaaacgtaataaaagcctgtttgaaaaacccatggatgatatcgtgctcaatgttgaaagactgaaagctttcctcaaagatcaggaacaaggcaaggatgcctgctctcaccaattctattcaatacagtactggaagtcatagccagagtcattaggcaaaaaaaagaaatgaggcatccaaatc

SEQ ID NO: 218756 - DNA, 513 bp, Homo sapiens
gctactcagatatagagtagggcatcctcagaaaacaaacagagaaacgcctcatctttaagtttttcttatataggggttttgtctatgtaaatgctaagctaacctgtgtctatgtgcaggtgggcagacagcatgacaaatttattattctactgatttcaagaaaactgtccttgacattctactgtgtaaatacatcaaagcataactgtaactatcttggaagcatatactgctatgggtattgggacatctggactttctgctgttgtaggagtatatccttatagatatctttaggcttttcctcaactataaacatcttatggctatgggtcatgactggcaaggaatgtgccttgttattctcaagatggagctgaacttaaaatggtattactctggctctccttccctaacaattcctccctatatttgtcagtgtgtatttttttaactatttatctttatcaagtatacagttcaatggtaataaatatatttacatcc

SEQ ID NO: 218757 - DNA, 188 bp, Homo sapiens
ttagggaagaatgataggtacataaaccagacaaggcagaagctatatattcataattagagtccatgaaaaacaaaaccaaagctaatagaacagaacaaatatttgaaaatataatttgagggggaaaatgttaaaaacagaaaagaataaccgtatctattgaaagcatatattacatagcagta

SEQ ID NO: 218758 - DNA, 358 bp, Homo sapiens
tagagaggggatcttactctattgcctgtgctcatccagggcagcctgtccaaagctgctaggctttcctgttctgccaggccaagtttagggttttggggccttcgtgtgtgctagagaagatgcaggaaaataggcttgatctgggtcagttcggtttcaggctgggtgaaactgaaccgtgaatctgcatagagtgtcagaaccagggacagctcctcctgtcacctttgctgcctttcccctggcttgggctagggagcgaatgggcagatttcgtgatggtatacttctctagcttcttttctcagtgcttcttccttccatttttatgcaagaatattactactgatagttc

SEQ ID NO: 218759 - DNA, 646 bp, Homo sapiens
gtattttaaaagatcacactggctgaagcgaggaaagatagtgggtttggaaaaggtacaaaatggttaatgcaagaccagtcaggaggttattccagcagccccagtttaggctatagtggtagtatgacggtgatgaatgtcactgagtgaagtggatagattcaaaaccagttgagaaggtaactgttagtagataataacctctgtaagtaggtgatacatctcagaagaatggaaatggtttatatcaacatttgtggcaaatgtggtaagaagcaaaaataaattttagtagggccaagtagcagtgagactatgtaagaagatgaacagaagagaaaggttagatttgaggaggagacaaatcgtgtagaaggaaagtgaaccaattggatgtaggttgtggagatcaaagcatcaaagaacaacagcatcaatcataatagtattggccacttaatatctgctggatactaatctacgtgctttacatgtattcattcatttaatctccacatctttaatttgagcaaatgcatgaaaatagaaattaagatgacagaggtaggtgtagaaaactggagagaatattagaaaatcatgcaatgtctaatactcacttgcaagcatggccctttcaagt

SEQ ID NO: 218760 - DNA, 587 bp, Homo sapiens
gtagagcattaagtgtgatcctagcacactgttgagccccacagtaaataatatttgcataatcacaatatgaatgtaaatagcatttcttttattagcctgttaaaagatttcatttgtgtatagaaaagaatgaaatcttgctcgccttgacagtgtaaaaagtaaagttacagagtttgggccctgtgaggtgggtcaagggttgggctccctctcatccacattctacatagtagcttttttttttttaaatggagtcttgctctgtcgccaggctggagtgcagtggtatgatctcagctcactgcagcctctgcctcctgggttcaagcaattcttctgcctcagccttccgagtagctgggactacaggtgcccgccactacgcccggctaatttttgtatttttagtagagacagggtttcaccatgttggccaagatggtctcgatctctcgacctcgtgatccacccacctcggcctcccaaagtgctgggattacaggcgtgagccactgcgcccggcctctaacatagtagctcttgaagctcatgttcatctgaacaaatatctgtaattggac

SEQ ID NO: 218761 - DNA, 209 bp, Homo sapiens
aaattatcataatgttggctgacacagatgatgacagagccaagatgatcaaggacagaaaaagaaaaaagcaagacatgctttacttggacatcaaaccattcaatattttatttttgatgtgtgtgtgttgtgggtgtgtgtgtgtataaatctcacctctaccacttcctttgtcatcacattttctaattcaaccctcctctacc

SEQ ID NO: 218762 - DNA, 218 bp, Homo sapiens
gtttgcttatcacctatctccctccactaaaagtaaggtccacgagagcagtcgcttttttgctcactgcagtatcccaagggactcgtacagtgcctgacacatactaggtattcaatagagaatttgctgaatgaatgaataaatcttcgctttccctaatttgcaaggtaggtttctcctctctgactttttttttttttttttttttttttttt

SEQ ID NO: 218763 - DNA, 262 bp, Homo sapiens
tgacagagcgagactctgtctcaaaaacaaacaaaaaaatcagaaaacaatagttctaaattctaaaagctcggatgaaaagctcaaatgatggcttttgagaagaatgaaaaaagctggccagctgtggtgactcaagcctgtaatgccagcactttgggaagccgaggcaggcggatcacctgaggtcaagaatttgagaccagcctggccaacatggcgaaaccccatctctactaaaaatacaaaaattagctaggca

SEQ ID NO: 218764 - DNA, 442 bp, Homo sapiens
accctgtctctacaaaaattttttaaaacattagccaggaatggtggcacatgcctgtagtcccagctactcagaaggctgaagcaggaagattgctggggagtttaaggtgcctgggaaaattgcccaggaggttaaggttacagtgagctatgatcatgccactacactccagactagggaacagagcaagaccctgtctcaaaaaaaaaaaaaaaaaaaaattgaaggtgggttggatgacctactatggtcatctggattttgtgtaaaatatagtcctatttcagttatttgtcttccaaattaagggaaattgaattttgaataaacatcagttgaaatgatcatttataattcagtgaaaagagtagagacaattgatgagtatttatggagtggcatctgggcactgaaagtgggaatttaaaagttaaaaaga

SEQ ID NO: 218765 - DNA, 500 bp, Homo sapiens
accctgtctctacaaaaattttttaaaacattagccaggaatggtggcacatgcctgtagtcccagctactcagaaggctgaagcaggaagattgctggggagtttaaggtgcctgggaaaattgcccaggaggttaaggttacagtgagctatgatcatgccactacactccagactagggaacagagcaagaccctgtctcaaaaaaaaaaaaaaaaaaaaaaaaaaaaagtataatatctcaaagtaaccattgaaaaattaattattcttgaataattttgaaggtgggttggatgacctactatggtcatctggattttgtgtaaaatatagtcctatttcagttatttgtcttccaaattaagggaaattgaattttgaataaacatcagttgaaatgatcatttataattcagtgaaaagagtagagacaattgatgagtatttatggagtggcatctgggcactgaaagtgggaatttaaaagttaaaaaga

SEQ ID NO: 218766 - DNA, 427 bp, Homo sapiens
atgctttctcccccaaggactcatagactcacttcacacccatctcaactggcacttcagccaagtaccttacaggtacctgacactttaaagcatgaagtcctttaaagtgatttaggtttggttttcttttgttttgcgacagagtctcgctctgtcacccaggctggagtgcagtggtgcaatcacagctcactgcggcctcgacctcctgggctcaagccatcttcccagaaagctgggaccacagacgcatgtcacagcgcctggcctttttgactttttgtcattatcatcaccaccatatttaaaccattagaagtaccatgtattaagacaaaaattaaaacccaaactagttgattatagttttctgacatcccccttgtaattatccatctggaaaaaaatgtaaagttatcaaagt

SEQ ID NO: 218767 - DNA, 409 bp, Homo sapiens
agctagaaatagatacttatcttttatttagtttctatttatgagcttttggaaatacaaaggtcattgaaatataatcatttcttataatccaccaccataacgcttagagtccattggagaaatatacatccaatataaatatacatccaatataaaataaccatacaaatattgtggtggggaagggtggcagggagggaggagagtgagagagagaagagggagaaagagagagagaaggagagagagaaaaggaaggacggatggatggaaggaaggaaaaagaaaagaaagagaaaagaaaggaacccccccccccccggctcccttttggtccttcgaagggcggaagaatgggtgtttttttttccaaaaaaaaaaagaaagaacaggagaaagaaaagaa

SEQ ID NO: 218768 - DNA, 189 bp, Homo sapiens
tcagaattctgtccccccacactcgccattaattatcatgcctagaagctttttagtaaaagcagcagttgtcaggctgacggaatctgacaggccagcaaggcccaattacacttgcgctatgtggcactttgatgtccgggaaacgaagaaagataggggcaaattgggtggcacattatgttaatg

SEQ ID NO: 218769 - DNA, 680 bp, Homo sapiens
agtgctgggattacaggcgtgagccaccacgcctggccaggattttatttttaattctcacagcaattctgcagagagaggtagtgagaggtttaatgctttgttcaacataatttgctgttaaatagccattcattggcagaaaatctgaactgttgtgttttccttcctgtgtcattcatggtttcagtcctgaagaggagcccactagagcccaacaggagaggagagtgggagaatccctcacccagaagttcacagtggtatcatttagtgacactcaggatgtctccagttattgttagaatttaaagttaggttcatccctgtgaggtccaagaaaatataaaaataaaataagggtctactagtattaaacatactctgtaatcacttttgaaaggaaaggagttagtggaaaaaatggaagaaccatagcgaaactaaaataaatatatgtagatatattgctggacgtggtggctcacacctgtaatcccaacactatgggaagctgaggcagccagatcacttgaggtcaggagttcaagaccagcctggtcaacatggtgaaaccccgtctctactaaaaatacaaacattaggccaggctcagtggctcacacctgtaatcccagcagtttgggaggctgaggtgggcggatcacctgaggtcagga

SEQ ID NO: 218770 - DNA, 565 bp, Homo sapiens
aacacagagaaacataaaaagggagttctatgcgtgcaagagagtgatgccatagttgaaatatcaccagcctctggaatgggccggggctgtctgtgctcagattttccagcaggtcgcgtgtgggtcgaatgctgagcagtaacctgggagcaatcagccaagccccctggctcctgcactccttcacatccagtatgagcccggtgaaatcatccaggcaatcagtgacaatgccgcccttctgctgaggctgattaaaagtggttggaactaatttaccttatatgactaattagggaactgggaatattacttaaaaagttgtttctgattaggtgtgtgatcgcccttccacccctgccagcattttctacgtggcagtccggcagaggagacacactggctgctgtcagtcctttattccaagtctcggcgtcttaacccattttgtgcctcggattccttcatcaagttgctgaagcccctggatcccatctcagaataatatttctaaatacacaaaataaagttcctaggattttcgaggaaaccaattctattg

SEQ ID NO: 218771 - DNA, 461 bp, Homo sapiens
agttaagtgtttattgagtatctattataaatgaagcagacttatgcttccagatgagatggagtaacaaggatgaggtttatgctactgcctgaaacaaccaaatatttgggcaaaaatatataaaattacggttttcaagacactggatttcagacaacgaaggataaggacagtgatccctgagatgggaacaagtgaggcacgtcccacaccgccccaggctcctgccttgatagatttttaggttgtagtataggcagaaagaacccaggtgggacccaggattcaaactggattagaatttgcaaggcagagttccacaggggagacagctgcacacagagaagaactacagtgatttatttgtagaggtcactcaactattcagcagagtacagatcagcatatttgtgtgagaaaactaccagaggttgggaaaagaaccacctgaaaggatt

SEQ ID NO: 218772 - DNA, 553 bp, Homo sapiens
tgggggaaataaactaacaaaggaattagaatggtactctagaacatatctattcaacctgcagaaggcagtaaaggaggaagagaggaacaaaagtgatatgagacatatagaaaataaataacaacatggtagatataaatccttccatatcaataattatattacatataagtgaattaaaaactcaataaagagcagagattgccagactgccttaaaagcaggatccaaatatatatggtctataagagtcacattctagattcaaagacatagttgaaagtaaaatgatggaaaaagatgacatgcaaacagtaataagaaagctagagtgactgtactaaaatcagacaaaattggctgggtgcagtggctcacacctgtaatcccagcattttgggaggctgaggcagacagatcactcgaggtcaggagttcaagaccagcctggtcaacatggtgaaactctgtctctactaaaaattagctgggtatggtggcaaatgcctgtagtcccagctacttgggatgctgaggcaagagaacggct

SEQ ID NO: 218773 - DNA, 690 bp, Homo sapiens
aggatggtttacaacccaggaatttgaggctgcagtgagctacgatcatgccactgcactctagcctgggtgacacagcgaggccctgtctcaaaaacaaacaaacaaacaaacctccttgtactaatacatatctctaacattacatgaaatcactggtttgacagttagctcttcttctgctaaactcctatatcccttaactgtgtaatcattaactcagcccttgtactgtttgaattttattttagtaaagcagttaccgtctattgagtgcttgctctgtgtcagatcctaggctaagtgacttaatgtatagttactctttgtaacaacccaatgaggcaggaaaggaaacctaggctcacatataagtagcaaaagattaagcagtaaaagagcaaggattctaacctaaagctgtctgacaccagaattcatgctttaaaacacttatgctatgtgtttagccttatttctacaactagattacaaattccttgaaggcagggattatgtctcatacttgcttgttggttccacaatactttgaatgcctgatcttaatatttagaaattgtttcttgattgatacaactgacatttcacacaatttagcgtgctgtaacatgaacacattggaatctctcagtaactgtgtgcatgtcttttgggaagctacctacattt

SEQ ID NO: 218774 - DNA, 884 bp, Homo sapiens
agcttctaagatcccagcttctgcagtggaaatgcctggttcagcagatgtcacaggattaaatgtgcagtttggggctctggaatttgggtcagaaccttctctctctgaatttggatcagctccaagcagtgaaaatagtaatcagattcccatcagcttgtattcgaagtctttaagtgagcctttgaatacatctttatcaatgaccagtgcagtacagaactccacatatacaacttccgtcattacctcctgcagtctgacaagctcatcactgaattctgctagtccagtagcaatgtcttcctcttatgaccagagttctgtgcataacaggatcccataccaaagccctgtgagttcatcagagtcagctccaggaaccatcatgaatggacatggtggtggtcgaagtcagcagacactagacactccaaagacaacaggccctccctctgccctcccgtctgtgagctcctgcccagcaccactcctgcactgcacttctgccgtccacatcccagcacactggcgacctgactagcagccctctctctcagcttagcagttcgctctccagccaccagagcagcctctctgcacatgcagccctctcctcgagcacgtcacacacacatgccagtgtggagagcgcctcttcccaccagtcctcagccaccttctccacggcagcgacctccgtctcaagttccgcatcctcaggcgtcagcctgtccagtagcatgaacaccgcgaacagcctctgtctgggtgggacccccgcgagtgcatccagcagcagtagcagggccgcgcccttggtgacctcaggcaaagcacccccaaacttacctcagggggtgcctcccctgctgcacaac

SEQ ID NO: 218775 - DNA, 254 bp, Homo sapiens
gtaattatttctatgcctttttggtggacatagatagaaaataacagattatgagttcatgccaatatttttgacttatgtttaggactacagagtcttcacatactttattggctttaaatctgtatctcctttctccaacgccgaaaaattgctagttcttaatgtagtagattctattaaagctgtgggtgacctgcccagactctacttacttggctggtgcacacatcccttggagtggtgagtattag

SEQ ID NO: 218776 - DNA, 465 bp, Homo sapiens
tcctacttgaagtctgtgtgtgagatggcagggaagggtgtgaagaccatcacctcggtggccatgaccagtgtgctctgcccatcatccagaagctagagctgcaaattgcagttgccaatatccgtgtctgtaaggggctagacaggattgaggagagactgcctattctgaatcagccatcaactcaggttgttgccaatgccaaaggtgctgtgactggggcaaaagatgctgtgacgactactgtgactggggccaaggattcatcacagggttgatggacaagaccaaaggggtagtgactggcactgtggagaagacccaagtctgtgtcagtggcagcattaacacaagcttaggaagtcagataatgcagctcatgagcagtggcttggaacatgcgctcaccaaatcagagctcttggtaggacagtacctccctctcactggggaagaactaga

SEQ ID NO: 218777 - DNA, 378 bp, Homo sapiens
ctatttttaatcctaaaccgtgtgtgtgtgtgtgtgtgtgtgtgtgtgtgtgtgtgtgtgtgtgtgtgtgtataaaataatacagtaagaggaaacctgggtggtcccttttctggtaccagcagcagattgaaaccattcaaacccctgtccatgggaataaattctcaccctagcatgccacctaccctcaataaaaatccaggcctggctccttttcttgcacattcaagccatgtcagatcaccttgaaaggccttcctacttacctcacaaatgtaatttatgtgagtagtaatttcttaccctcttaaagccacatctttgcaagtgactaacaattggtgccatgagcagactgttcagacattgcccacc

SEQ ID NO: 218778 - DNA, 668 bp, Homo sapiens
tttttgtacgtggtgtgaggtagacaccaaactttattcttttttatgtaaatatccagttggcctagaaacatttgttgaaaaaccatctctcaatcgtcttggaagcccacagacttgaatgatgtggcttgacttctcaagcttcatctcctgcagctgctgcttccccgtgcctcttcacaggtgacaccactctgctttgcagcttcttgaacatacaatgttctttcatgcctcaccaactttctacatactctcctctgccaggaaacactgtcatctctccctttctctgtcttaaatctggaagattcctctaaagtgcctaatgttttacctgaagctttttcctgtaccctcctgtttctattcctaggcagaagcagtgcctttcttcttggttgtgttggtgacatttgcctgtgcttgccgtagcatcattatacttaggtgactgtttccttggtcgcttttctctcagagccttagcacttaaccattatgccggccatgtagtagatgtttgttcaatgaagtgacagacttgaatcattgtcatgtgttcttaataaagctcatttttagtccatgtgtatattctgagaatatgtcctcctagttttttggtgatgaagttgccttttataaagggatataataggtgg

SEQ ID NO: 218779 - DNA, 165 bp, Homo sapiens
tacagtaatgactttccttaggtaccccaccaccaccaacgtcctgccctaacctgttgaacttcctctagctctaattttactctattgtatacaaatattttttgttttttgtcttattttcctgctgtatattgtttctacttcatttgttttgtttctccc

SEQ ID NO: 218780 - DNA, 430 bp, Homo sapiens
tgctagccttcttataggtgcaccctcatcgccatctgtgtctgttgactaccactaatctcttctcaatctctatagttttgtcataagtcaaccccttccttttcataaagggtttatgaatttccctgatgaaaaagtacaaaatgaggccaggcgtggtggctcatgcctgtaatcccagcactttgggaggccaaggcgggtggctcacctgaggtcaggagttcaagaccagcctggccaacatggtgaaaccttgtctctgctaaaaatacaaaaattagccaagcatggtggcacgcacctgtagtcccagctactcaggaggctgaggcaggagaatcacttgaacctgggaggcagaggttgcattgagtcaagatcacgccactgcactgcagcctgggtgatagagcaagtctccatc

SEQ ID NO: 218781 - DNA, 783 bp, Homo sapiens
tcctggaccctctgctgtgtgtccctttgcatcctggtagcaaagcacacagatgctggagttatccagtcaccccggcacgaggtgacagagatgggacaagaagtgactctgagatgtaaaccaatttcaggacacgactaccttttctggtacagacagaccatgatgcggggactggagttgctcatttactttaacaacaacgttccgatagatgattcagggatgcccgaggatcgattctcagctaagatgcctaatgcatcattctccactctgaagatccagccctcagaacccagggactcagctgtgtacttctgtgccagcagtttagccacagcgctgcagaatcacccctttcctgtgcagaaaccctggtgtttctccttctccttctacctcccagcagtcctgggcaaagtctttcctgttcctccctccccatgagaaaaagtggttttgggttgtgacaaagacagaaaatgaggtttcaacataggaaaccttatgttgatttgaggattatgaaatgggttttgaggattccttaaaaaattgtctctgctcaaaacacataggagtaagataaaccttggctactgacactggagatttccctgccctcctgcatttgccatcccatgagaatggtgggggctcttgagaagggctgcattttctgaactgtgaggccctcttcattctctcctaactctaagctgcaaacagaaatttccctcacacgttttctagattgtaaaagaaagttcttcttta

SEQ ID NO: 218782 - DNA, 502 bp, Homo sapiens
aggttaagagcatgttaaatcttaggccttaacccccatgaattcgaggaatctggggaagaatcacagatcagccttcaccactgagtttctagaacaccagagcaagagagtttcacttgggtctcctctgtagaaagagacctgtcctcaatgaactccaaggcggggcctgtttacactggacagctttcctgaagcacggtcttgctattcttattgtagtacaaaaaagactagatggataccgttgttcacgaagaagtaccctttgctcccccaattttagagaaaagatccctgccttcttcttaaatatctctagattaagagattttatcattttccctgaactctgaaaattgtttaaattccttggctctgtcctacatctttttgtctacctttaagtccctgtcatctaagttttattcatttcactggagatgaacaatagctgactttttttttaatataaaagaatcttgaagtcaaattacat

SEQ ID NO: 218783 - DNA, 1138 bp, Homo sapiens
cggtccccttccgggctgtgggagctttgttcttttgctctttgcaataaatcttgctgctgctcgctctttgggtccacattgcctttgtgagctgtaacactcacggcgaaggtctgcagcttcactcctaaagccagagagaccacaaacccaccgggaggaacgaacaactccagacgcgcggccttaagagctgtaacactcaccgcgaaagtctgcagcttcactcctaaagccagcgagaccacgaacccaccaggaggaacgaacaattccagatgcgccgccttaggagctgtaacactcaccgcgaagatctgcagcttcactcctgagccggcgagaccacgaaccccaccagaaggaagaaactccggacacgccgcctttaagaactataacactcacggcgagggtccacggcttcattcttgaagtcagtgaaaccaagaacccaccaattccggacacagcaggatcccacccacagaaccgccaggtgcacagctgcatatcctcaggggaaaactcccctcccctgccaccttactgataggcttcacttcccagagaactttcccaatcctgtgcaatgcctgagtggtacattgtattctatgagaatggcgcccccgcctccagagttgtgcaacaagacttccatgaatcaaagcccatcgctggctgcctcctctagccctgcatagcccaggtacatctgaaaggagtgagaagtgttttgagggctctccctgtctcttcctgcacctctctcttgtgatcccagaagctacaacctcagcccagattagcaggctgaggggtcaggaggctgtcactggagctgttgagctcatgaacacgccgaagttgctgcgctccagaaatgtggaagttggaatgaagagccaccactgctgccaccaacatgaagcttgaccaagcaagccaagaaaagatggccaagagcctctgccttccttctgccttctgcaacgcaatggtgagctgcacatccacaactgaagggagtctgggaaatgcagagttaaactttctagcctctctaagctttcaactgttacagaaaggcaacccaggaggagactggaataaatgctgagtgccaatttcc

SEQ ID NO: 218784 - DNA, 445 bp, Homo sapiens
actgtactgtgtctctgtattcttaaggatagataatagctacacaaagtttaacttcacagaacacctacagagaaggtaggattcaagcaaaatggtcaatgctggatcctgccctgcttaataatttgttcatgtactcatttgtttgacagatattattgagtaccagataccgttgcactacagcaatccttataaattttaataactcactcaaagttctcagtatgtaagaaaccgtattatttatctatgcatccagttttactccatttgaattacttattacttctcaggaaatcagttttaagattcatgatccttcattctgtactggctgacgagatgaaaaaaaagaaaaggattcatgatcttgcataatagcccgtaaccactatcagatgactactagcttactagctcactctctactggatttgtt

SEQ ID NO: 218785 - DNA, 557 bp, Homo sapiens
gtgaaaccccatctctactaaaaatacaaaagattagtcgggtgtggtgtcgggtgcctgtaatcccagctacttgggaggctgaggcagaagaattgcttgaacccaggaggcggaggttgcagtgagccgagatcacgccattgcactccagcctgggtgacagagcaagactctgtctcaaaataaataaataaataggaaagacagaagatctgtgttcttagtttttgtttagttcttaatgccttaactgagatataacttgcatgtatacaattcgcccatttaatgtgtatgatcaatggtttttggtctattcacagatatgtgcaaccatcacttcggtcagttttagaacattttcatcacctccaaacaaaactccaaaccctttagctgtcacctcccatcttcctgcccctgcccccacctcgcaagctgagccctaagttcccactaatcttctttctgtttctatagatttccctattctggactttcatatgaatgaatcacataacaggaggtcttttgtgactggcttctttcactta

SEQ ID NO: 218786 - DNA, 721 bp, Homo sapiens
agacactattctccagtttttgaggatttacttatccatttactcttctggtagacagtttggctgccagaaaaaaatatagtccttattatattgatatgagcattgacctttccataacaggattaatgaggttttctttgcccctgtccctcccaatttttaaaatattgccttgtcagtcaacttaatgagtttgtgcatgtttaatgttaaatggattctagttgtatcccctagaaacattttaacaaaaattgtgttgataggacaagtttctgtttatttctaactagggtctcttaactaaatgtacataacattagcccaagagttgatcttctggttttataaagtagccacttgaacttagctgagttgaattaaatctaatatttataataatttagtaatggttttgttcttagactataagagaaggaaccaggttaggaaggggtaatgaagtaacagcaggaaggtatccacattgaaaacagttgtgatagctagagctatggcctctattcttgtatcttctgcatctaagtgccctgtctgtatcgaagttttaggaggccctaaggaaacctgcttgggcattctgattccatgattacatttgtgctgccagaaaacatttcccattgcattttagtgatggagatttaaagaaagccaattactgtaactcccttaaataaaaacatatttaaaaatt

SEQ ID NO: 218787 - DNA, 509 bp, Homo sapiens
ctttgtgacttgtcttttgactggaacctgccaaaaagggtgattgtgacatattgctggacccagcacctaggtgatgtggctctcctttttttctgggcctcacatattttgggtattgtgatgtatagctgggctcaacacctagcagttggggagctcctttcttgaccattcccacaaatgacatatctctgctatgaccgcctatgacacatgacctaaatatgtgacccttcttttctgcctgtaccctgctaacagagaagattgtgacaaattgctaagtgcattgtatcttgtgctaaccttctatctcagcctgtgaccaagaatgcctaactgccggggaatgcagccctgtaggtctcaacctcaatttgcccagccactattcaaaatagagtcactctggtttaaatgcctctgacattaagatacactgtaaaattatgaaaaaagttgatttgaattttagcaaatgagaaatgaaataattagaatgggct

SEQ ID NO: 218788 - DNA, 219 bp, Homo sapiens
gttcaagtggcaggagatgatatagatgaaaggaagtcttgctaggaccattgaatcgccttatgacctaaccaaaaggtctggccaaaaatccagacagatcctgatctggacagtgccctgcaggccagcacccagcaccatcccagtgccctggacctgggagtatacagcgccaagaccgatctgcagcctggcaatgtgaatggggcgtttatc

SEQ ID NO: 218789 - DNA, 497 bp, Homo sapiens
gctttaagggcaggcaaacagtgtttcaaatggatatctaagacattatagctccaagccccagacctgcaacacctctgtctcctacccttggatgattcagttctacagtttggtttatatggtccccattcacctggagctcttccttaactgatctattatgtataacaggatggctcacccggcagcaattctgcaatctctttctcatgaaatattttgcaagaaagctctccctttgacaccctattcagcataatattgtatcatgtgtagattaatattgcatttgttccatgatcagttatcttgcaaagtcaattattcagaacacagccaagaatcaataggaagatgaaaaaattatctgaacaaccaagtaatactcttacagaatgttactcaaagaagaatctctctggccatttctcaggacttatttgcttctattttagatacaattcttacatgcttaataaaccaacttgttattc

SEQ ID NO: 218790 - DNA, 567 bp, Homo sapiens
tacacgggtatactaacaagtatcatttatagatgtttatttagactacatctccccacattataataaactttgtggttttttattgctttattataataagcactttaatacaaatcatttttctaattttagtcagtatcttaaactccatgcttagtcataaattaagaaatgaaaatatgtacactgaatcaagattttaagttcactcacccccaccattcctcttgttccttaatatcctggacctttttgtatgagatctgggaatctgaggttaggacagttgagaatatgagagaatgtaaccacaaattgctgattagaaccagagttacacagcaaagaagaggtcaaatccactgtttctctccattgttgagaatttctcatataatgagggacacaataaagtctaactttttatgcattcaataaatgtttactgtttgttgtatgataagtactggttccatatgtgagtggaataattatttgttcccatgacacattcagtatagtagaaaagacccagacaaataataaacaaactaacaaacagtt

SEQ ID NO: 218791 - DNA, 649 bp, Homo sapiens
gatactattgacatttggagctagataattctttgttgtgggggcctgttctgtgcattataggatggcatccctggtttccagcgggtagatgcttataatgtctccttaattatgattatcaaaaatgcctctagccagttgtccactggaggggaaaaatagcccctagttgagaaccacagtaagtcagagtcttttttttcttttgtagagttcagtgatgacgaagtttgacttacctggtttaacaaaaaggttgtgtttattccatagatggtatacccaaggaatattaaagaaataattgagtccatgtttagtctaaagttttagagggaatagctgcatttttgttgttcttgtcattctcctccctccccccagcaataaattgaatgtagggaaattgacttctcgggttttaagaaaaatgtttgaaacataagtcatttgggcttttttccccagaatgctgaaaacatgggattctcaaagtggtccctagaccagcaaaatcagcatcacctgggaccttattagaacttagcgggctccaactccagacctaattagcactgtgagggtaaggcccaacaatctgtgctttaccaagtcctctagtttattctgctaatgaaaaccacct

SEQ ID NO: 218792 - DNA, 473 bp, Homo sapiens
ggatgacctcattccaaagatctgcagagcccagataagcatcccagggttctggcagagggcccctccagggacaggaaggggacaggaagccggctttccgtgtctgtaccgccttccttgggaaggataggacacctgtggccatcaagtcatgatgccccatgctgtctcccgccaactccacaagaaaggcaaatgagtgtcacatcgcccccagagtcatgactttgctgatcccacatgggccccctagagggcttttccttttaggtcttccccatagatttctcatattttcatttaaacagatttgtatgtaattcttgaatgtttcctttctttcatattctcaaaaaatacattaagactagtaagaataggtaaaaaaaaaattggtacatctcagaagataatatgtgagactaatagctatagtttgcaataaagaaattaaatgaggtttttaagca

SEQ ID NO: 218793 - DNA, 724 bp, Homo sapiens
ttcaataaaactttttttctctaaaatgttttcctggagattagaaaatatctattgattataatttatgcccctcctctgttcctgctgttctgtcttgttactccccaggtggctcaataaaaaacaatttattgaacagacatgctttctgatgtgataccagaaggacttgtgtccaggtctaattaaaggacataagcaaattatgcatgaatgactggaactaacaattagacacatacttcaagagttcagcctgtggatcactaacgaatttgaaggataacccaagttgtagaatgttattctgattaggttaaattactaggttaacttgtgcagttatattataaagtaataatataactgtaaaataaattatacagttatatataactgtaaagtaaaattgtaatattataatataacttgtgcagttatattataaagtagtcaattaattgactactttagaatctcagggtgtttcagtaataattttttcagtcctttccatttccttcacctgtctccatgccagcttcatgtcaagcaaggcattattgtgtaaggtgtaattattgggtaaagtatttctgctacaggttgagtattcaaaatctgaaacgctctaaaatcatgaacttgttgagcaccaacatgatgctaaaaggaaatgcttattgaagcatttcagaatttcagattagagatgctgaac

SEQ ID NO: 218794 - DNA, 424 bp, Homo sapiens
tgtggtgggtctgtttggtgaaactttgaaagttagttatagacatgacatttcacacctaaatacttcaacatgtaacaactaaaaacaaagacatgctactatgtaaccataatatctaatcacacccaagaaatagagcggatgcaattttttttctcatatgcagtccgtgttaggatttctccatttgtcccaataatgtcctttatagctgttttaaaattcagaattcaattaggtgtcatgtctctttaatctcctttaatctagaatagttgcttggccttgttgtcttttatcggcattgcatttttgaggatcccaggccagttgttttgtaaaacgtcccacagtctaaatttgtctgattgtttactcgttcctggattcatattaaacgtttttggaaagggaactcatg

SEQ ID NO: 218795 - DNA, 282 bp, Homo sapiens
gttccaaatttttcaggagctgctcaagagtctggcttctgtcttgcttttcttttcttttcttttttattattattatactttaagttttagggtacatgtgcacaatgtgcaggttagttacatatgtatacatgtgccatgctggtgcttttctcggagtgctgacagaactgatcacagtctagaagcctgatggtcactgaaaataaatattattttttaaaatttcatttttctttcatttgaatattttattgttaaaaattccatttatattga

SEQ ID NO: 218796 - DNA, 526 bp, Homo sapiens
agatcgcgccactgcactccagcctgggtgacagagtgagactctgtctcaaaaaaaaagagaaaaatttatagtgattacatttaagtctaagtacaacttatagaggtttgtttatattttaaataatattttatatttaagaatagctagctggtaaggaattttgcaactttaagctgttggtttatttatcttttaaattagtgcacctggggactaacccattaatcagtcagatttctcttaaacattttttaggggagagggagaggagcgttgttctttttggcttcataactttcttttagcagcatttcgttcatctggctttaatttgtagaactctagcggtaatgcactgggtgttcttttaagggaaggcccacaccatcagttgggcagaggtgctgattttagccctgttcatcatcagctactaatctgtagtgccttagagaataatctgttcttccccccaatcccggcacaagagacactgttagtcaggaacttagaattgatt

SEQ ID NO: 218797 - DNA, 170 bp, Homo sapiens
gttgagcaaaaaggtgaggatcagaggggcaggttatttgtccaaggctatacacttggtaaatagcaaaacaagtgggaacctcggctgcagtttgctagtgcgtccgtactttactatgagtcacctggggatcttattaaaatataggttctgatttggtaggtctg

SEQ ID NO: 218798 - DNA, 179 bp, Homo sapiens
ccaggagagctaatagagcaggagtgtggagcggctgctaggctgcatcagggaccctctggccagctggtggtttgaagtaacagcagccagcgtgcttaattgtgtatctccagctatttccagctgtgctgctgagttggatttaaccaggtttgtggttttaacaagtgaatacc

SEQ ID NO: 218799 - DNA, 511 bp, Homo sapiens
gcagaaaaattgtagaagagtggcttgcaattccttacgcaacagaacagacaaaatgggtgatctttttattcaagagagactcccacattcacacgagtaagataggtggggtgatttatagcaatactcttgaattactctaacttaataaaaattaatgaggttcaggccgggtacagtggctcacacctgtaaccccagcactttggaggccgagatgggtagatcacttgaggtaaggagctcgagaccaacctggccaacatggcgaaaacccatctctactgaaaatacaaaaattagctgggtgtggaggctcgtgcctataattccagctactcgggaggctgaggcacgagaatcacttgaaactgggagggggaggttgcagtgagatcgtgccactgcactccagcctgggcaacagtgtgaactgtatctcaagtaaacaaacaagaaaataatagtgaggttcaagactttggtttaaaacttgtttttatcatta

SEQ ID NO: 218800 - DNA, 289 bp, Homo sapiens
aactatccatttctcccttcagttctgtccatttttgcctcatgtgttttgatggtctattattaggtgcataagtgtttataagtgttatatcttcttgctctactgaaccttttattagtatataatatccttttatatctcttgttaccctttttgatttaaaatctctattgtatgatattaatgtagccattcttactcttttttgcttgctatttgcatggaatatctttttgtaggctgtcactttcacctcatttacatctttggatctaaagcaaatctc

SEQ ID NO: 218801 - DNA, 691 bp, Homo sapiens
tttaaaatttacaaagaaataatggatttgaaattcccaaatttattgaaaaacattaaactgcacatccaggaagctcaacaaacaccaagcaggataaatgcatagagatccaaacatagatgcatcattataaaagcattgaaatccaaagaaagaaatggagaaaatcttgaaagcagtaaaaggaaactgcaggctagaagtgaaactaatacaaaagtattaactgctgatttctcatcagaaaaaaatgaaggccagaaggcagtgggatgatatatacaaagtactcacacacacaaaatccttcaacccagaatcctaaatccatcaacacataaaaaaatgaagtgaccccctacctcacaccacttacaaaaattaactcaaaatggattaaagtcttaaatataaggcctgaaactataaaaatcctagaagaaaacatagtaaagctcttgacattggtcttgcaatgattttttaaaatataacaccaaaagcaccggaaacaaaagcaaaaacaaagaaatgggaccaaataaaattaaaaagcttctacgaaagaaaggaaacaatttaaaaagtgaaatgacattctacagcatgggagaaaatatgtgcaaattatatatctgacaaggggttaatatctaaatatataagaaattcattcaactcaatagca

SEQ ID NO: 218802 - DNA, 210 bp, Homo sapiens
caaccaggccactaaccctacccactgctcagaaatcttcccacagcctcagcctggccccctcttatccatcccctccatacacacttgcctcagctcctcaaaacagtccacagccatcctccttccccacctttgcccctttcttcccttcctaaggaaatattggcccccttctctccaccaggctgaacccactcatcctgcaaa

SEQ ID NO: 218803 - DNA, 458 bp, Homo sapiens
ctcgggggatttcaggtgtcagtcttccttgcacacctcagtttccttctggaaacagtcggatgcggtgccgagatccatcctccacgcgctgtagctcctctctctgccaggaactcggcttgtcccaccgtccctcgaatctgcccttcaggccgttccccacggggacagatgaatcgagcatccggagagacccctcgatctgggactttgggattgtgggacgttctttcacagtctgcagaggaatgcagctcagtcagtgccttcttctgagaaactccctgtgcgcccttcctagtctaactccagacccccgccctctctcctgagcttttttttttttttttttttttgccacttcccgcatccctctctcccctcttgttctcaactccagcctttgctctgctcacattcatcccttttctggctcccagatgtgatggggcagc

SEQ ID NO: 218804 - DNA, 725 bp, Homo sapiens
ccatttaaatgctatagccatttattgatggttatagcatctggcttccaccattggtaaactcaccacttcatacagcaccaattacacatgcttacaagcaagagactcaaaacaaaacaataaataaaagaaacatgggggaggcaacttcttaactgaactttcatttttctgtaacattatattatataaaccttctgtagcacctacagaaatctaaaaatagagattagaatctattgtggcagaaaataagtttgtcactacatcaaccagccacatgggagttaatctcattaacttttatattgcaggatgatgcataccttggagagatgagttcagtggtaaatgacatgaatcttggaatttctttacattaatatctacttcttctgaaacttcagtttttgaatggaattaaaccaacaagttctagttgtgtatagaagaaaatttgcataagtctatagaagtctatataagaaaacttcttaaacatagttcatgagcagcatggattagttatccttcagctggaaggtttcttggagaacttaaaagcaagggacttcctgcagaaatgactgcaaacatttctccttttatgggctagcatcctctatggtggttttgtaccactgtcttagatctgatggaaactcattcccagaattccctttcctaaatcgttcttcattccagttggctacaaaggaaat

SEQ ID NO: 218805 - DNA, 671 bp, Homo sapiens
ccatttaaatgctatagccatttattgatggttatagcatctggcttccaccattggtaaactcaccacttcatacagcaccaattacacatgcttacaagcaagagactcaaaacaaaacaataaataaaagaaacatgggggaggcaacttcttaactgaactttcatttttctgtaacattatattatataaaccttctgtagcacctacagaaatctaaaaatagagattagaatctattgtggcagaaaataagtttgtcactacatcaaccagccacatgggagttaatctcattaacttttatattgcaggatgatgcataccttggagagatgagttcagtggtaaatgacatgaatggaattaaaccaacaagttctagttgtgtatagaagaaaatttgcataagtctatagaagtctatataagaaaacttcttaaacatagttcatgagcagcatggattagttatccttcagctggaaggtttcttggagaacttaaaagcaagggacttcctgcagaaatgactgcaaacatttctccttttatgggctagcatcctctatggtggttttgtaccactgtcttagatctgatggaaactcattcccagaattccctttcctaaatcgttcttcattccagttggctacaaaggaaat

SEQ ID NO: 218806 - DNA, 757 bp, Homo sapiens
tatggaaactgtcatataggaattgtattttatttccacgtagaagtcaatttacaagcaaattgttaggatcacatgaatttgacattaattttacaattttaataacaaatttatttttagaagccatctcgttatgatttctctgattattaacttgattccataattgactttgcaatctttggttagccaatacacaccctctaccatcattaataacatttttgctccagcttattaagaaatgatgctcatctcatttcatgctctggaagcttgatgtcaggaaaggcagctttaattataagctttaagaacagaagcttaatcccaacttggatttagcaaatttgaaagcactgttaaggctaccttcattcacagttacctggatattgggtctcctttttcttaaattaattgttggtatacctacaccaataggctgaagcaacagaaaaatggtaattcatcatagtacatgtcaacataggtacgggttctatcctataatcaattttcgtcagatatttccttgattgcaaaaaggtctaaatgatagaattcaaaatatttggtaggtatggagttcatgagtcaataaaataagaatgtaaaaatatcttcaatgaatacaaactgttacatttttaagaaaaatgactattatttttctttttctagaaaagtacgtatttgggaagtgggaaaaatggttgtttgtcccagattacttttccattgatttgacaaa

SEQ ID NO: 218807 - DNA, 326 bp, Homo sapiens
tgcttctacctaaggcagagcctttactttaaaattagagctgtcacgctaattcaaatggtaatcaggtatctagaaccatcaactccatagcaaagaatacgtctctatactcctaaaataattacaaatgtccatgatattatcattcctactttccttctctagctttcatagggtcaagcttggatgcattttgcttcacccaattcaacagctttcccaagtaccctcaggtggtaatgccctcactcaggccaccaagagaatagcgtctgaagctgagcagtttacctaccaccaaggtagaatgcttcacccactgc

SEQ ID NO: 218808 - DNA, 404 bp, Homo sapiens
ggtactgtggggcttacataaaacatcttatagttgtaacaaatataaagttgatattttaagctgataacaactttaacttcaattggatataaaactctattctttcacctcccttgccctttttattattgtcatatagttatagtgttttttatacttttgccttttaacttgagtatcagaattaaaggtgatttatacacagccactaaaatattacagtattatctatttttctgtatatttacctttaccagtgagctttatggtctcataataatttctgctgctgcctagggtgttttcatttcaacttgaaggactccttttagcatttcttgtaaaggcgatatagtggtaataaactccctcagtatttgcttatataggtctttatttct

SEQ ID NO: 218809 - DNA, 442 bp, Homo sapiens
taaaatctttgagataattttaggaatttggaattagaccatatttgttcctggggaagtggattaattattataagcttactctgaaccattacaggtgtctttgacttaccttggaccataggatttctctggagtatctgcataaagtccatctataatacaatgacctggcctcaccttacccagcctcttagtatccttcagatatgcagagctaggccgagctcagtgtcttctttattagcagctgcagattagggagtgcatctgctgtgttatagtcacttttggaagcataatgcaatggatttatgtattgtcctgtttaaggacatttatattgtttcattttaaaatttttctcatagaaaatcattctgcaatgcacaatcttgtacatgtcttcttgtgcaaagtgtgagaacagcttctggatgta

SEQ ID NO: 218810 - DNA, 599 bp, Homo sapiens
agagacagggtttcatcatattggtcaggctggtcttgaatttctgacctcaggtgatccgcctgcctcggcctcccaaagtgctgggattacaggcatgagccactgtgcctggccttgcataccagattttatgagtaaacatttctcttattattgttttccagtttcatattagtgtatttcttcagtgtaggtttcttaacatcagtttattgtgttttttggttttacctatgtattataatttcagacaattttcaattctgtatgctttaattaagagataattaaatcccatattgggctttaattggccgggcacggtggctcacgcctgcaatcccagcactttgagaggctgaggcagatggatcacaaggtcaggagatgagaccatcctggctaacacggtgaaaccccgtctctactaaaaatacaaaaaattagccgggcatagtggtacgcacctgtagtcccagctactcaggaggctgaagcaggagaatcgctcaaacccgggaagtggagattgcagtgagccagatcgtgccgttgcactccagcctgggcgacagagcaagactccatctcagaaa

SEQ ID NO: 218811 - DNA, 535 bp, Homo sapiens
ttgctcacagaattgaatttttttgtgtattatctgtcacttccttccaaatatcagtttattaggagttaaactggaattgcagaacaagattgcttctttgggcattattaagaatacaaaatcaatgccgtgtgaagtatttgagtgctgcaggccactgatgagcttttaaatgagttatggggcatagaaatcaggttaatggggttaacgctctaatttacacagtgtcccaaggtaactgacttcttaatatatttaatgagatgtaaaaaaaagtccaccaccaaagcaaacttatatgtttctaaatgcacacataatgtacaggtaaatttacagacaactttctggatggatagatccaaaattgataaatgcagttagctctggggaagagtgagattgagtgctggtcaacagagatgtcagttccatgtttgttatttacagtttctagagtaaaagtgtatgcgtgcattatcatttaaatgaaaaataattaattaataaaaaattgtattaacaactc

SEQ ID NO: 218812 - DNA, 240 bp, Homo sapiens
aacacagttacagccacacacagagaataacagtcacacacagtcacacacacagaataacacagtcatcgacaccgaggcacacacggcttcagttgcttgcctggagtcacccatgcgatttgcaataccagacacacaaattggtagcacggggaagcatctgccatagacgacagattccacaaacatgaacatcagaaaccatgcctttactactttccattcacacctcttccg

SEQ ID NO: 218813 - DNA, 460 bp, Homo sapiens
tttgatttagaagcataatgcgacaattcttgcacctgagtgccgtgggacccattcactccttcctggccccaagcagctgacgcaggaggcctaagttttaattgatatagacttgaaatattcaaagagctaagctatcaaatccatcttgttctctgcatttttcttataacacagagtatgccccagtgttgaataaccatgccggggacagcaggaaagggactcacgggttgtgaatttacatgtgacgtcagaaaggctctgtagacaggaggcgggatgtgcgcctggccagcaccccccaccccgcctccatgcgcagtgattacaggctggatggcacgtagtgagccaggcgaggtcacctttgcacaagcggagtgacttttcccccaatctcataccagtctggcagcatgtatgaaaagaacggtgagagaagctgttttatgca

SEQ ID NO: 218814 - DNA, 472 bp, Homo sapiens
cattggcttggtaaaagttgaaaccttaagaaagcagggtggctcaacttcattagccagcaggaaatgcaaatgaaatctacagtaccacatcaataccatctgacatccatcaggatggctaaaataaaaaagactgacaatgctgtgtgttgtgagacggtggggcagctggtatgctcctagactgctggtgagagtgtaaatgggtagattcagtatctatgaaaaccattttcagtatctacgaaggctgaacctatgtaatatcctatagcctagcaattccgtttttatagtccagtggaaatgtgtacatttctgtactgaaagacatatgcatatagtagcattatttataatggtgaaaaatgcaaacaactcactaatgtttggtgtactgacaaaatgaaacacgcagtagcaataaagaagaatgagcttcaatacatacaatatggatgaatctaaa

SEQ ID NO: 218815 - DNA, 557 bp, Homo sapiens
tgtgtggcttggttcagctgaaggcagttttctgcattcacctagagcttctgcaaacaaaattataccagcaaatgtgaaatccacgttatgctcaaattgtcccctaatatgtcaatcatgttgaaacaaatacgggttttacaaacaagtgttatacagaactgagtgtataaggtgatgattgccgtgaaaaacagcagcaggataaggaaacagaatagggattcttgttttatttttaaatatgttattctataccactgtattcattctatgccactgttagtaaaaaacccacgtatcagttgcatttatgtaagagcctgcaatcatttctctttcttgttctcatgtcattcttcttccaccttcagaagtgtgtactgttgacacatggtgcttcgacactatgctcactgcacacagcccctctatggagcctccaggtacttctactattgttcactataataaggcaaggtggctcgatgcattgaaatggcagcagaggttttccaatgcagaccccctccgcagcatccaccttctttcta

SEQ ID NO: 218816 - DNA, 696 bp, Homo sapiens
aatagagtaggactgcaggcagcagtgaggtcccacttgaggttgctgagcataaatttaaggtagccccaatctgtgtgacagggtgatttttttcctacagtgcccaacagcctaggtaaaggaatggccaagacagacagctggattcagggtatacactctaaaatttgtcaggcagataaaccagaagaataatgaagtaatggagttgagaacaccggtcagaggccaatgttatgagtcatggagtccttcctcagtagataaggaataggggacagcaagcttattatagataaagagaaaggagaaagcagaaagactgcagatcttaataagtttggaagataaacgtagtgaaaataaccaaatgaaaagaattggaggacttaaaagtcaagggttcagaggtgctgtggtttgttgaagacatggcctaggggtggccatgggattgagtgattgaagcacaatggagaaggtaattggagatggaatcaagaaactgagaagtcaggtatgtttcacagaaatacctagatagctaaagagggggagggatagcattaggagaaatacctaatgtaaatgacgaattattgggtgcagcacaccaacatggcacatgtatacgtatgtaacaaacctgcacgttgtgcacatgtaccctagaacttaaagtataataataat

SEQ ID NO: 218817 - DNA, 139 bp, Homo sapiens
cttctctctttctctttcttcttgcttgctttcctctctttctcctaccccccacctcagtctttctttctgtctccctctcacttacatgaagggacacatctagcttaggaatgtggcacagagctaattagccagg

SEQ ID NO: 218818 - DNA, 448 bp, Homo sapiens
tgagcaagggatattgaaagctctgcctgtgattgtggaccgggccatttttctaaacagtgctatcagtttttattttgtatagtttgaggctgtgtttttaggcgtgtaaatgttccaggctgttaggccctccttgagcctcttcttatgaaatgatctttttatcctttgtaatgttttgctccaaaatctactttaatattaataaagctattccagctttcttttgattaatattaatgtggtgcatttttccatccttatactcttattgaccttgtttgtctttatatttgaagtgtattttttgtaggcagcatgtaattgggtcttgcgttttcctttggattgggaagaccatgtacactgaatgaggttatggatatggttgtcactgaatctgtcatcttgatatttgtttgctatttgtccagtctgttccttg

SEQ ID NO: 218819 - DNA, 385 bp, Homo sapiens
aaggggagaagagaaagctctttgttaaaaatgccaggtaacaaacttagaaggaatgacagaggaataacatccattttgagtcaccagtgccataactgatagagaagattatcagggggctaaaatcactggatgaaagaaaactatatgaagctttttaacgtagcacaatagataaaagtatgaaaacataaattagaaaaaactaaaaatcataccataagggatggataagttagaatacaggaataacaggccaggcatagtggctcacatatgtaatcccaggattttgggaggccaagtcgggaggattgcttgagcccaggagttcgagaccagcctaggcaacatagtgagaactcgtccctagaacagaaca

SEQ ID NO: 218820 - DNA, 529 bp, Homo sapiens
tctgccagtcgagtttgtcttctccaccgtccttgctatcagtctctagctttcattttccccttcttggtggtattttcgtctgggcagagttcattgcaacctctttagaagctctcttcactatcaatctgcaggaccactgtctcttcctgggctatcctgggtcactccaggtcctccactaacatgtctgtaggatccactgggattctggtttgggacctcattcgtagtacccactgaaagtgccagtatacagccaaaagtgtccatagtaggtataatcatctaagtggctgtattaaggtaatgttcatggacgttcatttgacccattacacggatatagaaatagacttagatgggctgaataatgaacaaaagggcacatggcatcttgagtcaatacaagcgtctcactgtctctagggtcctgtgtaacatatccccatctccaccaagggcccggctatgtgttcactagatacatgaatgaatagttttcttttctatcctcctgcattct

SEQ ID NO: 218821 - DNA, 214 bp, Homo sapiens
ataatcagttgactttaagtaacagatgttactctatataatgtgggtgggcctcatccaatcaagtagaggcattaagtgcaaaaacaggttttctgggaaggaattctgtatcaagactgtaacatagaaatcctgcctggactttcagcctgcttatctacccctatagattttgtttattttttttgtgacagggtctcactctgtcact

SEQ ID NO: 218822 - DNA, 909 bp, Homo sapiens
ccacaccagctctatttcaggggtgagagtcagagagcactgcaatatgtgcttcatgggatttcgattcgaagatcctagaccagggagacactgtgagccagggatacaacaaaatactaggtaagtcactgcagaccgacctccctgcagtttgggaaagaagctgggtttgtggagaatcagagcatcttgacatgactgctgacctaaagatccctggcattggccagggatcctgtggaacctcttctagttcaggggtgtgagcattagactgccagttgtctagtgacatctgatgcttgctgtgaacttttaagatccccgaatcctgagcacctcaatctttaattgccctgtattccgaagggtaatataatttatctggatggaaattttaaagatgaatcccccttttttcttttcttctctcttttctttccttctccctttcttctttgccttctaaatatactgaaatgatttagatatgtgtcaacaattaatgatcttttattcaatctaagaaatggtttagtttttctctttagctctatggcatttcactcaagtggacaggggaaaaagtaattgccatgggctccaaagaatttgctttatgtttttagctatttaaaaataaatccatcaaaaataaagtatgcaaatgtatcttttaaagttaaaaaacaaaaaacaaacaacacaaaaaaaaaactttgggtggggcggctcggggccctcggaaaagtttttctaaaacacttcgtgttggggggcgggggccacgtatggtagtgtgaattgggccaaggtggtcccaaagggagaccgggcaggatggggttgtgttttccccattaaaaaaggccggggaaccggcgttttgacacaccgaggggttgg

SEQ ID NO: 218823 - DNA, 296 bp, Homo sapiens
tgcccgcatatgaatatcccatcaacaccacaaatttgacaaaatgtgtcttccctcaaactcttagtgaaaagcatcacatttaccggccacaaacttggaaaccatcctccataactcctactccttcctcagatttcatctcatcttagttcctcaaaatctctctaattaaacctccctctccaaccctcgttagtggggtcctctttgtcccttcccagtccctcctcttggacactctaatccatcctctacattcttgctgggctgaacttcttcttcttctttttttt

SEQ ID NO: 218824 - DNA, 484 bp, Homo sapiens
attgtcattcagttgatttgaactggggctctcacatttatattttttaaaagctccccacatgattctaatgtgtagctgggttaaaatataagtgaataccagtggtttcagtcacttttaaagttctttcccagaatgcttccagctgtgcagcttttaactttatacttcaaagtctttaccttagcagattcaaaaaaaaaaccttgtacttcctgcagatgactcatccaggagagtcattatatgaactatgagctggtttgcaaaaggaagaaaacattttgtggcagtaattaaatttctgtagacaatatgaaataacagaattcaggattattctctcaaagatttaaaaaaaaattctctattcatttttttaaaaggtggttgcaggaacagtacagagcttatagcatcctatataatccattgatactgtagacttttgttgaattaatagtcttaatctcacttcaag

SEQ ID NO: 218825 - DNA, 504 bp, Homo sapiens
gggtccacacttggtttgatgctgtgcagtcaccatcttgaaaatcttaattctttttgaactggggaccttacattttcattttgcactgggtttcacaaattacgtagctggtcctgctgaaagacattgtgtctagtgctttacaaatattatgccatttaacccttgtgatgacccagtgaaatgagccatttttattacttttattttacatataagaaaaatgaggcttcctgagtttaagccacttggctcagttcccacagctatttagtgatagaaccaggattcaaacccatgtttgcctgcctgcaagtacttgcctatcaggctgtctgagtgaagaatcctgacttaaagagaaggaactgaataagaggttgggagagagtgattggaatataggaactgctgagcctgaaagcagctaatgtttaaatgaggctgacagtggcagccaccaaaccttcctagtgagatcacttttgttgctcttactag

SEQ ID NO: 218826 - DNA, 196 bp, Homo sapiens
agtggggagagtggcttgagcaggtcaacgggctaggggaggtgtggcaccacgtagcagcttgtagcagccacccccttacaaacagggcacatcagactctgagccgagtgccttccaaatagtattttgtttttgacattccaacgttcctgggaggaaggtttcatcatcccattttataggataaaaaaaa

SEQ ID NO: 218827 - DNA, 273 bp, Homo sapiens
atatactattgaagcatggaggcatgggggcatagaaattatgaagttttgtggttcttctacttgattaccagaatcgcctaggggagcctaagtagacacccctaaaaccactgcagatcagtgtgaacatgaccagggttgaattagagactaagaatcctgaaagtaatccatattccttctgcattgacaaatgaatttctcattggactgtaaagaaatattaattgttagtcttatagttttgtatatcaccatagcaggctataa

SEQ ID NO: 218828 - DNA, 603 bp, Homo sapiens
aactgcaactatttgttggtctcaatttgaatgggactgatagtcctgttacagtaggtagttagacaaaagcagggcaggagagcgttccccacacaccaggaatgtcaggcagccatcagataatggtcaggtggttgctaactgtcgcgctaaagtaataattggtcacagctggtgccagggaaaggcagactctcaatagatagaaaacctgaaactgatgatcagcagcttcctgataagatttcaggagtcgggcaagcaggctcaagcatccacactaagatgcaaaatggcggagtttaactggtatatgacctttctctaggaacactcgactggtaaggggaaaacgcctcaagtgagcatacgtacaacttaaacacactgcatatgcagcccctcccaagtgctagcaggccactgcaggtgtggaatgccaacatatcaaatcccaagtcaacagtcaaaccaggtacttgaatctcttaagcagctcacttcgccctcttccaattgtactttacttcctttcattcctgacctaaaacttttcaataaactttcattcctgctgtaaaacttggctcagtttctcac

SEQ ID NO: 218829 - DNA, 230 bp, Homo sapiens
agggggcggagggggtggggcgctcggtctaacggcctggaggcgtccccaaatgaacctgaccttcccggcgttcctctgcgttccctgggcgatttgtgcagctgtattcgttctgttggtcgcatatgtggccgccggagaaataaatgcattgtcttcgctggcgagtaggggctcctagggcgagtcccgtgttagggacttgggaaatctctgtcaccgactgt

SEQ ID NO: 218830 - DNA, 948 bp, Homo sapiens
agcggagtggtgatgtcatgcaggcaagatggcggaaggggaggacgtgggatggtggcggagctggctgcagcagagctaccaagcagtcaaagagaagtcctctgaagccttggagtttatgaagcgggacctgacggagtttacccaggtggtgcagcatgacacggcctgtaccatcgcagccacggccagcgtggtcaaggagaagctggctattgcagcctgttcccggggcgcttgcttcctctgcccgttctctatacagacggaaggctcctcaggagcaacagagaagatgaacgaaagggttatctgacttcctaggggtgatctcagacacctttgccccttcgccagacaaaaccatcgactgcgatgtcatcaccctgatgggcacaccgtcttggcacagctgagccctatgatggcaccaagggctcgcctctatagcctgcagtcggacccagcaacctactgtaatgaaccagatgggcccccggaattgtttgacgcctggctttcccagttctgcttggaggagaagaagggggagatctcagagctccttgtaggcagcccctccatccgggccctctacaccaagatggttccagcagctgtttcccattcagaattctggcatcggtatttctataaagtccatcagttagagcaggagcaggcccggagggacgccctgaagcagcgggctgctctggtgattcttgtacctaatctggtgtgctcaccaatgagtgaaagggatcgtgggtcagggacaccgagagagtgaggtcacttccacttcaaaccttcagtgagggggtgggatggagagaatgctgaatcttttttttgacgggatggggtttttctctttgtaattatttctttagtttaattaaccttttggttgtttgtgcaatattatatattttaaattat

SEQ ID NO: 218831 - DNA, 261 bp, Homo sapiens
tattcagcagacatttagtgagacttgagaatgtcctgtgggggtggaagtgggtagaggagtggtaggcctataaggattgatgagacataatgtctgactttaaggaacataaatctggcactaaatataaatttttgaaactccttaattcttagattagccaatgcagacagtaagtaacttactgacctaaaccagaatttttttgtaacatagattttaataaatttctttgttttttgttttttggtttttttt

SEQ ID NO: 218832 - DNA, 445 bp, Homo sapiens
cgagccccaagaattcggaacagggtgaaatcactaagactcttgttccagggaagagaagaaacaaaaaactgaaggaataaaaagtttaagccacaaagcattaataggaacacttggacctgtacaagagatatgctgaggggcatggggaaggaattccttccttctcaagctgtaggtgtcaggctttggccgtgaaaatgacagtggattttctactccttcagcaaactttctggaaaccccatcacctgccacgtgtgtgtggaggtgctgtgtgggtatacaaaggcgaattaagatgtgatcctgggtcagggacagtggctgccacctgtaatcccagcactttggaagaccaaggtggaaggctcacttgagcccagaagtttgagaccaacctgagaaacagagtgagatccccatctttacaaaaaaaaaa

SEQ ID NO: 218833 - DNA, 293 bp, Homo sapiens
atgtgtatattaaccacaattttaaaaaaattaatatgaatacaccatattccgggtttttcataatttaaaaatcttataaaaaaatgtaaagaggccgggcacagcgagcgactcacacctataatcccagtactttgggaggctgcggcagaaggactgcttgtgcccaggagtttaagacccgcccgggcaacatggcgagaccccatgtgcattaaaaaaatgaaatgtcaattgaaaaattataatagaactcatttaaatttggtagagactaaagcaagatctct

SEQ ID NO: 218834 - DNA, 493 bp, Homo sapiens
gccggaggcctggataggtctggaggcttgagaagacctagagtaaaaattgattcctagtgagatagtcatactgacagttttacaaccactcagcctgggttaaataatttagggacggagaaagaggtggtaatatgatttatccagaaagacaagggtgcctgggaacctgaacctagggtgttctcctactgatatagagtattacagtgttgaatccagaaaagagagggcaggggaagtcctggaacccttaatgtgtgcaagagggactgaaggtctctagagcagctgttttcttcatgggctttgtatcacaaataccttggagcttcataaaagctctatagatgagtctacaacaactctgggctgaatgaggaggagcagaaaatgaggagaagtaggatagtgggaggtgatctcacaggaaactctttgggacttcagagtattgtgaaatagaacactttcatgctggggctctttt

SEQ ID NO: 218835 - DNA, 133 bp, Homo sapiens
cagtggaaaataacttatattgagaccccacgagctgcacaatgtgttcctggcattaagctcattcttcttttgcagttcgatctttcttgagtggttccatgaacgctttcttctcttctatggtctggaa

SEQ ID NO: 218836 - DNA, 780 bp, Homo sapiens
gaaatagacacctgggaattttactaatggccaataaggaggaactgttagaatataaattcctggtaaaggaaacaaaaaataagttatttccttaagggactacagagggtacagaagtaactttttgtccttttgtttgcatattttcatacaaagggttctcatctattaattccattctgaaagataaacagcacaccagctatccttagcattctatatataagaaacttcagactaagctgagtgtggtggctcatacctataatcccagcactttggaaggctgaggtaagcagataacttgagcccaagagtttgataccagcctgggaaacatggagaaaacccatctctacaaagaatacaaaaattagctggatgtgggtggtgtgcacctgtagtcccagctgctcaggagcctgaggtgggaggatcacttgagcctgggaagtggagcctgcagtgagctgtgatcataccgctgcacgccaggatcaattacagaatgagaccatgtctcaaaaaaaaaaaaataaataaataaggtaaggtttagcaggttaggtaaaatatattttatgtgagaaagttaaataatctaccccaaatcataaaactacagaatggcaaatacgaaatgtagaactaaattattaactccaaacccagagccttccctcaaaattctggctagaaatggcaatgcttagatgaataacttctgtttcctcttcaaacattaatattccagtatgcctggagtgggaggaacat

SEQ ID NO: 218837 - DNA, 611 bp, Homo sapiens
cgtttaacacacagagagtccccagctcctaccggtccgtgcgctgctgagaacgtggccacgctgccggcgtgccagcattactgcctgagctccacctcctgtcacatcagtggcagcatcagactctcacaggagtgagagccctattgtgaactgcacacacaagggattgaggctgcacgctctgtaagctgcatgctccgtaagagaatccaatgcctgatgatctgaggtggaagagtttcgtcccaaaaccatcccccttcaccccacaatccgtggaacaactgtcttccacaaaaccagtcactggtgccaaaaaggctggggaccactgctttaacagagaccttcacatgactttattagcaggcaacagtgacacaattctaaaggaccttgaaaaaattacccacaaaattaaaaacttcacacgtaaaaagttttaattccacagagaggtcactcatctgatttatccacattatattttaaaataatgtccaaaaacacacagtagtaggtttgtttcctgacctcttaaaataactcaagttagtgacacccacactgtgtttgactctattctggaaaggcgtgttcttgca

SEQ ID NO: 218838 - DNA, 450 bp, Homo sapiens
taaaaccttattttagaagtgagcaagtgggccaggtgtagtggctcatgactataatcccagccctttgggaagccaaggcaagaggatcgcttgagcccaggagttcaagaccagcctgggcaacacagtgagactgccatctctacaaaaaaatttaaaatatcttaaaattagccgggcatggtggtgtgtgcctgtggtcccagctattcctcaaccatgcttggagcccaggaggtcaaggctcagtgagctatgactgtactgctggattccagcctgggctacagagcaacactttgtctctaaaaaagttaaaaaaaaaaaaagtttgcaaaataagtcattatttctcctttgcttttctgaaaacaaccaaaaagcagtgggcaactgcataaaatgatagtccttcttaatgttaaagacagctttatcaaggacatc

SEQ ID NO: 218839 - DNA, 233 bp, Homo sapiens
ctcctcagaggaccatggagactgcagagaggtggagctgtgggtccaaacccagcatttgctgccaatttctgcaaaggatatactctagagactcacgcgtcctcctaccttgtacagctggacgtcgtagcatttaaagagctggcacacgtcaggcaatgacatcagcatgactgtgtcttgctgcagagacttccagaaggaagtaagcaagtcctccacctggggta

SEQ ID NO: 218840 - DNA, 558 bp, Homo sapiens
aaatctctgatccatgggatttgccattttccacagcgtcaataactcccgccatggccaggttcaagcttgtgatgatgtcttggaaaagtaagactattaaattaggacaccagtgagaaatctcttgaaaaaagaccagataaaaatggggtattgctaaatgtggatggaattgggaagggatgtacacagtctgctctcacaagcgagcatggtgctgactgagcacatcactgcctaggaatatgctgagtaagaagcagtgaagctgaacattggtgagcatggccgtttccatgccacttactcagtggaagacattgtgtaagatggggtgagatggacacaagtatgagcctatgctgattgcatttaaggagctcactgtacttgggaggattagcataattataaaaatagctaatatctaatgcatggtcactgttttccaggcaccctctcaagagatctataacttaacaactctataatgtaggtattctttttattcttatattataatctaatggagaccccgagagacttagtagtttg

SEQ ID NO: 218841 - DNA, 167 bp, Homo sapiens
tgtaacttcatgtttccaggattggattttcttttcaatttaacctacttggaatatattgatttctctgtctgtgaagattcctgcttttattggatctcaaaaattgtgacatatgtctttaaattatgcctcttcacccttctgtcgtcttctcctattctaga

SEQ ID NO: 218842 - DNA, 954 bp, Homo sapiens
ggaggatgacagagagggagccgtcatcctggagcccaaagatttcaggcagtcactggttcttaactctggcacctgccaagtggagccgggcactcatcaccagatcttgctcctaaagtaatttaagatccttgagtgacagctgcaacattagcaggaagtattatttataccacattacattgaaggtgatgggagacaaccccagagcacagataacaaacacgggttctttgtggcaataatattaggttgaaaaaatatatattaacattcaagataaaggaaactacaaaatttacacttaattcaagccctcatttcctccccaacctacctgcttttcattcttccaattccttctcaaaccttcataatcattccagtcaacaactcctgagtactcaccaggtaggacattgggcatgagggatatatagatcaagaatgtcccaaccctcaaagagctacgtggccatacagctggccatgatatgttaagatatgtgttttacattatgatcctccaaacctgtgtttttcaacttttgtatgttacattgccatctagtacatatgcatacactcttaactgaagtaaatgtttcaaaaagtaattgtcaccatcactatgtgtgatgtcctctgatatttcctatttctttttctgccagtgacccacccgacggatttcatgacccactaataagtttcagcctgagtttaaaaaacgttgactctgggggagcccgtaagaaagagtagtcagttcttactggggtgatcagagaaagcttcattaggagttgaatttgcactttgccttgaaaaataaaaaatgtttgagtggataaagtggccccaggagggcataattagagtgaagcattctcccaaatagatttagattataaataggcaaaataggcaagcccaaatatttaccatttg

SEQ ID NO: 218843 - DNA, 485 bp, Homo sapiens
tttcggagttgtcctgaaggatatctgcaggcactttgtaagactgtgctcctacctcttggagctgtgttttctaccaaggaagacaccctagaacgtttccataataactaccaggggaaggaatgacacaatattcaccacagtttgtgacacagcaaagaaaaggaaatggaagaactaaggcttgaacatttaaaggtgattttgaagggagcttgtaattgattcaatattagacataattataagccggcaggatggtgcctggcctgccaaaataccttccgggttccccaggacctctcgtcacagggatgtttaaggagctgagcttcatgccatcacggcacataacaatctcaaggaagacgcctctgaaatacctgccccagaaagcccttggcagggactcatccttttatgtgccccaaaataccacctccagggtctaacctcctgggatccagctctcctcttacaaa

SEQ ID NO: 218844 - DNA, 765 bp, Homo sapiens
aacaaatgatattgagctacttaatcttactatcactgtaccaggttccataaagatgatgccttggtcagctcaggctgctgtaacaaacaaaggcacgtttcttataaacaatagaaacttgtttttcacagtctggaagctgaaactctgggatccaggtggcagctagttggttgttagtgaggctctcttttgggtttgcagatggctaacttctcaccatagcctcacatggttgaggatggctggagaactctctagggtctctctctctcttgctctctctctctctcttttttttaaaagcagcatctcactttgtcacccaggctagaatgcaatggtatgatctcagctcactgcaacctccaccttccgggctcaggtgatcctcccatctcagtctccgtgcccatcctctagggtctgttttataaaggcatcaatcctacttatgagggctctaccctcattacctaattacctcccacaggctccaccttctaataccagcacattggggatttcgacacacgcattcagtccataacagatgaggagccaacattgttgaatcataagtgatccatttttttttctttttatttctgattgatcaaggcttgcaaaagatttaactttcctgggttgggtagagtggctcatacctataatcccagcactttgggaggcttaggtaggaggatcacctgaggtcaggagtttgagaccagcctggtcaacataacaagaccccatctc

SEQ ID NO: 218845 - DNA, 164 bp, Homo sapiens
ggaatgttgaatgccaaggcaacgacgggagcagggcaaggtgtgtgggcaaagtggagctctctatgctgggagccggtggtgtctctgcaggtcatgtgccaggggcaggtgggtgcagaggagatgtcactggcacagtgctgccctggaactggcgctca

SEQ ID NO: 218846 - DNA, 1026 bp, Homo sapiens
agagataaagaaatgattaagatacaagactttgcctcaagttgctcacggtctatattgtgtgtacaaaaacaaccaatcaaccaatgttggtattatttgacagtgttggtacatcaatgagttctttgtaatcttgatatttatatccatggatgctgcttgaagcctgaactcctaagccactaattagtggtgggaagaaagagggggtaaatgctttaagagctagcatataacaaaaatgaattgggtttattctgtatcatatagagggcctaagaggcaaacatttcatagagtattcagaagaacataaggaatgacttttttcacagttaacagctgtccaagagtgtagtggctgcctcgtatgataaagcatctggaactcattgaaaaatgcatgtagaaaataccaatcagagcctgattgatgggatttttaattactgctttaatattgggactgaatcattttgtagctcattagaaacatggaaagtatttgttaaataaataagtcatggaatttcaattctaaggccatgaaaattaaaacaccctaccattatttatcaataaaacacagtgcagttttgctcatcagaattttgcctatgtgatagcctcctgagagtaggcagaaaagaaagacatagaacgcagtgcgtgacttacaagggaataaaactgacagaggttagtgtaaggtatataggcatgagtggggcttaaagaggatatgggagaacactgaagacaaatattagtacaattcctataaggtaaataccaatatgtctttctagaagaagcaattgttttggaattgaggaaacctagaatggatttatctatatgacttggacaggttacttatactctttggacatttatttcttctcagcaaaacaagggtaataatatttaacttgcaagattcgtggagataaaagcttaaataaacggcagagtacagtaatgcttatatacgggatgctaaataaataactctcactgtta

SEQ ID NO: 218847 - DNA, 476 bp, Homo sapiens
agcctgtgctgtaggggctgctgacctgattgggtgacccagccctcatcccagaaagcactgagcctccggtccccaagcccatctcaggcaatggcctgtccctgcacttgtcaatttgctgtcaaaatcgggcaggggagtcccaggaggtgcccagtgactctggcgggtacccactgtgatacagtggtgacttctctcttgcctgccagtctcttggcctgaggaggtggcttaaagtttatcgggccttgtttcatgtcccctggtagaaatgctcccactctgggaaccttctagaccaggtgtcagcaaactttttcttaaagggccaggtaaaaaatattttagaaggccaggcacagtggcttatgcctgtaagcctagcactttgggaggctgaagtgggtggatcacctaaggtcaggagatcgagaccatcctggctaacatggtgaaaccccgtctctact

SEQ ID NO: 218848 - DNA, 231 bp, Homo sapiens
tagaaaaggcagaattatagtgacagcatatctagtggccatcagaggccagagtttagggagggtttgacaatagaagggcatgagggaactttttggggtgatggaaatattctacatcttgattgtaatgatggttatagaatgtatatatttgtgcacattactgaattgaatgcttcaaattggtgagttttattatttgtaaatcatagtttaataaagctgata

SEQ ID NO: 218849 - DNA, 497 bp, Homo sapiens
catggattaggagtttaggccacctcttaatctcatgcagagaacttgtcattgaggatgtttcctaacttcacacctaggtacacctcagtgctgcccactaaattctccttcagaagaggttcttgtgtcggccactgggggacctgtaggcagatctgcctagtctggccccactccttgtggccacaaaccccctggggctgagcaggaagctaagacctctgtatattccctaaataagctcaatgcccaaggcaacagagagcatctgccagtaaacaaagatcaagtatacagcccgccatgtaggccacagctagctcttacccatgagtgccatctactggctcgtaggttaaactgcacagcctaaaataaagtgcataggactatagagacaaagccaaaagactacccagtattctctacggtcgcacctgctagagacaggtagaaaggggaaaggaaagaaaaaaataaaattataggaaagg

SEQ ID NO: 218850 - DNA, 443 bp, Homo sapiens
acatcaacaatacatcctgaattccagatggatgtaagatccaaacatatatatttaagcccaggcgcagtggctcacgcttataatcccagcacgttgtgtttctcttactacaattctcattcccaccttttatgtcgtaattatttatgtttatctttcaattcacttgctagatgtgcacttccagaagccaacagaaagatccttactgtatcactgtagaaactagttctgggccacatgtaggctttgaacaaaaatatttgtttaatgaaacaaatagtcttcaaataataagtcttctttcaagcctgttgagctttctgacaattcaaaatggcttatgctaattatgaatccttaatccaacattttccagggctataaatgtgaaatgttttttacttcattatgtttttatttttatttacttatttctt

SEQ ID NO: 218851 - DNA, 657 bp, Homo sapiens
ggggaaatacttgaactcactgagcagcggtggggtcacagtctgggcttgtatgccctcatttccaggccgcattcctcagaggggccctgagtactttgggagctgatagagtttggctgtcatttgaaaatgttttcctgctaaatgttttcatttagaagctaatttatactctgctttcaagtaagcttaactccatttcacatccctgacatgtagcacacactgcagtgactgggatggaagtagacaattcaatcaaaggatgatttctccgtggaggaaatgaatattatttgttcatcttgcaattcagaattctgagaaaattatgatgtttggcaaaggcactggcaagacagaaagacaaataaattgcatggtgtgagaacagccttcttaatatgaaggtttccttaaaacagtgggtattggctgcaggcaaaatattaagctgcaaatcactggtttgcaacttcttgatcatcggttgtaatcccaagaacatatttaatttcatatttagtcctaatttctttttgttccgtaatgatatttctgtcactcaaaataagccatctgttggcagcagcccacaggaaacagatactgcacactcagtaatcttggagtgagtctgttgcattgtgagaa

SEQ ID NO: 218852 - DNA, 479 bp, Homo sapiens
ctgaggagaaagtaagggaaaagaataacagtctttgtctggtaatcaagagaattctcccagatctttttcaagacctccaagatggtaggtataactctacaaatctgaaaaaaacacagtgttattgggcttggggcccaagtctctttgaatacctggaaagccttcccaagaaggacaggcacaaacaagcccagactgtgaagactacaataaatacctaactcttcaatgcccagacactgaggaacatctacgataattagcaccatccaggaaaacatgacctcaccaaatgaaccaggcaccagggactaatcctagagaaacagagatatataacctttcagacaaagaattcaaagtagctatgttgaggaaactcacgcctgtaatcccagcaccttgggaagccaaggcgggcagatcccttgaggtcaggagtttgagaccagcctggccaacatggtgaaact

SEQ ID NO: 218853 - DNA, 703 bp, Homo sapiens
ggtatggtggctcacacctgtaatcccagcactttgggaggctgaggcaggcagatcatgaggtcaggagatcgagaaacatggtgaaaccccgtctctactaaaaatacaaaaattagctgggcgtggtggtgcgtgcctgtaaccccagctacttgggaggctgaggcaggagaatcacttgaaccagggagttggaggttgcggtgagcagaaattgtgccactgcactccagcctgtgagactccatctcaaaataaataaataaataaataataaaaaaagtttgttagtgtcaaacacagcactgcttatatttctcacatatttctaaaactgagggcttatatttctcatgtacttccaaaactgagggttagagggaaatttctacttctctagatttatctggctctagctgaagtcattagatataaatgaactgtttttttccaaagagtttttggctaaattatggtaacactgcagttgatggtttcctggacagaaattttgcattggtcaagtgctggattagttaaaacatgttccaatgcctaagtgaaggaattctggaggggcatacagcacctacagtttacatagatgtggctttgcccaggccatttcatttacctgccttggccttcaataacccgacagtcctaccactaagcaggcgatattttaggaccttgtcct

SEQ ID NO: 218854 - DNA, 698 bp, Homo sapiens
ggtatggtggctcacacctgtaatcccagcactttgggaggctgaggcaggcagatcatgaggtcaggagatcgagaaacatggtgaaaccccgtctctactaaaaatacaaaaattagctgggcgtggtggtgcgtgcctgtaaccccagctacttgggaggctgaggcaggagaatcacttgaaccagggagttggaggttgcggtgagcagaaattgtgccactgcactccagcctgtgagactccatctcaaaataaataaataaataaataataaaaaaagtttgttagtgtcaaacacagcactgcttatatttctcacatatttctaaaactgagggcttatatttctcatgtacttccaaaactgagggttagagggaaatttctacttctctagatttatctggctctagctgaagtcattagatataaatgaactgtttttttccaaagagtttttggctaaattatggtaacactgcagttgatggtttcctggacagaaattttgcattggtcaagtgctggattagttaaaacatgttccaatgcctaagtgaaggaattctggaggggcatacagcacctacagtttacatagatgtggctttgcccaggccatttcatttaccaaatgggttgtgcctcaattaaccagaacagcattaccacctaagcatgagattatatta

SEQ ID NO: 218855 - DNA, 391 bp, Homo sapiens
tcaattaataaagatgaagttttgggttgtgtcattcataaaggagaaaaataagggacatcttatttagaattattatcttagaaattctgcaaattgctgctttgggttattgagtaggaaaatataaacagaatagctgacactttcaacagaatttcctatattttaatacatttcatattttgatatgtagtcattgtgagtaaattttaaaaatatgaacttaaaaataagcatactttcagaatctatagatatacactgttgtcatattgttataaatatgcatttatatattagataaaatatttaaatgggatattgatataatttaatttgaccttatctctactgaataaattactaattcatgtcaatgctactacct

SEQ ID NO: 218856 - DNA, 83 bp, Homo sapiens
tcagttctgccttgccggtgatctaaatggactccccgcagggaacagcactcatactgcagaaggtcttttcttttgccttt

SEQ ID NO: 218857 - DNA, 383 bp, Homo sapiens
gagtggctcatgcctataatcccagcacttttggaggccgagatgggcagatcacttgaggtcaggagttcaagaccagcctggccaacatggtgaaacctcgtttctaccaaaaatacaaaaattagccaggcatgatggtgcatgcctatgatcccagctacttgagaggctgaggaacaagaatcacctgaacgctgtaggcagaggttgcaatgggccaagatcaacgccactgcactccagcctgggcaacagagggaggctctgtctcaaaaaaaaagcggaaacagaagagatatagtactatcatgaaaacatatatttaataagtttttttgagaactaccaccttatccttggaaataactagctattataag

SEQ ID NO: 218858 - DNA, 356 bp, Homo sapiens
tgcttgccaagttagatgctacacagagaagacagctggtgcaggagccccggtagtcatggctattctgcctcccactctcccatccagacagggtgaattctcaggatgccaggcttctggccaaggcttctcaatgcacagaatagtcctgtttcaccctaagtacccctcccaaagtgctgaaattacagacatgtaccaccacacccagcccacactctaccttcttttggttcacagttcatcagggtttttcttaccacttctatgaacacatagcctctgttatgaagtagatcaattcaaatcagttctttatgtgaatttcctcattaaattctataaccatccta

SEQ ID NO: 218859 - DNA, 750 bp, Homo sapiens
gtcctggaaaggatactgtaccaagttttgagacatgtagcatacagaaatgtaatagattggtttactctgtgatttagagggaaaactacatttatgtttcaggcttaatatcttgatacaaggataccagaattccaaagagtagaagccaagtgatttagctttatcactcacccatttctccttccttcccctctcctgaataaactttcaatctcatcccttaaacaggctcctccattctgtcaatcagtgcttctcaggtctccactacccacagtctttcccagactgtgctgttccttcatgcttgctcctccctttccctcacccacagtttctaccctgctgcctctgcttcctcactgtccaatgctaccctgaaacctggcttccttactattgatgaaactgcctacaacggtcatcaaggacccagatggacaaagccaatggtccatctttacttctttatctttctgcagggaggaatgaaaaatctgcactttaaagaagttctacttaaaaaaaaacaaaacgtcctttgtgcccacatatataacaactcctggctattagaaactttaacaaagccctcttgttttatgaatatagacactaaaaacaaaaaacaccatccataccaaaaactgtactagatttatctaaaaccatatggtttttggtatggagcatgtatgttcaagcagaaacaaaggacatctaagacaaagggaaacacgtggg

SEQ ID NO: 218860 - DNA, 387 bp, Homo sapiens
ctcactcctcctccagggcccagctcgaatgcaccacctctaacttctcatggagctttcccacacaactttattccacaactaattacactgcattaaattgtgtgcatatctttcccagcaggctacaggctgctcaaaagatgcagaagtcttggcagtgcttacagcctgcatcattagaggcacccaaaacaaagggcaagtcagccaagaatgagtcaacgagcaggtgaaaccagtaggtgggatgatggggcagtggagagggtgggactgtggctaattctgatcaacaaatgggctcaactggagccacacaatctcaatcctcatcacaggctccaagggctgaaaacttttagctagtgaagtttcccttaaatt

SEQ ID NO: 218861 - DNA, 558 bp, Homo sapiens
cttttattaaacatagtttgataattaagacaaaaaaattagtagggtgctaattaataattttagatctaagaataggctcacacctataatcctagcaccttgggaggctgagggaagaggattgcttgagtccaggaatttgagaccagcctggacaacatgagactccatctctacaaaaaataaaatattagctgagtgaggtggcacctgcctactatagtcccagctacttgggaggctgaggccagaagatctcttgggcccaggaggtagaggctgcagtgagctgtgatcataccactgcattcccacctaggcagcagcaagaccctgtctcagaaaagaaaaaggacaaaaaaatggctcacaaaagaggaaacaaaggcataaaaaatattcggtaatcaggagtaattaaaatatatcaaacaaggccgggtgcggtggctcatgcctataatcccagcactttggaaggcagagactgggggataacgaggtcaggagatcgagacctcggtgaaaccccgtctctactaaaaatacgaaaaa

SEQ ID NO: 218862 - DNA, 337 bp, Homo sapiens
gcttaattctgaatatttcaaactgatgatgtctatctcaaagtaaaaacagtctttaaaggcactgtaataaaaatgggtgagaataataatcattggaaaaagagactcttaaggaagaacagacatctcattttccattttcttctcattatgtctgcagagtaacactcccagggctcagggatatcaaatttgatataaattcacaaatgaaagtgacaataaatcaatgcctagagctcttatttcattgcttcatgctagtactttccccaccaatcatttgctgactatgctactgataaagtactcatcatttttgcctctgattcta

SEQ ID NO: 218863 - DNA, 604 bp, Homo sapiens
ttctgaagactatgagaatatttctgttctaaaatggcagagatattactgacgcttctaccaccattctccttaagctccacattgcttctccttaagctatcttccttttccagccatattccattacttttaataagatttgtcctcttaataagcaggctggtaaacacttgacttgttccaattcctgaatccctccccaaacacacacacaccccaggccatcatcaagccttgctgtttcaactcactgcttcatcatcttctcataatctcctctccctcaagccactgtttgactattccccacacacaacttaagtctgatctttattgttacaacctcctaacggcccccaccccctttcttttcatgccctggcctcatttcctccatccttcaaaactctggtttaagccacctctagatatttccattttagaggaagaatcttaagaaatcatagagtaaacccccctgccctagcttgtaggtaaggcataactctgcaattttacctagatgagactgaaggagagccaactgattttactcaaggtcacaatgctacttcttccctaaaactccaccccttagttc

SEQ ID NO: 218864 - DNA, 399 bp, Homo sapiens
ggagtctttcattgagctaattgagtggtaaaattatgaatttattattaaggaatcagaatgatcagcaatttgaagacattaccttcagtgaaataatccaggcacagaaagacaaaactgcaagatctcacttatgtgtgaaatctaaaaagacaaactcttaggagcagagagtggactggtggtttccaggggcccagaaggtcagggaaggtgttagggagatgttggccacagaacaagaaattccagttagacaaaggaataagttaaagagatccattgtatgacatggtgactataactactaacaatgtactatgtgcttgaaaattgctaacagagtagatttcaagtgttctcaacaccaaaataaataaataaataaataaagta

SEQ ID NO: 218865 - DNA, 204 bp, Homo sapiens
cgctcctccaactgacctgcacccggcatttccactcgagtccctcgtggtgccccccccgactcacaatggcacaaaggtcctcagttccccaccaggggcgcagatggaccaccatgggtcaggggcagagggtccccttcttccctgacacaccctcagcaagtccttcccggagacccccaccgtgtcctggcctcctct

SEQ ID NO: 218866 - DNA, 461 bp, Homo sapiens
gaagaagaaataggtttgatgaatagctaagctagtctctgctataacctgctatcatatagcctagaaagataaatatcttccacgtctcttgctttttcttcacaatcttatcttttcatcatttttccctgtgtgtttgccttctaatttactaattcagtttttagctttgtcattgctgctatttagaactttgttattatttttagtctgacaatcacagtattggctttaaagaatttgttcttcacatggacacaggaaggggaacatcacactctggggactgttgtggggtggggggacgggggagggatagctttaggagatatacctaatgctaaatgacgagttaatgggtgcagcacaccagcatggcacatgtatacatatgtaactaacctgcacattgtgcacgtgtaccctaaaacttaaagtataataataataaaagaaaa

SEQ ID NO: 218867 - DNA, 424 bp, Homo sapiens
taatctgtgtgatgaaatggaatatatgcataaagtttgctgcaaaatgaagactgatgattgtcttgaggaaaaacacttatgcaatggcttgtgtgccaaattagccacttattcatattactctttttttgcttgaaagaatgactgatagacaagccgtgattattcagatttgcatatttgcagaccttttctcaaaaatgaacaaggctatcttgtcgcttaaaggaagctggtagtatttgttgcaaatgataacatgacttgttggcaagtgaaaattagaaatttggaaaatttgctggtgcagtagctcacacctgtaatcccatcactttgggaggccaaggcaggaggattgcttgagcccatgagttcaagactagcctgggcaacatagcgagaccctgtctctatatta

SEQ ID NO: 218868 - DNA, 355 bp, Homo sapiens
ttatttcttttaaaatactttaacctttgtaaaaaaacaataataaatgtttagtatgcatttggatcctacaaagtttttaagtgcattatttcacttaatattcataatgaaccctatgaagtttgttctgttgttatatgcattttacaaatgaagctgaggcttttttttattattttaaagaaaatggcaaatcctagcaaatggtggtataatcagcatttggacttaggtttttatgactcctgagcctttcatattaactgtcacaccctactttctatgctgtgtgataaattttcctatattctcaccatgcttcatatcccagtttgatgacattggtaatcct

SEQ ID NO: 218869 - DNA, 210 bp, Homo sapiens
ttaattatccttttctctatcatactatggtttgctgagaaatcacattttctcaatttagctcattattttaaacctctctgctataatatctatctcatcatttggctattagaaaatatgtgacaaatttcatgattcaaaatctcagaatatcagtttgggttaactctcaaaactgctgaagaaactaaaatgacatcaaggcag

SEQ ID NO: 218870 - DNA, 356 bp, Homo sapiens
gccgtatgactacctgtttttaagattaaaaaagaatcaataggcagtttatatgtcatgggagcaagttaaaaacaacacagatgtgatgaaggcgaggtgaaactggtccgcatctaattcaggccttctcctgaaagccagtgtgtgcaagataaataagtttttttgacgaaagcagaataactagtttgtcctttgtgatgaagatagttattcagaaatcatttttattggctacctctgaattaataaatgaaaagagaaatttttttttctgtaggggatgtctgatgagttcttaaaaagtggatgaacctgaaattatcatgaacaagcaatcataatgaacttaa

SEQ ID NO: 218871 - DNA, 188 bp, Homo sapiens
acataaactcactcagggaatcttctaatttaagagacacagctctgtaatgaatgaaaactacagccttcgaagtgatctctctgtatccactttttcctggctttaaattcccatctccattataatcagagttatctctgtaaagaatagttctaaagtcacagcttgatttaaaacccattgat

SEQ ID NO: 218872 - DNA, 247 bp, Homo sapiens
ttacaaggtcaaggctctagaaagaacctttccaatattagcagagtctttggtctgcacgtgtttacaaatgcaaataaaagcagagaacacagctaattttgtactccttaaatagcataagcttatatttgtatagaccatttcttaggtagtaaacttatttccttctgtagattctgctttcatgttttgtcagtccaatcccagtgtgaagatggttgaataaaactatcatttatccaca

SEQ ID NO: 218873 - DNA, 608 bp, Homo sapiens
gggcgtctttactgtaacacacccgagcacagcccagctcgcctgcccgccaccgccatccagccccagggagccccacacactcctggagcttcagctgccccctctctagtgtttacttgagatccagcttagtcctagaaaaaggagctgaagccttagagagcctgtaacaggaatgtggaaacttctctcatcctagatctctccagccctagaaactactggctacccgtccaggcgtggtggctcacgcctgtaatcgcaacactttgggaggccaaggcgggtggatcacgagccgagatcaccacaccacactgcagcctgggcaacaaagtgagactccgtctcaaaaaaataaaaaataaaaacacacacttgattataatccttccattttaaattcctccaatgaaatgtcttcgaatcaatggattgatttaaaggaaatcaagccttctggcatagaataaaaacgtccttgccatttggcatctacatcctttgttgggatttcaagcatgagccaccgcgctcgggtagacctgacaggttttaaaaggaatactgggtgctgtgttaaaacaaactgcaggacataaagg

SEQ ID NO: 218874 - DNA, 522 bp, Homo sapiens
gggcgtctttactgtaacacacccgagcacagcccagctcgcctgcccgccaccgccatccagccccagggagccccacacactcctggagcttcagctgccccctctctagtgtttacttgagatccagcttagtcctagaaaaaggagctgaagccttagagagcctgtaacaggaatgtggaaacttctctcatcctagatctctccagccctagaaactactggctacccgtccaggcgtggtggctcacgcctgtaatcgcaacactttgggaggccaaggcgggtggatcacgaggtcaagagatcgagaccatcctggccaacatggtgaaacccgtctctactaaaaatacaaaaaagccgagtgtggtggtgggcgcctgtagtcccaactactccggaggctgaggcaggagaatcacttgaacccgggaagcggagtttgcagtgagccaagatgacaccgctgcactccagccaggccaacagagcaagactacgtctccaaaaaaaaaa

SEQ ID NO: 218875 - DNA, 842 bp, Homo sapiens
gtggtgtgtcacataacacactttacataacggttcactgactcctcatgtacaaagcaggtaactggctattctgtaaataccaaagcattacattcccacctgggaggatgtgtgcccaattttttggagaaaggtaagaattagatgattgttatctaaggtcatgatcaaatatcagttttaattgcccagtttgattctttaaaatagataaatgagtatacttttactgaatattttatttcatatggagaagctgtaaacataaccatcaaaaatattacgtgttctagttcaaagctttgaacccagtaagtcatagtgtgcctattttctaacctcttgatactggagagaacataactgctttgatcatctttctgcagatgtttaaacaaaacacaaaatcccctgccctcctgaagcatccattcaagttgatatcagtgttcctagttttatttaattaaaaagtaaacgccttcttttagtggtgttttgagtatttaactttattgccgcagcgagaactccgtatgttaatctgtttcaaagtcataccttggttagttgggtctgactttgtgggcatttttttcttaagttgggttatttcactccccactgggaaatgtggcagctgtttttgatcagtgacctcagatactaggtggctttaaactttgaatgtgaatgttggcttttttcctattctgcactcattctctaaatttaggcctatcgaagatttggcatagtataaggaatagcaaggagtttggtagtttttcccaatgagaaaattatggttacctcaagaacaaatttaatgaaatgag

SEQ ID NO: 218876 - DNA, 738 bp, Homo sapiens
ctgcactctagcttgagtgacagagtgactctgtctcaaaaaagaaaaaaattattacaatagtggtacttaagactttctcctattaagaaatatgatgctctttcctaagtggcctgaggtaatctgaaaatggttcgctattcacttgacccggagaaccccacaaaatcatgcaaatcaagaggttccaatcttcgtgttcactttaagaacactcgtgaaactgctcaggccatcaagggtatgtatatacaaaaaggcacgaagtatctgaaagatgtcactttacagaaacagtgcataccattccgacattacaatggtggagttggcaggtgtgcgcaggcaaagcagtggggctggatcacaaggtcggtggcccaaaaagagtgctgaatttttgctgcacatgcttaaaaacgcagagagtaatgctgaacttaagggtttagatgtagattctctggtcattgagcatatccaagtgaacaaagcacctaagatgcgccgccggacctacagagctcatggtcggattaacccatacatgagctctccctgccacattgagatgatctttacggaaaaggaacagattgttcctaaaccagaagaggaggttgcccagaagaaaaagatatcccagaagaaactgaagaaacaaaaacttatggcacgggaataaattcagcattaaaataaatgtaattaaaaggaaaaaaaaagaaatatggt

SEQ ID NO: 218877 - DNA, 745 bp, Homo sapiens
  misc_feature (499)..(500): n is a, c, g, or t
ctgcactctagcttgagtgacagagtgactctgtctcaaaaaagaaaaaaattattacaatagtggtacttaagactttctcctattaagaaatatgatgctctttcctaagtggcctgaggtaatctgaaaatggttcgctattcacttgacccggagaaccccacaaaatcatgcaaatcaagaggttccaatcttcgtgttcactttaagaacactcgtgaaactgctcaggccatcaagggtatgtatatacaaaaaggcacgaagtatctgaaagatgtcactttacagaaacagtgcataccattccgacattacaatggtggagttggcaggtgtgcgcaggcaaagcagtggggctggatcttctaagttgatttttttcctcccaagtcctttttaaagaaagtatactgtattttaccaaccccctcttttctcttagctcttctgtggtgaattaaacctacttgagttaaaaaaaaaaaaaaaaaannaaaaaaaaaaaaaaacctccagggtcgacggtatcgataagcttgatatctcgccaaaatgacgaacacaaagggaaagaggagaggcacccgatatatgttctctaggccttttagcatggagttgttcctttggcccatatatgcgaatctatagaaaggtgatattgtagacatcaagggaatgggtactgttcaccagcatgctgtggcattggtgtaaccaagttagggccagttcttgc

SEQ ID NO: 218878 - DNA, 390 bp, Homo sapiens
ccccacaaacaaacacactgaacaaatgtttgtggattggtagaactaggcatggtctccaacggcagacagacaaggtcctgaggggaaaatcagggagcatctctaaccagaccgtcctggtcagctgggtctggaggagactttcaactactctttggtcatcattacgtctgactcagtggttcaaggcagaagtggaagttataggcaccaaattgatgctgcaggagagagatgaaggaggcagaatggattcatctgctctgccctgggtgtcagaaatgaagatttttaggataagtgccaactaaaaatcattaagttgtacacttcaaattgatgagttatatggtacatggattatagcacagtaaaactgttatttaa

SEQ ID NO: 218879 - DNA, 498 bp, Homo sapiens
aaaaacctcaaacaacctgagaaaggaggggaaagactagtgctccatctatcaaaaaaatccctgatgtttaaccatttaacctataacttgttttaagttgcatacctaagtacataccataaattgatacataatacatacctaaagaagggggaaattaaggaaacaaacctatcacgacaaaaccttaattaactggaatgcaaagagagtgaatatttcagttagttgaaagttacgtagaaaactttttgcttccaatgctgacaatcattctaaaacgcacaaacctaagtacttaagcttcagtatttatctgatgtttcaaaactcctacaacttcagaattcttacttaccactgtaaagtcatagaaacagagaaagtgctgaagcaattgggctgagtatatatactttgactctagcctgtacttaggaagttgtttaaataaaatgtatcaaatcatttgcatcttgaggtaagaaaaaaaga

SEQ ID NO: 218880 - DNA, 856 bp, Homo sapiens
atcatgatcaaccaggaaataggagtacggggaccacgtatctgatggggtcatcacgttcttctgccggatagaagctgtgagaggagatatgagccatcaagcggagaggagtcacccagaaattccaatcccaagagcttaccacctagaattccttctacatgtacacataaatgtgaataagggtagagttttttccattattacgtataagtgaaaaattggaaacaaagtttccaggtgggaaaatgatgatacatctgtaccttccaatcttatgaagccttaaaaagaatgaattagaggtcaaccatggtggctcacacctgtaatcccagtactttgggaggccaaggcgggtggattgtttgaggtcaggagttcaagaccagcctgaccaacatggtgaaaccccgtctctactaaaaatacaaaaattagccggatgtggtggctgacgcctgtaactcggaaggttgaggcaggaggatcacttgaactcgggagacggaggttgcagtgagccaagaatgggctgctgcgctccagcctgggcgacagagcgagactccgtctcaaaaaaaaaaaaaaaaaaaagaaaagaaaagaaataaatctaaatgtgctgagatggaatagtattcatagtatcttaagtgaaagatacaatttgtatgacattacatgtgtataatccatgtttcttttaaaaatagtcccaaactaggccaggcacggtggctcacgcctgtaatcccagcactttgggaggccgaggcggctggatcacgaggtcaggagatcaagaccatcctagctaacacggtgaaaccccgtctctactaaaaataca

SEQ ID NO: 218881 - DNA, 830 bp, Homo sapiens
gtaattctgtcaggcccagggttcagaaagctgaaacagaggctttggctaaaggtgttttattcctgacaagcctagaagggagtcttggcctgaggccctggggcctcgctcacaaggcagtttttatctgtggctttctgtaatttgaaggaataaatctaaaagaaatagcagattttggctgtggtctcatctgttcctgggtaactgtgatcgtaggcacctctctaggtgtcagtttctgtatcagtcacattctagcaagagataacacttacctagtgcttactaagtgccaggcactattttgaggactttggatatctacttatttaatcccacaaccatatgagaatagatcctgttaattttcccataaaagtaatttgcccaaagtctcacacagtggtcgggggtggggccagaatctgaattccgatctgcctattgccaagctcacaccatttctttttccatgatttattttcacatattctattttaaatcaaattattaattctattactacggtgatgcaggaataacttgtccattttttttttttacaacagaaaaatttctaatgtggcattgagcagaactgtggtgttctccaaggccagtctttgtccaataaatactgaaatactgaaaaaggatgatagaacgcatattccacaacagcttcaaatgcagaggtgtatgaattttaatattattaagaactgctttagaaattccagttgctagcattttcctggtatattcttcccacctctaaagcacgtgagtttaacataattctattgtgtctttttatttttgag

SEQ ID NO: 218882 - DNA, 355 bp, Homo sapiens
ggctgccctcgaactcctgagcttaagcgatcctcccaccttgtcttcccaaagcattgggattacaggtgtgagctctcatgcttggccagcagcaagtgatctttctcaaactctgatttgctgctttactcctctgctgtggatgcttgactatcccacccttccttaacaaatcatttaggaccttttatactttggcccctactaacttctcagcctcatctcctgcttcacccaatttataatctgtgcttggttgcactaaaccatcttcagtttccaagacatggcatactaccatgcttttgaaagttcttaccactctgtacagaatgtacttcttcacctagcc

SEQ ID NO: 218883 - DNA, 246 bp, Homo sapiens
cgctggacgggcccgtattaatagagcctgctgtggatgcttgactatcccacccttccttaacaaatcatttaggaccttttatactttggcccctactaacttctcagcctcatctcctgcttcacccaatttataatctgtgcttggttgcactaaaccatcttcagtttccaagacatggcatactaccatgcttttgaaagttcttaccactctgtacagaatgtacttcttcacctagcc

SEQ ID NO: 218884 - DNA, 467 bp, Homo sapiens
gcttttattaatataaatttgtagatttgaaattttttcaaaattctctttgtgctactgtctaaactaaacaatataggaaaattataatagagcagaaacatcgcatataagcctaattttgacattggatatagaaatagaaggaagagaattgtgagtcattttattggccttatattaatattcagtgagccagatgcaatagaaacatggagaaaatatataaaaaagagaattccagccaggtgtgagccaccatacccggccacaaatttatattttaaaagtttgtataacataaaatgtgtaaaaccgttaaataaaggaaatattaaaatcttttttgaagaaaacaaaattaatttttatacgtggaatatgtgtcccttcacgaagaatggtattttatataagtttaaggtaactttcaatgcaattttgttacaaagttacagaaagatgca

SEQ ID NO: 218885 - DNA, 562 bp, Homo sapiens
tacggagttttatggtatctacttgccccaacatttctacttgtatgtgacaaaagataccataaagaaacttaaaaataagtctgttaactgggaaaaatatttgcaacttttatataaagagaaagaattacgagatgtataggttatataaagatttatttctgtaaataagagacctaacagaaggaaaccggtctgtgaaagatggccttgtaaacatgaaattattccaaactttgtgcataatgagggaaatgttaaagcagtgaggttcgctttttgtcagccgctagactgacaaccattttaaaatgttcataacaggcactctcatgtactgcccctgggaatgtaaatggtacaaatactctggaggacattctggcattttttcccttttttctttctggtttgactctgggatttttttccttccttttttccccccttatttctctgtacttcaatgaatataaattggcactatctcttgactttaagtgaatatagcttgtgatccttcaagaaatacatgtgtagaaatacacgtaaagaatgg

SEQ ID NO: 218886 - DNA, 1208 bp, Homo sapiens
cctcacgattacctcaacacactcaagtatgcattctggaaaaacacagacattcttcttacataacaattaatgattatgaaacagctaaaataattgataccggccaggagcagtggctcacacttgtaatcccagcactctgggaggccgaagcgggcggatcacgaggttaggagatcgagaccatcctggctaacacagtgaaaccccatctctactaaaaatacaaaaaattagccgggcgtggtagcgggcacctgtagtcccagctactcgggaggctgaggcaggagaatggcgtgaacccgggaggcagagtttgcagtgagcagagattgcaccactgcatcccagcctgggcaacagagcgagactccgtctcaaaaaaatatatatgtatcttctcttagccactgcaattcttagaaaatcaccatcaccatctcaacatccacccttcttttaatatcactacagttggacttttacccactccgttaccctcaatcaccaagaaacttgcattgaggtctgatgatttaattgtaagtggcacatttttggtcttcgtcctactgcccttgttcatggcacatttcctactttaggacgattgtttcccctttcgggatacgtttactatactaagccctttgtcttgatcattccttctcaatacctaatgttcattctccctcatctacctgcctattaaatgtttgaattcctcagaattcatttgctggtcttctcactttgtattcctaaggtggtctgagtccctcttaagatttccactacccttaatatgatgaccatactcaagtaaatatttttaaccctgacctcttttccagggctcccaacattacccaagtcaaggatctgatctgattttgttcttccacatttaaaaaaaaatcctcagggtctcagtagaaaatgtttttttttcgctcaagtgatctgtagatcaaataccattccagtgaaatcaccattgagttttttatggaattaggccattgtttttaatgtttatgtggaagaaccaaagatccaaaagtaacccagaccatccggaaaaaaaaatggaggatactagccctaccaaatataaagacttattaaaaagctctagtctgttattgctcgggatgagttaaatagactaacagaatagacaaaggaaacaccggtccgag

SEQ ID NO: 218887 - DNA, 838 bp, Homo sapiens
cctcacgattacctcaacacactcaagtatgcattctggaaaaacacagacattcttcttacataacaattaatgattatgaaacagctaaaataattgataccggccaggagcagtggctcacacttgtaatcccagcactctgggaggccgaagcgggcggatcacgaggttaggagatcgagaccatcctggctaacacagtgaaaccccatctctactaaaaatacaaaaaattagccgggcgtggtagcgggcacctgtagtcccagctactcgggaggctgaggcaggagaatggcgtgaacccgggaggcagagtttgcagtgagcagagattgcaccactgcatcccagcctgggcaacagagcgagactccgtctcaaaaaaatatatatgtatcttctcttagccactgcaattcttagaaaatcaccatcaccatctcaacatccacccttcttttaatatcactacagttggacttttacccactccgttaccctcaatcaccaagaaacttgcattgaggtctgatgatttaattgtaagtggcacatttttggtcttcgtcctactgcccttgttcatggcacatttcctactttaggacgattgtttcccctttcgggatacgtttactatactaagccctttgtcttgatcattccttctcaatacctaatgttcattctccctcatctacctgcctattaaatgtttgaattcctcagaattcatttgctggtcttctcactttgtattcctaaggtggtctgagtccctcttaagatttccacatttaaaaaaaaatcccagtctctccagtgatcttat

SEQ ID NO: 218888 - DNA, 830 bp, Homo sapiens
ttaggccccatttatcaacacaaactgaaatatggcaagggaatacacttgcaatgaatttgaaaaaaacatgacccttcttgcctggatcatttgttttctcatatgtgtgccttctaatagaattgaggaactttaagggctcagaatataaagccagggagatttaaataatgtgtttaaccgaagccatttagccaatctagaagagccaggactagaatgacatctagtacagctgacacctactggtcaccgtgtactaaacactgcttacatcatttatcgtcctcatacagccctatgggatgaggatgatgattatacccaacaacaggtcttagaggctgaaagaggttaaatgaatagctcttgttacccaggtagcaaactgctgagccaggatttgagatgaagcacgctggcacagtccactgtctgagccccattgcagccctctctggaattccacttgagacaggtcatgttgcttttgattaaaaaaaaaaaaaagtacccagctgaaaggggccatcccaccttcttacagccaaggggatgaggagaaaataggaaagatttaaggctttttatatgtttttaaaattcttaatctcttcggcttctccatttcaatgtgctttacttatgtttacttgattaagactttaacatgatttgcataatcttgtctcattgtaacttgtaggtcaggactgactggcctgaggatgaaccccaaaatgtttctgaaagtaacaattatgtaaactttacattctgcaattattcttaacatacaagcaataaaaatttgttaagattactga

SEQ ID NO: 218889 - DNA, 377 bp, Homo sapiens
tatatatatatatatatatatatatatatatacacacacacacacacacacacacacacacacatacatatattgtatatatactgtatatacattgtgtatatatctacctatttgtctatatatgtatatatctccacattttctttgtccattcatctgtcaaggaacatttaacaacacgggaggcagtatcagtaatccaaaatcctctaagaaagaaaagtccaagacaagatggcttcattatactaaacatttaataaagaattaatatcaatacttaaaaaaattccaaaaaatggaagaggtcaaaactcacttaatgaggtcagcatcactctaataccaaagcaaggacaaagacactacaatta

SEQ ID NO: 218890 - DNA, 537 bp, Homo sapiens
ctcagttttctcatctgcaaatgggaatgataattgcatccatgggatgtaattatatccacatcaaggttttgtgaagattaaattaaatgtgttgatagtttctgttcagggttttaacgtggtgcctggcatagagcaagttctcataagtatgtaatgttatgattcctattttattcccttgagtagaatgtgagccagacaaaggtaaggtcattgcggggtggaggagggcttgaaattggtcagtcagggcttgttgactgagggggtcctgacaaaatggattgggcgacaggtaaggctggggcagggccaggaggaggaggccatcaggtcagggcttggaggcccaggccccgctgggagctaagagtcctggattcctgcctacagtttgagctccggtgaagcactccttcttgatggctctggtttcccagcataatgtaaattgaagagatcgaaccagatgaatggcaaggtccctggcagcccagatgttttgtgagttctgagcttctaagttaattt

SEQ ID NO: 218891 - DNA, 359 bp, Homo sapiens
agatcaaagagccccatcaattcattcagagagtcaaaaatccagctgaggctcagagccctgtctgcataataagaaaggttgactaaaacatacggattaaacagatgagctgtctcctgcagaggcatgggagggaagccccactgcgacacttgtaaagacactttggaagctcgcacctgctcctccacagccaaacctacaggagaccaggatggccaaagacgttccactattgtactaaattgttagctttaagagaaagaaatagatatgtctgatggatatctttttatttgtcaagacactgtcagtccagacaaacaataaattaataaatcacctccatttttcca

SEQ ID NO: 218892 - DNA, 384 bp, Homo sapiens
tgtgatggagtctcactctgtcgcccaggctggagtgcagtggtgtgatcttagctcactgcaacctccatctcccgggttctcctgcctttagctcccagagtagctgtgactacaggtgtatgccaccatgctaatttttgtatttttagtagagactggttttcaccattttggccaggctgctctcgaactcctgacctcagggaattcaccttacttggcctgccaaagtgctgggattacaggcgtgagtcaccacgcccggccgccgttccactttaagttattcccatgctattgtcacccgtgtcctacaggggttaaatataccactcactatcactgaggaatcttgtgttttccgggtatcaaaacatcaat

SEQ ID NO: 218893 - DNA, 458 bp, Homo sapiens
aatatttacaacatttgtgtggggtagtggaacaagggattaacttcttttctccatttctgtggtttctgtgttacttctagagaaaacaacattttagaatatgcatgtaggcaccgtgcaagagacggtgtcccaccactactgggctggaagggtctggctgcgcatcccacacactgctcctgaatgcagcgattctggcctagcaggatccctgcagcatcccttcactgcagggccaaggctcctcctctcatccaagaaactccccttcttcatttaagcgctccttcaagcctgacgcaggctgagaaaccagattagttaggtcactgagaacaggaggggaaaacagattgtgcccctaacaacttcacttcactgtaatagcaagctataccatgtgtgaaaagtgagggatttttttgttaggtccataacttcaggaagatgag

SEQ ID NO: 218894 - DNA, 316 bp, Homo sapiens
tcagcttaaatatgcttgtataattacgctgttaatgatgatagcagtgatgatgccggtggaaaaagcctgtctttagctcaagaaaagtaagggagacaaatgtagcaagcagaaagcaaacacagatttgggcaagattttgccagaatggaagtctaacacttaaataagcattctcttggccaagtaagaaactacagttgttgtgggtattaccctacaattaccatatgtatatacatattaaattaaactcagcattaaatatgcttgtataattacgctgttatatgatgatagcagtgatgatgct

SEQ ID NO: 218895 - DNA, 548 bp, Homo sapiens
acgtgcaagtttttccttaacctagatataaccagtgtttctgtgtaggtatgtgcgtgtgtgtgtgtgtatatttatatatgatttatatttttcccccaaattttcactcttggaatggaaatccttgtgtgtatacatcttgattcatttatccaattatttcctcagaataatttcctggaagtagaatcaaagaatctgtacattttctatgctgatacatagtatataattttgatacaaaaaaaggtatattacttttcattcccatcaagagtgtgtgtaacggagcaagattttttcttccataccaccactaccaattcctcgcagtctgatgttttaaaatatatgcttttttaaattatatgactaaacaatttcatattagccatttttgttctctctgataagttgctttctgtatttttggcccctcagttatagcttaggttctagagcagactgcgtgcatttgaatttctacactgtcacttgctatttttaactttgagcaagtgacttaagctcttcaggtctgggat

SEQ ID NO: 218896 - DNA, 564 bp, Homo sapiens
aggccttagattttaggttatttaatgtcatttaattttgtattcaaccaatacttactgattgcctgttatgtcttaagcgctgccgcagaggctgcaaatgcagtagtgtcttgaacaaactagtgtaagatgaacaataagcatggcagaagcatagtagcaactaaattcatgaagtgatatcatagtgataagcactatgaagaaagcaacaggataaagagacagagtctggctctggagagggggctgctgaaatagtgtggtgatgcaggccatctgaggatagtaatgaaatttgggggatgtctatgggagtagatgctgttggatgaatctttggagtactcccaaatgattgttcattcatttacttactaaaatatttactgagctccttctctgtgccccaggcattgttctggaaactgagggtgatgctttgaacaagacaaagaaccatgccctattgaagcttttgttcagccctcaaatcactccatttcaagggaccaaaagccctattaacttaattcccttattttatagctgacggaattt

SEQ ID NO: 218897 - DNA, 514 bp, Homo sapiens
cagtaacacgaatgagtcttacatgcattattctaagtgaacaaaatctaaacttgaaagactacatactgtgtgcttccatttagatgatgttctggtaaaggcaaaattacaggaacagaaagcagattgttggttgcctaagggcaagtggcctaaaaaaattttggaagggtaatgaaaaagttctagagtttaatggtgtttatggttatagggtgtatgtgtttgtccaaattcatagaagtctacatttttaaaaaatgaaatagttgtgtaattataccacagtttttaaaagtattaaatgaaaatagttcgccttgaatcttgatttgttaattcatgctgtttggttgttacttaggaaggaacttaaaccatcttgctatggcaacaaagttggtgtattttgtacccatgacaccgttgttcattgagtattaaataatgctcatttttaaacgcattattaaattataaaaggaagcaatgcattttgtaatctaaaaga

SEQ ID NO: 218898 - DNA, 339 bp, Homo sapiens
tccctgagcttggggcttttgttgggttccttttctgccaatagcagttgcagaagtaacagccccgaaggctgtctcactgccactgcggtgcctctgagtgttttgaagtgaatctgtgtccgttttttttttttttttttttgccaggaaaaagtagctgtgcttttgcaaaagagaaaagccattgttttaagagaatacattactttttagaaaaagtttgtacaggtctgtaattttatagtgaacaaaaatttcttacgttcttgcagtttgagaggtactgtgtaccaggcaatgtttttcaaatacttgctcccttctgtcgtcttctcg

SEQ ID NO: 218899 - DNA, 428 bp, Homo sapiens
aaaaaaaaagcaaattgccaaatcttatgcttatattgattctatttatgtaaagaaaaaactattctatacataaacatgcttacacacatgcacgcacactcccattgataaaaagccctggaagaatatacacaaaagtcatgcttcttaagtgttgaatatagaaaggaaagaagctttcacttttcactttacacactttttaaattttaagatactgggtctcactcttcatccaggctgaagtgcagtggcatgatcatagctcgctacagccttgaactcctgggttcaagggatgctcctgccttagcttctggagaggctgaggcacaagaatcgcttaaacccaggagttgaaggttgcagtgagctgagattgtgccactgcactccagcctgggcaacagagcaagactctgtca

SEQ ID NO: 218900 - DNA, 276 bp, Homo sapiens
ctagggggaggggaaaaggcctctgcaaagttgctgtgtcattgccctccatgctgcagccacccaaacggggccgcttgtacttttgggggccagggcctgatccctggctgggggaaggggactctgctctcctgacgctcattttcccccgccctcccggggtttgccctactcggggggtcagaagacaggagattggcggccattttagacgcagtaaccgaggttggagttgaagggctactgcagaggagggagggtggcgtggttgca

SEQ ID NO: 218901 - DNA, 1422 bp, Homo sapiens
actaaggtaggaggattacatgagcccaggagttagtggctgcagtgagctgtgattgtgccactgtattccagcctgggcagcagagtgagacaccaacattaaaaaaattaatttaaaaaagaaacagccgagtgacttttattttaaaaatgtgtatgcagaatggtttttacctttgttcttgtttctccccaccccccatctttttgaatggtagatttgtacttttgattttttgttctttagttgctttttgtcagtagaaagcttttggggataaagaccttaaagtatttaaaaatttatgttagaaaagaagattccattatgtctttgtttcacagatcacttaatataacttagccaggtaaattttgcatttcacactgattacttgtttggccattgtgtttggataaggttagcctctgcagttttaatgtattgggtctagattagaaacagactttttggattctgtattctttgccttctttagtccgtgatccccttgctcttggtattttacttgtttctgttagtagtaaaaaggaaagcttttatgccatacatagcagcttggtagcagacaaaatacaaataaccttctaaggaatttgaagaatatttttacattcttttagagtgggatatgccgtcagagaaagtaaatggaatatcttgactgtaaagacttagttaaagtgttttagtctccacagtcagggtgagtgagctgtatagaggaagtcatagtggttggccaagctgagatacttgcttatacattccaaagtgcccttttctttcagaactcctataatcttgtcatcccaagtagaatcttgtgtacctctttcacaaatggatctgaaaacagtgatcctccaaagcatatctttccttttttagagttaaaataccaataccacccagaccttagattctaaatactattattcactaaagtgaaccggggcttcttggagaaatgactgattctggggctgggccagggaaaaaagggccccttcaatattttggggacatttcagaagatccagaagccagcttggaggggtttccactggccaagtctgggataaatttgagtgtcaaaataaataagaacaataaggccgggcacggtggctcaggcctataatcccagcactttgggaggccgaggcgggcagatcacctaaggtcgggagtttgagaccagcctggccaaaatggcacaatcgcgtctctaccaaaaataccaaattagtcaggtgtggaggtgcgtgcccgtaatcccagctacttgggaggcggagtcaggagaatggcttgaacccaggaggcggagattgcggcgatctgagatcatcccattgcactccaccttgggcaacaagagcgagactccatgtc

SEQ ID NO: 218902 - DNA, 375 bp, Homo sapiens
gaacccaggaggcagaagttgcagtgagccaaggtcgtatcactacactccagcctgggtgacagagtgagactttgtctcccccaccaaaaaaaattggaaaaaaaaaaaaatcaaatgatatttgttcacaattgatatttttggtatatcaggtgtaaagatttttaacaaagaggaaaaacagaatttcaactctcaaaaacaaaaatgtaagatttgattcattttaatatgaaaatatgtattcatattttgttaaaaagccagactctacaatagtaaaacctgttttctgatggtgttcattaaaatgctaagctataagaaatgcgttaattattagaagtgaagatcaagtctcttcctgtacta

SEQ ID NO: 218903 - DNA, 197 bp, Homo sapiens
tggtttgggtcacaagtgagatgggtttggcagcctcggtctggggcccatagaagatcctgtggtcacgagctctatcggggttggtgtgtttggccacacgtaagttgtcaggcatcctcagcagggcaggatcaagatcaggaccagacttggcaagggacaggcagctggggtagaaaagtctctgtgccaca

SEQ ID NO: 218904 - DNA, 553 bp, Homo sapiens
acatgtcgaggctgtacctccatcacagaggtcctggaagagtcaaggagatgaaggtttagacaagctgcacttttggaggccaaggcggggagattatttgaggttaggagttcagagatgagcctgagcaacatggtgaaaccctgtctctacaaaaattagctgggcatggtggtgtgcacctgtaatcccagctgctcaggaggcaggagaatccttgaacccgggaggtggaggttgcagtgagccatgatcttgccactacactccagcctgggtgacggagcgagactccatctcaaaaagaaaaaaaagggtacttgacaaccttggtcctcggggaaatcaaattaaatccaacgaataccaccatatacccaacaaaatgactaaaattaaaaatactgataatttgcagtatcagtaaagatatggaccaacagtgttaggaggattatgaattggtatagccactttgggaaactgatggtatctactacttaatgaaataaactgacccgagcagttctactgctttgttctatacata

SEQ ID NO: 218905 - DNA, 563 bp, Homo sapiens
tgctggcaggagagtgattatctatcacagaaatgcttttagcagaatgtacttggtcgtttagaattgcttatggttaacaaagtagaaggttgtggatttatggggctccctggaaaatgtcacatataccacatatgtaactatctgcataaaaattaagatatttgataattgagacaggtatctccatgtaaataaattgtctgcatacctctctagaagtctcatctatctgcctgggcaagggagtatctaatgacagaaccaaggatctaaagaatcagattaagagatctaaataattctctgatttgcctatgcctaatgattacctgagttcgtgaaattactagtaaagctttatattttgtaagatcttagattctgataagtctaatgtcacaatccaatcagtttttcctatctcaaggaatcatgtccatataatggaattaatcctgaaactctgaaaagttttaatattctggggtcagggtagagagaaagaaaaggagaaagagagaaagaaagagaaagaaagaaagaaaaagaaagaaaga

SEQ ID NO: 218906 - DNA, 502 bp, Homo sapiens
tggagacagggtcttactctgttacccaggctggagtgcagtggtgtgatcatggctcactgtagccttgaactcctgggctcaagcattcatcctgcctcagcctcccaaatagctgggaccacaggcacacaccaccacccccagctaatttttaaattttttgtaaatagaaggtcttgctgtgttgcccaggctagtctctgactcctgggctcaagcactcctcctgcctcggcctcccaaagtgcttgggattacaggcgtgaaccaccctactcgacccattctggggctttaattcaggaatcatagaaaatctcagctttggtggggctgggtctcagtgtcttctgctgtctgtagcttcagggcctccatctttcaatcagaggttccttctctacttgctgtgtcactcgaccagatgacgggctctcgtctgacaccagccccaggctgccaggaagagcatattgcagattaaggagcttcatctgtt

SEQ ID NO: 218907 - DNA, 256 bp, Homo sapiens
tgcaatatgatgcacacgttgtgcggccactgtggctctaaggcctgtcaccttccgaagtctacctgtggcaaatgtggctaccccgccaagcgcaagaggaagtatgactggtgtgccaaggctaaaagactaaaggccacagggactgggcgaatgaagcggcgtggatttccataaaggaacaacacctaaacccaaaagggcagctgttgcagcatccagttcatctcaagaatttatttgcttttttttt

SEQ ID NO: 218908 - DNA, 355 bp, Homo sapiens
tgatctgtgtggcattggtaaatcaaactgatgagaattgctttttaattaggcatcctttttgatttttattcttgtgaatttatttgatagatgaaccctcgtaaagatgagggacaaatcaatgactaggcatagtaatagtatcggtgcattcctttggcacatgtcctatctgaccagtttattttactttaatttttgttatattttccctctgcaaccagagttgttcaataccacttcacactcactaggatgtctacacaaaacttgtatatgaatgttctggaatctataacctgtggaccaaatccttctgcctgttttataaataaaggttttttggaataca

SEQ ID NO: 218909 - DNA, 427 bp, Homo sapiens
ctctagcctgggcaacaacagtgaaataccgtctcaaaaaaaaagaaaagacaaacaaggcctctgctcctctggaacttaccttgtaatgggatgagataaacataaataaacaataaattaaaatatcagatactggtaaatgttatgcaggaaattaaaacagtgttatggagtagagagtaactgactcagtgctttagatttagggataagggaaggcgtctccgaagaggtgatacttaagctcatacctgaagagcaagaaagagctagctatgtgagggttttggagggagaatattccaggtggagggagaatattccaggtagagggaataggtagtgcaaaggtcctaaggcaagaacaagcttgatgggattaaaatgtagaaggaaaccaacatggttggagcataatgattgc

SEQ ID NO: 218910 - DNA, 428 bp, Homo sapiens
agtatctgtgcttcacctcctggcttcaccacatagtataggtcaaggtcatagtctcaatggctggttagcactacatagggcataaccactggaaaaatgactccataagacacaatttggtgactgttgattagtagcaccatcctcatatacaaaacaaaacataaataatatattcacttttatagtacaaggctttcatcttacttaactctcagatatgtaacctaaacaaacaaaacaaaacaaaacatacaaaacaaaaaaaaaacaaacaaaacacaacatttttgcccagatagaaaaagaagacagccgagtaaggatctagaggaagtctggccgcggggggtccacctgtaattcctagcacggaggtaggccaaggaaggaggatcacttgagcccaggagaacgcgtccaaa

SEQ ID NO: 218911 - DNA, 292 bp, Homo sapiens
gaaaaatattctcagggtatctatctccaggttcctgtttggtcgcctgtggtcccttgagggcagccctgacccaggccaggacctgcacaggcatttgggaggtgcagatgggggcttgtgatgcccagccctggctggggcatgggagttggagaaggatctgttcatgaggaactggctgcttgctggggcaggagaattgcttgaacccgggaggcgggggttgcagtgagccgaggtcatgccactgcactccagcccggttgacagtgcgagactctgtctcaaa

SEQ ID NO: 218912 - DNA, 741 bp, Homo sapiens
cctgacctcaggtgatccacctgcctcggcctcccaaaagaatattaattgactttaaaccaaacaccgtaaatgtgttcttcctgactctgagatgtatctgaggatattgtgagatctttattgaaatcatccaaaatgggatgccaagttttggtgtgcatattaattttttttaatccttgaaaaaactatcaactgaacatcttgcttatggatataatttacatgtcttagtatgaagcccttaggatctgagtacagcacaagtgtaatttaaagatgtagctgagacagaccaaaaactgatcagcatcccatagagtgaaataaccatgtgccgcgttaggttggggtgatggtgtcaggactatcacacattgagttggttataaacctgatggtgatttagttgtttggaggagcattttcatcagaagtccaagtaatcttgcattggaaagtgaattagaaaatgcaaatccagtggcatgagccttaggatacaataccttattagagttgggatacccagtggtgcagtgtagtcagtttctatttggagctcggtcagatgagttttagttgatatttaggtaaggactcaaaactcctgaagtattatattctttgatttgtttttcaacttgcttcttaaaattaacaagcaatgccaagacagtattgtatttctatcttttctttgtcataactgtcagaacaaatagcccatagaaaagc

SEQ ID NO: 218913 - DNA, 1028 bp, Homo sapiens
tcgactttctaaagccaaattatttgacattggttttcatatagcttggtaaaagctgttattttctcccatgttctttattctttgactgttataagtatgatttgtacagagaaatggcaatttcaaaacagagggctttgatggattaattgctttgaattgatccctcatctacagtatcttgtcaggtacttgagaaaataatgtacttaaagtttcctcttttgactttcttttggtattctatactgtaagttggggaaaaaagtattttctcttcctgctaattgggctacttgaaaattcccaccaactttgccaataccagtgttctgtataacccagaattcagaattagctgcaattaagggaattcacagcttttctgtagtcagagagcaaattgaaattaaagaaaaaagaaatagtgggaggacaaatgaggttttacctttacacttgaaaacagatttaagaacaagccttatacctagatttattaatactttgaggtatgagagggaagagaagcttagaaatacggcagaatgggctttctttgttcttctcccagctatgctgtttttatttattattgtatttttaagagagaagggaagtgtctctcctgggtcacattaattaggaaatacagagtgttttcataatgcgtaaagtctagtccatttaagtcttgtttcaaaatgctatttatattatttgagcaggaaggcagagaccttaaactgctccacccaattcattttacacaaaagattaaaaagaaaaaaacagtgtcaaaaggtcaagtgcccagtgttgcacaactaatgataggcaaaacaagagaggaggggaaaaaaaagaatcctgactcccgactcctagttcagtgtgttcttcactgttagaaggtgctgctgaacatagttataccatatgaagatcacactatctatttgagattgtagaaatttgattactgcagagctctggctgggctagattcacttcttattctttat

SEQ ID NO: 218914 - DNA, 899 bp, Homo sapiens
atacttctccacagggacgtgagaaacatgaaataaggaagtaggacaccatcaaaggaacgtaattccctagtaacacactccaatgggaaaaaacttaatgaattgccagaaaaggaattcaaaattatgatcgtatggaaactcagagagatacaagaaaacgtgtagacaatcaatagagttggggaaacagttcacaatataaacaggaaattgaataaaagagaagtaagaatcaaatcctgcagctgaagaattcaatgaatgaaaaaacatacagtggagaatttcagcagcaaacttgatcatatgtaagaaagaatctctcaacttgaagataggttatttgaaattaacaagtcagagacaaaaaaaaagaaataagaatgaaaaataatgaagaacgcctacaaaacttatggaacattaggcaaacaaatatttgtattatgggtgttccagaaggagagaaggggaaaggcattaaaaaatctatgtgataaaatctgaaaacttcccaagtctacggagatatatggacaacagatccaggtagcccagtggttcctaaataagagtaaatctgaaaacatcctccccgtgtcacattacagtcaaattgtcgagagtgaaagagttcacaaaacagcaagagaacagcatcaagtcacataagagaatccctattagactaaaaacagatttttccagagaaatcttacagcctaggagagaatggaatgatagaattaaagtgcttaaagcagaaaattgccagccaagaaagaatactgtgtccatcaaagccatccttcagaaatgggggtgaaatagtctttcctagacaaaaattgagaaagttatacatcttgagagagttttacattttgaaaaga

SEQ ID NO: 218915 - DNA, 528 bp, Homo sapiens
aggtttaattgacccatggttctgtatggcagggaacgcctcaagacacttacaatcatggtggatggtgaaaggaaagaaaggcacatcttacgtggtggcaggagagagagagagagagagaaagtgcaaagggggtagtgccacacagttttcaaccatcagatcttgtgagaactcactatcaagagaacaacaagggggaagtccacccccatgattcaatcacctcccatcaggcccctcctctgacacgtggggattacacttcaagatgagatttgggtggagacacagagccagaccatgtctgcaattaacttgatatgtatagcattttaattataatttgactagttttctagttaaacaattatatgtggataaatttttaagtttaaaataaaggtatactattgttacaaaattaagcagaaatacagaaacgagcactacaactggaacagtttttgttttaaagaaaactgcattgtaattttacaaataaaataacaaaatgaaaagata

SEQ ID NO: 218916 - DNA, 497 bp, Homo sapiens
atggctaggaaaaacagcctcctccaaagaagtgtctcatgcagctgtccaacagaagtaatgtgagccacatatatacttaaaattttctagtagccttatttaaaaattaaaaataaatagttgaaatttttagtgctatatttaactcagtatatccaaatactattattcctgtatgtcatcaaaataaaattattattgagatattccttctttttctgtactaagtcatggaaatccagtgtgtatttacacatacagcacatcacagttcagactagcacttttcaaatgctcctagctacatgttatccaggttgctgtattggacagcagggtccatcaatggcttgactgcagcttcagataggagaaagaaagggatcatgtgaaatgtctgttcctttgcagaaaactaaatgtcagatcttgaaaaggaaaatgttgacagaactgtctggaaaatataaccttctgatgtttatttgcacaga

SEQ ID NO: 218917 - DNA, 212 bp, Homo sapiens
agcggctccagtgcacaatgcaagtgctactgcctaaattctaaaatacccctatcttcatattcttatcattgtctattaatttttttaaagtggactgtaaaaagccaaagtagaatgaaaactaaggtcttaatccagatagtaagcccaggccatctggctgctgcttttgtgccttgttagagatcttctgaagagggtatggggcc

SEQ ID NO: 218918 - DNA, 419 bp, Homo sapiens
aaagaaagaaaaagaagaaagaaagagaaacagtgtccaaatggagttctgctctaatcacaagacctcagtacattagaaagaccacagggctagttactgctgggttgttttcaggtctgctgcctccattgtcctgaaggaaaccacacttcccaactggtctgggccaataggaagcattggtggaagacaagaaaacaagagggaagagggagaagcaagggtatccacccaacacatgcacttcaggtggcatctctagccccctctagagtcttggctcccatcagacacagtcttccactaccatcttggtcctagctccctccaaggttgctccagtctctgggatccagaaacaccacctgctcccatcatttctccaaccctacggatgatgcagttgcttcctgctg

SEQ ID NO: 218919 - DNA, 479 bp, Homo sapiens
caaggctacaaaagaatccagtcagtgctctattcactacaccaggtggtttctccaattatagactgttcagcattgtactccagccaaagggtctagcagtctgaagcagtggcacctcgtgtcacttaggccctctgaggggctgtgtttctggcttaagtgagattgagtaacagctttatctttagcgtgttgagggagtgctgggtgctcaggaataatcaagtgccactttgaatgccatcattgctggagtgacagttgtggtccagcacattttgtgttttccttacgttcttttcccattttcagtccccaccgccccagcctcccttggcaagcacaaaacgtcatgagtttgtatcaagcacatgactgcaggcatttgcattagaccaccagtgtgactgtcacattggagattagataagctgcaattgcattcatgtttttttccaggcaaaagctacacaagg

SEQ ID NO: 218920 - DNA, 417 bp, Homo sapiens
aactggatacccacatgcaaaaaaaaaaaagaagaagaagaagaatcttgatacagaccttccaagcttcacaaaaattaactcaaaatggatcacaactgtcaaacacaaaacccataaaagataatatagaagaaagtctaggtgagcttgggtttggctatgactttttagatgtgacaccgaaagcacaattcgtgaaagacataactgataagatggacttcattaaaattaaaaacttttgctctgtgaaagactatgtcaagggatgagaaaggaagccacagagtgggagaaaatatttacagaagacatattaattgctattaaaaatatacaaagaactcttaaaacttaataagaacacaacccaatgagccaaagacctgaacagacatatcaccaaagaagaca

SEQ ID NO: 218921 - DNA, 294 bp, Homo sapiens
cacaacttccaccacaaggaaagtctattatcatcttcaagtaaaagaatgcctggtggtaaaggttagctcatgtattttaagaagagtgatgccaatccaaggggaaacgtacctagccctggatatgataccctttgtgtcgtttggaaagtgatgctgttaatacctcagttgaaatcttcacatctcatagtacattacctatttttatatgaaatcagctgcttcataattaaatttgatgcatgacatttttgaatgtaaaattttactagtaaataaattgaacaa

SEQ ID NO: 218922 - DNA, 486 bp, Homo sapiens
tacctctctgcttggatatctgattggcatctcaagcctagcatgtccaaagcttaacttcatttccttctacacactttctcacccctgccatacccaatctgccccatcttggtaaatgtcagtgccatttttaaaattgcaaaatcctagtgctgctattgacctctgtctttagcttctacttcacatcagcaaatcatgtctgctcttcttttaaaatatatctgaaatctgaccacttataatctccactgctaccacctagttcaggcagctgtcatgtcttatctggaggtgatcagttgggtgccctgttccactcttgcctttcgaatcaccctggaaagattcttagatctctcccaatctactcatgtgggtttccatttctctcggagtaaagaccatagcccttgtaaagacaatggcctagaaagtcctatgtgatctgctctcccatctctaccaaacccagtcagtctc

SEQ ID NO: 218923 - DNA, 1077 bp, Homo sapiens
ctgcagaagttactgctagccaggaggcccgggggctccggctgagtgacctggaagacctggaggaagaggaggaggaggaggaggaagctgaagacgaggaggtagtggccacagctggggacaggctgacggagttccgaaagggcgcgcagtcactgcctgggccgtgcgctgcagctcgagagggccgattggagcgcagggagtgcggcctggctgcgccccgcttctccttcaatgacccttccggatcggaagaagctgacttcctctcggcggagacaggcagccctaggttgaccatgcactacccatgcttggagaaaccgcgcatctggtctctggcgcacaccgcgacagccagcgctgttgaaggtgcacccccagcccgcctaggccacgaagtcctgagtgccgtatgattcctggacagcctcctgcctctgcccggcgactctcagtccccagagactccgcgtgcgacgagtcttcctgcatacccaaagcctttggaaaccccaagtttgccctgcagggactaccgctgaactgtgcgccgtgcccgcggaggagcgagcctgtagtgcagtgccagtacccgtctggagcagaaggttagcgcaatggctgcgatttgcgaaagaatcttggaaatgggccccacgtttcgaattcatctccaggttaagaagctgccagaccttgccagggaccaggagctctcactttgcctaagagacagacacacagaaaccctcctagcagctgtccttgcacgcagagctggggtggtgggccgacttgaaccttagcagtccccacgggagatggcagggcaccttggggaaggccaagtgggaggctgggaggctgccccacccaccgactctaccaagtctctcttcctcctgtggattcagcaaggcttcctctcctgctcacccctgtctctcacctccaccaaccccactcactttgtaacttcatcactgacccggccaataaggaccctgtgcgtcttctccccctcctaagcccttgtgtccttaaaaataatcagtccgaacccatgta

SEQ ID NO: 218924 - DNA, 429 bp, Homo sapiens
ttttatttctttagttgtagttgctaagtagagctgttgctgatgatgagatgtttcatgctgagataatgaaaaatttactgtattggatcatctcagcagtcctattgagggttatttcacttatttccatgatgtttcaattaagctttttgtagtaaatattgataagagctattattgtacttgcagatctggaattaataagagaccatgttgggggaaaactacttgttacatttaatcacaggctcatctgaaagtctttggtgttgtatgtgaagttgtatgttcaattatatagtatacataaaaattataatgtatacataaaaagccactgagatgttttgaaatttattaagtttacgtataataactctcattaaaattattttctataatctttcttgtgaggtctagttgtta

SEQ ID NO: 218925 - DNA, 326 bp, Homo sapiens
atatggaaaatccaactgatttgtcaaccaatagcaagttacccaggaagtggtaattgattaataatgaattaccattaacggagatgaacatttttctgtatacttactgttctgccacaaaggagtttatttatttttttttggtatcaaaagtcatgtttcttttaggaaatcagattcagaatattttagtaatacatagtggttaggagcatagatttggagagaagtaaacttggccttgaatcctggctctggtaccacctggctgtgtgaccttggctaagttacttaaatatctctgaacttctctaataataact

SEQ ID NO: 218926 - DNA, 471 bp, Homo sapiens
gaatatacatagataacgtgtatttagaaactttggtgaagccagtatttgtttttagtaacctttttatgtatttccttctttgattagcattgtcttcagtgttaagaaatgtggactcctgtgaggtgctggaggtttgaatcatcttgaaaactttccaatcttgtctagttaccactgcagagacactaaggaatttaccagaaaaagatatttgatacaagtgatttaagaaatctcaacatttcctgaggccgtatcactgggcaaccagtgatgaaaactatgaatgaattgcacacctggaagattttttaagctaatgacagtttcttcaaagatgtcaattatttgccttggaaattttataaattgcatttctatgcacatcggcctctagtgcttaccactcggtttattattcataatctgcaattcaataaaggctttgtgttttcatttatcttc

SEQ ID NO: 218927 - DNA, 290 bp, Homo sapiens
cagagtagcgggtgagctgggttatgggagagagagaagaagaaaagaggacgtaaaccataagggagataagataaaacagaaaatcaatagaagtgcctaaagttgattcatcaagagacagcgccacgagcgcatgatttagagatgcaggagaaccaccaggagttctaaggacagaaagaacgagactgcctctggggaaggggctgtggcttttcatttttaacctgccttcctatatgactttgggcttgaatatatgtatgtattcctctgatagaaataaa

SEQ ID NO: 218928 - DNA, 523 bp, Homo sapiens
tgtgtgtgtgaggatatacaaatgtgtaagacatacttcccacaggcaaagagtttgcaatctagaggaaataagggacacaaaagattataacaaaaggaagcatgtggcatgggccataagacagctctagcaagagtgagccattcaggagcgggagactactgcttggggagatgggagaagacttcaggaggcggcttaaattgtgcagtcgagtttcccacatttggggaaatcgcaggggtcagcacatccagagggcaatggataagcctcgccctgggaaaaccacctttgtgatcatggtatctcccctgccagttaagcatatattattataatttcttaatcgcagggaaggctttcttgtcatcacttcccttaacatagtttgcccccatccttatccctgacaaaaacctccccagcaaagtacagcatagatttacatgcattcattcaaatctggtcacatttacagaaagcaaccaacttttgtttttcttttttttccttttct

SEQ ID NO: 218929 - DNA, 395 bp, Homo sapiens
ccccctccaacgattagcttttgcaacatggtccagtttctagagggcactagaactttgtgccagcgctggcgagataccatggtgccatcctcctttctatagttccagtttagcccttccctgcctttaaggagaagagatcttcatggtgacatttgagatgatggaaactagatcgtctctaatgttaggtcaagctatttctctggatctatgattttaagatagaacaggctggttctgagttctggtgagacggagaccccggtggcagtggaaaaatcagaagcacaaaggaaaactcttggcctctgctttctcctgtagcacaaagagggagttggctggatcttttggtggagtcaggaaagacaggctgagctttctagcct

SEQ ID NO: 218930 - DNA, 380 bp, Homo sapiens
ctccaaattgatcagttaattaagttgatctctacaagactgttaaagaaccaggtctttttcctttcatgttatgcagttccaagtaaactccctttactctggtatccttatcagaggcagacatcacaggaagtggagcattccttatgaatatcttaatctacacacaaatagatttttttcaatgtgaatttggatttctaaaagcacgcttactgcaagtacattttgcagcctcttgtttccagatcagaattgagtgattttctattatttatttatttattatttgtcactttaaaatatgcaattcttgggatcatgcagaattgctgtatatttgctttgaagattagaataaaactggtagataatgt

SEQ ID NO: 218931 - DNA, 589 bp, Homo sapiens
ctattactattattaaaagtagaaaagttgattcagaatctctggggctgaggccagagcatttagcaagtttctccaggtgatcctgatccagtagtttgagttcttgttcccatgtttattcccatacaaggccagtcttgaataaacagcattgccattccagatcaaggactctaaatactttttcataccatgaaattcactaggctataattaaaatagactaaatttactaagacataattaaaatggattctaatgttcaagctgaatgatcacagtattcacttttatataatagtctatattcagttcattacttctcattatcctgaatgtaaaatgtgctatggaaagtcaaattccatatattttaggaattagacaaaatctttatggagcacatagctcatcttagagttgtaagaaatatttgtatccgatttttttttgtaaaaaaaaaaaacaagattcacaggacagccttctttgcttcccatcaattttcttccaataggtttgtgccaaatgtgttgtgaacttaatgatttgtttatgacaataaaatttgataaatatatactaa

SEQ ID NO: 218932 - DNA, 321 bp, Homo sapiens
agatcagaattttattgccttttgccgtagactgctgcaagatttccagagcaaagagaaggtatagtgttccttaatgtgagttatgaagatcaaaatacagcaaagagaagatttcagagatttaaaagtgataatttttactgaaatttggaaatatgtctccatattttaactttattttataaaaaagaattactctgttttttgaaatggccaagcattaagtaatatatgaccgtgaatttcttgagggtgggaaatgtgactggattttatatttcgattgtatcacatgcagcctcacacattgcgctcaac

SEQ ID NO: 218933 - DNA, 488 bp, Homo sapiens
cccaggagagttgagtacagacggttgcacaagaagcataaggccaatgccctatggtctctgtgggtttattcttttctgccacatgtgaggcttcggtttccatgtaccaatgtccatctactcagaaatcatgattgcaggccaatcaacaacagatagtccaaactccgtgatggcttggggtttaggggttcagtaggaagctctctggcctgaagcctgaaaagtcacaggttcatattctgcttagggaaggagctggttaggtatatccaaaatcatatagggctagtgaaatctcatctattcattcagtagttactctggatctcatggtctaagaagtcaactgggctgggctagggggtagaggaagattcaaaacatcaaaagccacaaaatcaaaacaagaaaaagtgttgaaaatcataggccttggaaagcaaatagtaaatgtaatagtcattaagtagcaaccaatgacc

SEQ ID NO: 218934 - DNA, 357 bp, Homo sapiens
gcacaggctctgctagcccctgggtgaagatggcgaaggcataactggctttatgcagcatatgtgtttctgctaaagtgtcagttttgctttgtggggagtggagggtgtgttttcgggatggggagacgtggtaacctgacatgtaacaacctgtccggagactagcttctacgtgtggatatgaatgggtgagaggatttctccatatccttctggggcgattcctcaactgggagaaggaaaccctgcagagttctcatgggagtctgcttcaggtttgaaatttaagagctagtttggattcatgtttagtaatcgaactgaaatctaagtctagctgtctctctattcttg

SEQ ID NO: 218935 - DNA, 319 bp, Homo sapiens
agctctccacttcagaaaagtacctctgtccttccaggtgcccctcagactggacatggtgaattgggatcatttagtctaggaagatttcaatgaagaccccagtgtcaactgggagtctttccccccatccccaatccagagcttttatgccatagttggtccaacgttctgtggaccactaaagagcaaggatggactgccccaaccagtagttgtaatttcctaaaatcataaagtcattttactaaaggaacagcttcccctaactgtcagctaaaccagtgcaatccaatacaggttattatcccaaaccctc

SEQ ID NO: 218936 - DNA, 594 bp, Homo sapiens
aacaaataccacagaaatacaaaagattattaaaggctactatgaacacctttacatgcataaactagaaaacctagaggagaggaataaatttctggaaatatacaaccctcctacattaaaccagggagaaatagaaactctgaacagaccaataacaagcagtgagattgaaatggtaataaaaaagttgccaagaaaaaagtccgggatcagacagattcacagctgaattccaacagacgttcaaagaaaaattattaccaatcctattgatactattctacaagacaaagagggaatcctccctaaatcaatctgtgaaaccagtatcatcctaataccaaaaccaggaaaggatataaagaaaaagaaaactatagaccaatatccctgatgaacatagtgaaaaaatcatcaaagaaatcctaaaatcctaactaactgaatccaacagcatatcaagaagataatccaccatgatgaagtaggtttcataccagggatgcagggatggtttaacatatgcaagtttaacatatgatacaccacataaacagaattaaaaacaaaaatcacatgatcatctcaata

SEQ ID NO: 218937 - DNA, 136 bp, Homo sapiens
acaaagcaatacctaatcaatactgggtgggaggtgcttacagaactgaaaggctgtacattttgtaggccctctgaatttgctttttttccctcttaaatggggattaatgacatcattacctgatcttcagtca

SEQ ID NO: 218938 - DNA, 529 bp, Homo sapiens
gtggtccgcctgcctctgcctcccagagggctgggattacaggcatgagccattgcacccggcctttttttgtatatttagtagagacagggttttgtgatgttggccaggctggtctggagcttctggcctcaggtgatctgcctatctcagcctccttaagtactgggattacaagtgtgagccaccacgcccggccccgaagtatgtgcttttaaagtgaattcttctcatagaactactgagcgttttcacttactgcctctgagtattaattttggtttatgtgataattctctgaaatattattcagatttgattatatgtaaaactttttcgttaaatgaaatgttgaacaaccctctgagtatagtttttttttgttttgagacggagtcttgctctgttgcccacgctggtgtgcaatggcacgatcttggttcactgcaacctccgcctcccgggttcaagtgattctcctgcctcagcctcctgagtagccggattacaggcatgtgtcaccacaccc

SEQ ID NO: 218939 - DNA, 97 bp, Homo sapiens
cttgacctatctgcctgtacgtaagtagctaaaactcatcaatcacctgaactaaggcagtaagtgggggagaaaatctttgaaaaatccaaattag

SEQ ID NO: 218940 - DNA, 338 bp, Homo sapiens
tctgatttggaatgctgagctttttaaatggaaatatagaaggacggctgaatcagcaaaaatcctttatgtagtttcattctttgcaagcttgaccagtcattctgaaacaggctaactgaactgatacagtggcaagtgaaaaagacatgcctttacaggatgagtcaaaggagttttagaagaaaaatccaccagagaaagccaagcaaatacagttcagagttacatttcttttccattttttcctgaactgaatctttggcatgcatatcctgaattgggttattgaatataaatctagccttgtacaatggatgccagatgactacatattt

SEQ ID NO: 218941 - DNA, 460 bp, Homo sapiens
ctccaaactcctatttcagatcaatacataaggttcagctgagttcggcctccaggcccaagaaagcaaaagccagcaacccgggggctggtcggcggctccctcgccagggacgccccacagcgagaccatgcctctcccacctctacccccgaaaaccaaaacaaaacagaaccaagcccaagcggtgcttgctcgtttcttttgtcttgctcaacgctgaccactttttttccggagaaggttaacgttaagggagcccgggggagctctctgcgaccccgccaggtgctccccgaacccccggccccatcagaggaatgaggcgaccaccgagcggcgttgggcggccaggtcctccccggcacccccgccccggctcctggaggagggcagggactgccggcctggggcagccagggaccgacgggacccccgcagagccaggcccgaggccccg

SEQ ID NO: 218942 - DNA, 449 bp, Homo sapiens
gcccgcaccttgccaaggccgccatctcttgagtctcctgctgtatctttcacctttatctgtgagcccctgtgggcttgtgtgactgcattggaaccacctggataattgccctcttttaaggtcagctgattggtaaccttaatgaaatccgtgaagtcccttctcacagtatctagatcagtgcctgaaggaataaccagatgggctcttgggagcacaggtttcgaattctgcctctcacaggaggtgagggacgatgaactgctgcaaacgaagtgggagccgaggagctgaaagaccacactgctggcttcagttgcgtctttgcagtaggcgtcaagatcatgtgataaataagacatcctgctaagtgcacattttcagctgcttatactgaaaactatataaagttaaaaagtttatttccataagggagtggtccattc

SEQ ID NO: 218943 - DNA, 693 bp, Homo sapiens
attgttgtttcgttgtggtgaatatgagtagattttttgggaaaaatgtcttcaagaagttcttgaagctttcctgaaaccaggtttgtgaggaaggtctttgttcttaacctgcgtgtattaagtttaaggcttgaggtgatctgtcttgtcacataagtagttcccttcagtacggcatgtctgcctgccctccttccttcctagtggcagcttttctttagttctggaatcagaaaatttcctagaaacccaggggacgctgtgggtcatggctctggctcggccgaggcaagtgccttttagcctttctgggtttcagtttccttactgagggtataggcaactcattttacagtactggaaatgacaattgtgggaagagaatatctaaagcaggcttgacatcttgtggagttatataccaagaaatattaaccatttggggaaaaccagtttctaaaaaagggctcaggccacagacccctaggttttgcctcctccagcccttcaagtcccttgtctcattgatagcacccctggtcaccctcagagggagggatactgggcacagttgtctattcctctgacaagcctcctgattttgttcctccaaaccctctgacttctctggcttcttcctcctgaataactgacacacttgcataagtgtctggatgaactttgttttct

SEQ ID NO: 218944 - DNA, 447 bp, Homo sapiens
tgccactgcattccagcctgggcaacagagcaagaccctgtctcagagaagaaacaaaaattactattaccccacctacttctgaaaaaaggatatgagtctatggcttaccaatacaaaacttaaagaggaagaaaccaaaatctgagtataaggataaaagagccaagcagaaggatagtgaactcagggacatcagggtagggaaagctgcagcagtgatggagcacaaggctttgctatgagcttcctggaagccaatgtaaagaagaaactgagctcatttgcttgctaaaaaacaccagatcatcagggagacatcctttccccggtcttgagctagaagaggatatttgctggatgggtctttctaaaagggtcaaagtactggctggtgggaggggtcaccagcagcaggtttgcccaacacacggaaacgctcctccc

SEQ ID NO: 218945 - DNA, 502 bp, Homo sapiens
ccatctacatctcttctcttaggaattgtgattgtaacaatgtggtggcatttgttatttcatatgacttttatctatacagtattctcacttacttacaaactattaccaacagcatgcattttagtatggcagatacaagaaatttgtgtgatgttcccttagaaaccaaatgatattaaattggggaaatggttttaacccactctgcaagggatactttaaaatataatttggcacctatagctcttgcattttaatattcttttaagctgctgtttggaagaaggcaccttataactagccattagcaccaaagcatcacgttggtatcaggattattttgatggagagaatgtcatcatttgcaaataaatcagttatctaacaaaatcagaatcccccaatatgtactcagaatgtactaccctgtatcttctttgtggaccttaatcattaggtaacattggccataataaaaaataataatatgcttcagaaa

SEQ ID NO: 218946 - DNA, 201 bp, Homo sapiens
tccagatatgataaggtgagaaaagcggaactctcggccccaggtgatttccatgaagacaccctacatacggcgggcctcactatctgtaccatgcatccgcctaactctaataatcctggtccaggagagaaacacatctaaaaatgcaaatgaatgaaaaaaataaaactgggttgcatagtaacatcttaagcagat

SEQ ID NO: 218947 - DNA, 497 bp, Homo sapiens
gatatataaggtttagttttcagtattgagctgctatctgtaaactaattatattttgaagtgaaattagtggagaatggacattttctacattgcgtgagcgtctacagctagagagtatctctaggcagtgaggtagctttctgttggctcttagatgggatcacattctttgggcttgacagtggatgttatgtcaaaagtcataactcctctgatttagagatgacatttagagtactgtaggtttatgagaacctgctcttaaccttaaataacagagctgctgccagggctgctgccttccttcctggtttttgggtgcttgagactcttggaaagtgggccagatgcagtggctcctatctgtaatcccagcacttctggaggcttaggcgggcatatagcttcagtccaggagttgtgagattcttggaaatgtaaagcatagttgatgagagggggaattaaatagcagaccggatggttctcaaaat

SEQ ID NO: 218948 - DNA, 283 bp, Homo sapiens
gacgtcaggagttcaagaccagcctgggcaacatggtgaaaccccatctctactaaaaatacaaaaattagccgggcatggtgccaggcacctataatcccagctactcaggaggctgaggcacaagaatcgctggaacctgggaggcggaggctgcagtgagccaagaaagcaccactgcagtccagcctgggtgacagagcgagactctgcctccaaaaaaaaaaaattagatatgcagaaaatgtaaaatgcacaccagattttgaagatttagtaccca

SEQ ID NO: 218949 - DNA, 339 bp, Homo sapiens
cgttgtcttagaaattgacacaaccactcccccttttgctcagcgcctacaccctggagccatcctggattggtcactttcttccttccccacatccaacccaccagtgactctggatgcaggttctacctccatctccaccacactggtccaagccaccaacctctctcagctgggttattgcaatggcctcctacccaggccccagcgttggccttgctcccttacattttaaaaaaataatctgttaaggccgggcgcggtggctcatgcctgtaatcccagcactttgggaggcccaggcaggcagatcatgaggtcaggagattgagaccatcc

SEQ ID NO: 218950 - DNA, 296 bp, Homo sapiens
tccctcccattcccccatcgcccccatccccattccccccctggaggggcctgcgggtggggggtgcggtcctcacgccctttgcgtcccagtctcttggtctctctccccggagtcggggagtcggcaggtccggggcgagggctcagtgaggccggcggagggccgagtcccagcccgggagcgggagccggggacccggcgcgcagggcggaagctcccgcacaaaaggccggagtcccgcacatggatcgaattaaagctccggcggcgcccagcggtgaccccggcggccg

SEQ ID NO: 218951 - DNA, 664 bp, Homo sapiens
gcaaaaggccccgggtggccaggccagcagatgtctttatcagtggctcgacattggcagaggaactctgtggactcctgagggcacagggcggaagcagggagaaagggctgtggatggggatcagggaccctggattctagtctcagctctgccacaggctggctgtgtggcttctcccctctgggccttgacacagaaagctgacattagagttagatcacctctgggtccctgtggtgctagcagcctgcgttctttctggattataagggaccacagggaaaagctgttgcccagtgagagactcattgggtgggcagctgccccaaggaacatctttagggagccctgcagtctggccccatggcaccccagaaactaggagggctgccggctaatcccctggtgataattatcagtctctgtgaaccactgaggcatttcctatcagggtggcatctccagtgaccttgctgagttggtgactttgacggtgaacaggctgggtgagactgggctcactgtggccatcagaacccaagctggcttcatctcccggccaggagagagcctcaccacgtgggctcctaacatccccctcagcagctccgcgtcccttcttcacagaggccattcaacagccagtgattctcaacatgtg

SEQ ID NO: 218952 - DNA, 350 bp, Homo sapiens
tcttatatagaattgctcataagttatgcattttgtttctgcttgtttgcttccactgttggtgaggtcatcacctaatgatgccactcattctctcttttttttctgagacaggctctggctttattgcccaggctggagtgcagtggtgctggggcactggagtgcaacctccgcctcctgggctcaatcgatcctcccacctcagcctccttggtagctgggactactgaggcgtgcaccaccacgtccagctaatccgttctctttttatgcccctgggtggatgttaaatgcattctttacctggagctgtggtctgcttccttgcacccattgttcagagatct

SEQ ID NO: 218953 - DNA, 649 bp, Homo sapiens
ctcagcggcttacacctgtaatccaaacactctgggaggctcaggcacgaggtgtacttgatgccaggagggtaagaccagcctggggaagaaagtgaggccttgtctctacaggggaaaaaaaaaaaaaaaatttgttttttaattagctgagtaaggtgggacaggcctgtagtccctgctactaactgagccactgcattctaacctgggtgacaagcgagtctgtcttgaaaaaaatactaaaaataaaaataaataataaaagtgacaattcttatctaaacaagaatgcactatatgtctaaaactaactaaaaaaaagtagtatgagcattttattcagaaacttggaattaaaagcagatggggggctgggcgtggtggctcacgcctgtaatcccagcacttcaggaggccgagacagacagatcactggaggtcgggagttcgagaccagcctcaccaacatggagaaaccccgtctgtactaaaaatataaaactagttgggcgtggtggcacatgtgtgtaatcccagctactcaggaggctgaggcaggagaatcgcttgaacctaggaggcggaggatgcagtgagccaagagagtgccactgcactccagcctgggcaacaagagcgaaactcc

SEQ ID NO: 218954 - DNA, 628 bp, Homo sapiens
aaggttaacatcagtgatgtcatatggatatgtaaactctcatagatatgatgagcaaggcacttcatctctgtgatattcttcccttaaatccataactttggtctaatcatgagaaaaacagcagacaaattcagattgtgaaacattctacaagacacctacaatatccctccagactttcaaggccatgaaaaacacagaaagactaagaaaatatcacaaagcaaaggaaactgggaagacatcatatctaaatgcatggtggcaccctgcattggaccctggaacagaaggaggaccttaatggaaaaactggtgaaatccaaataaagtctggaatttagttggtggcaatgtatgaatattggttccatagtgttgacaaatatgctgcagaaatgtaaaatgttaaccatggggaaaattagctgaggagtgtaaagtcttattatctttgcaacttttctgtgaaactaaaattatttctaaataattttacatacaaagtttgaaatgcaataagtgattcaaatacttatttgaatggctctgtgattttaaaatattttaaagtatacaaatagatacatataaatccattaaacaatttgaagttcttgctaaa

SEQ ID NO: 218955 - DNA, 486 bp, Homo sapiens
ttttgagatggaatttcgctcttgttaccccaggctggagtgcagtggcacaatcttgagtcaccacaacctccacctcccaggttcaagcaattcttcctcctcgaggagcctcccaagtagctgggattacaggcatgcgccaccacgcgcggctgattttgtatttttagtagagacggggtttctccgtattggtcaggctcatctcgaacccccgacctcaggtgatccacccacctcggcctcccaaagtgatgggattacaggcgtgagccaccgtgcgtggcctgtctgctctcctttatctaaaagaccttccatctaaatacaaagatctttttagaagcttgagatggaaaagaactaaagcttgttcattaggactaagaggattagtattgttttacggatgtgtataaagcctcattgtctaatattatttgacatgctttcctgccaatatcacgcaccagttaatttttt

SEQ ID NO: 218956 - DNA, 704 bp, Homo sapiens
tcctaatatccccttgtcatattccctgccaccctctttagggtcatcaacattcacactggtggctcttacaacataataatctaaattgtcctctatgtcttcaagtcccaaactctccgtctccattctacctacccagaaaaccatacttagagcaggggtcaaaaactcatgtctataggagactgataggtagcaaaagtaagtaaaatggccaagtgggggctgcagtaacctagagagtacctagaaaaggggcagctgttattcagctctagccaactgttgccatgggtagattaaggcagattctctgatttttttttaagacactggaaataaggatttttaagtagaatctcccaatttctaaatgctaggaacaaattcacaattgacaaacacatggtacagcaatcatcattgctgattgtattttgctgggaatgcaaaatacaaaaacctctttgggggaatctgaccagatctagaaaaattgtagatgcacttgccctttgacctaggaatcccacttctaggaatatgtcccaaaattacagcagcaaaatgtgaaatactctgtgcacaaggttattcatcacggcaacattattttaaatggctaaatactggaaacaacgtaaatattcatcacagagactgactaaaaagctatagatactgcagtagtcctgcatagc

SEQ ID NO: 218957 - DNA, 649 bp, Homo sapiens
ctgaggcaggagaatcgcttgaaccgggaggcggaggttgcagtgagccaagatcgtgccactgcactccagcctgggtgacagagcgagaccctgtttaaaaaaaaaaatttttaaagaacgtgcgccctggaacaagtgtttttgcttgaatcctggctctcccatttctcagcggtgctgcctcatctgtaacatggagacctatcagtatccacaccacagtggctgtaagcatcacctggactgagacacggagagaactgggaacagcatcagtcaccaggagccagtgcatgctcgttcagtgttagctgatattattattcaggaaaaggggaacgagacctctgggaatggtgatcatggtgaaaataagttgctgcttttgttcggccttttcccatcttgaggagacagctgtgttaaccacgcctttttattttctgtatttctgatgctttgacatcttggagcattcctgatcctgagggactgcccctcccagggttagctaattcctagagatggtaaatggcttgagcatgcctttcgtgtgcaaaccaccctctccactgggctctcacaccctgggccattctgcacctgtcctcattgccccagggccaagtaccagatgactaaggac

SEQ ID NO: 218958 - DNA, 211 bp, Homo sapiens
atggatatcagggattaatcagatatataattataaatattttcccccattctatgggttgtcttttcactgtcttgatagagtctttccatgcttttaattttgaagaagcccaatttattatttttcttttgtcacttatccttttggtgtcatatctaagaatccataagaatccactgccaaatccaagctcatgaagatttattgg

SEQ ID NO: 218959 - DNA, 231 bp, Homo sapiens
tgtcatgatctggattagttattttaaaaatctacttcgttgaagcatttttttaatgtacaataaatacaccaagtttaattgtactacagttgcataacagttttagaatacgcacagcttgtcaacaccaccacaatcaggatactgaatgtttgcatcaccttaagaaagttctaaatgctgttaggaagtcagtcgcccactcctgcctcctgtctcatgtaacgc

SEQ ID NO: 218960 - DNA, 836 bp, Homo sapiens
catcttcccagaaatatcgtcttttgtctgcaacaactggctggagaaatatttcagaaagatatgtgtctggaacacccaaaggcatacttttcctttctccttggcataggccttgcagcactgaagaaagaccaggtttgcaatggagccttcaacagtcttcatccctatggaactcagggtctcatagggtgacaggagaggagacaaagctaacttgggaagagtctctgtccttcagcttctcccctactgaaacactatatattgggcccacagttcatcacaaaacacacatgctctctttctttctctcacacccacatcttgggaacccaaaaacttgatggcaggtagctctgggtatccttggtctggcattcacccactgggaatctaagctgtcctaaagctcttttcaatcacttctcactgtttccaggcccatgtgggtaggtgttccaggcttcattctttcaggctgatcataaaggcacagtgtgggaaaatcccctactgtgatggccattgctgggaagcaggaaaggctaagggcccactgctgcccaaggctagtatagatgccctctgctccactcatgtcctcaaagactgatatcaggtgcagcagctgctgtctggaatgttatcaaaccaggactgcacaggcactgcattctctgtgtggaagacgtaagaagcaggcgagttgtccaggatgagagttttcctcaggtccctccccagatggctgaggtcattgacatagcagccctggtggaacaaacgtgactcatgggctaggcaaccccagaacacctcacactggtcca

SEQ ID NO: 218961 - DNA, 389 bp, Homo sapiens
agccactatttcctagtgctcttaggcaaatcatttagactctctgagcctgtctcctaatctaaaaattgaagataataaaacctacctcattggatttagtgggcatgtaagtttctgggtgaatttataaagttgtagcacattatacaaataatacttttttaaaaaggacatatggccccatgttcccactctgaaactagtagcccaggatgggctctgctacaaatcagctacagtaaagcttcagggatgggttttctcagttatgaatgccaagcaagcagaggggaaaaactcaggtgaccttgacacttcctcttagaaattcattttgtggctcccagagaagaaaagattttgacagggaacagtctatccttaaa

SEQ ID NO: 218962 - DNA, 416 bp, Homo sapiens
agtgcccagggttttactgggggctggtgaaatgcatacccaaatccagattcccagaaggaaagcagatattctgcatagactgtgtcgtctgtacaaacagtttaggcacagtgagccattctttctttttctgttggtttgtatctttttatttcataaattgtttttacaactccctatggttatgaccacctaatgccaaagtaaaaattttgaattgccagatttttatgaactgtcagaacagtatgtaaaactatactttaaaataaaactataaaataaaaaaattaaaaatattaaaaaaattaaaaataactataaaaggttgagggtcaccaatcattctaaagaatagagacaaaaggagaagcatattgttgtttatttaatataatcataaaagttctgta

SEQ ID NO: 218963 - DNA, 444 bp, Homo sapiens
gcggccgcgtctgcacctcctccctgcgcgccgcctgacagcctgggagagaagcgccctcagagagacatgttgggccgcggttctcttcatccacccatccctccgttcatgacatattgctccattatcttcttgggctggctgctagggaaaccccaggacattacaatccataggcagaagaggcccatagatgactgtcctctggaatcttccaaaagagtctgggaagcttctccagagactagggacaccaaaggattggaagacacgagtgaagacagatccaaggtgaccctctttacgggtgagaaagcagaggcatggagaggatccacactttgcccaaggtcacaggttggatacagcagagctggataggagtctcggttacctggcaaggagaacaagggcttcatagatccatcaccgtctagagca

SEQ ID NO: 218964 - DNA, 366 bp, Homo sapiens
gtatgcatgtttgtgtgcatgtgcatgcatgtttgtagagatggtatgttttcttctttaaaaaagatgacttggcctggcacaatggctcacacatgtaatcccagcactttgggaggctgagacaggtggatcacctgaggtcaggagtttgagaccagtctggctaacatggtgaaactccatctttactaaaaatacaaaaaattagccaggcatagtcgcacgtgcctgtagtccaagctactcagaagactgaggcaggagaattggttgaacccgggaggcagaggttgtggtgagccaagattgcaccattgcactccagcctggagacagagtgagactccgtctcaaaaaaaaaaa

SEQ ID NO: 218965 - DNA, 462 bp, Homo sapiens
acaaagcaacatgcagccaacctgaaagagctcccagtggccaaagctggaaaactttgaacaacaaaattaataaaaatactactgagttataacccaaagaaaaaagtaaatatcagtgagtttatactgataaaaataaatggttacatacataaataattgaaggagaagtgaaaaaaatcttccttgtggaagatttccaaatagtaaacataaaagaaatgagggaaatggaagacaccacttgatgtggtttggctgtgtccccactcaaatcttgtcttgaattgtagctcccataatccccacctgacctgggaggtacccagtgggaggtaattgaataatggctctgattttttcccatgctgttctggtgatggtgaatagatctcatgagatctgatggtttataaagggcagttcccctccacatgctctcttgcttaccaccataca

SEQ ID NO: 218966 - DNA, 269 bp, Homo sapiens
tgaattggtttgaagttttccttcttttcactatcttatagcttaattggtaatgagcagcaaattttaaaagattaaaaattacgggggggaagggaagaggaaagttagtgccctagatagagtgaaaaaaattacaaaagaacaaagtaattattcacaagatgggaaaaagatataaatgaattgaattatgagtcagacagaaaagaccacacacatatatacccacatgcatgaacatacacaaacacaaatacacatgcaca

SEQ ID NO: 218967 - DNA, 224 bp, Homo sapiens
ggattgcttgggcccaagaattcgaggctacagtgacccatgatcgcaccactgcactcctgtctgggcgacagagtgagaccctgtctcaaaaaaataaccaacttggccaacatagtgaaacccgtctctactaaaaatacaaaaattagctgggcatggtgttgggcgcttgtaatcccagctactccggaggctgaggtaggagaatcacttgaaccccg

SEQ ID NO: 218968 - DNA, 782 bp, Homo sapiens
aatagtaaagaaaaagatatataaaatcttacagaaactggaactcagtcctaatgcaacttcatttctatttgataaaggcaatagctgtccaatctggaacttatttcttacaggtaaggggggctactgtatagaattcaaaagcagggaaaatatgttgtcagagttaagatagagattgtatttggggtaatgagcgttgcaggacatgagtagggcacatagcgtgttggtattgttttacgtggttttaagatatacttcatctaggcacttgttacatgttatatttttaatgaatgtgtttagttgtatgcttatgatttgtgcacattactataaattatattttagtaaaaggtgcccttactggcatttatatacaagaaatcaacacatctgacaagaagctcttgctgctaaagagcctctgtgctcctggatcatgccagagggagcacagaagctgcacaccgttcaagcccatttttgaaaagttgttgtagcagccatagcagcaaattcccaaaatatcttgaagaaattgaaaacaagatattttttgaatgagcgtaaactcttgggaatgaattttaatttgagattaaaattgctgttgtctttacttacctaacattcatttcctctgagagccaactccttcctttcaataaattcttattttctatcataatattgctttgtaccgcacaaaatacaattataatttttaatagtcaaagaaattttaagttatcaaacattagtttctttcgtaa

SEQ ID NO: 218969 - DNA, 564 bp, Homo sapiens
gtgcggtccaggctcaccctgtgcctttgctggctgttaactcagagggaagcccgttggctgcttttgctgttgggtttggatggtctgtatcactttaggcagtagcaagttcatcaccttccacctcattgtctgcagtgaggtttacacagtcatttaaatctgacaggaagggaattgctttgcctcagtttacctccctggacacagaggtttgactgaactttcccattcatgagctcgtgtcctcacctatttctgaggctgctctttcatggctggattactttttttttttggttaagacggagtttcactacattgcccaggctggactcgaactcctgtgctcaagggatcctcctgccttggcctcgcgaagtgctaggtttacaggtgacagtcactgctctggcttagtgggttcctttaggcctggagctctgagaatgcaaattggcctctgggaaaggctcagtctctggaggcttgaggatttttctaagctgctcagatactcagagcatctgctctttccaagatgtacttggcaagaagaga

SEQ ID NO: 218970 - DNA, 924 bp, Homo sapiens
taggattgatttattctaacctctcttactaaataaatgcttgtattcagagtctgtttggaatttaacccaatgcttagaactccttaaatatacagaaatatattttaggggtaattgattcatggaactctcctactttggagcacaattgtattataattgtccggaaactggccagataatgtagaacgcacaagttgttgagaagcccttttgtttcctgatagttacatgtaattccagcagtatttggaaataatttgctaagatgttagaatgtaacatttgaagactcgttagaaaaatcaataaaattatctttggctaatgggtagtacacatcttagtctgtttaatatgcctttccaaaaaaaactgtgtctgttgagaattggtgtatataactagatgactttaataattagtgcctgagtctagaattgagatgtttagtcgtaaaaaaaaatattgttcgataaacagcgttgacttgtcttgtaccacttaagagtttgtgagtgctttaaataaaattagttgattaagtatttttttcctatgattgacatgcttagttttgcctttttattgaaatgtgtaaaatttggttttctggcatcttaacaaattaggtggtaaatgaatgacaatggattttctattatttttcagtattgtgatcagtataagtatataagagaatttagtaaccttttagaagaataaagtgcccttcccaaatagtcctacagcttttggaaaagtgtaaattgtagtttgtagttctaaataaatagagaagagtcgcagccacgtgctagggccagctgacttcattgctgacaggtatgaagccaaatggcttatgtagttatggaatatgtacatgagctattaataaatattatccatgttgtttct

SEQ ID NO: 218971 - DNA, 505 bp, Homo sapiens
aggttccgcaggtccacaactgcatgtggcctgtagcccccattctccacatttggaggggtgtgggtggcagaccagggctttgaagcggacctgcagatttccctcaaatccagctaaggcctgcgctggaagcagaaactgagttctcttggcctgccgcgaggaaacccgcgtcctgcccccacccaaggaaatttgcagtgactttggagcccagactgaggaagcggaggtggcgaaaggagagacaatacgagcccgaagtacaattaaggggccagagccgctcgtctctcccccgccctccctgcccgactgcgagctgtctggcctcaaacctcagggcgacacgcgaacctggagccggaaactcagcccgtggcagagggagtcagaggactctgcatccagaaaacagaagcaaagcgcccttccaacttggggacgccttaaccagcccctctcagttgcagataacccaatgaatgaaagtgcaaattca

SEQ ID NO: 218972 - DNA, 1055 bp, Homo sapiens
aggttccgcaggtccacaactgcatgtggcctgtagcccccattctccacatttggaggggtgtgggtggcagaccagggctttgaagcggacctgcagatttccctcaaatccagctaaggcctgcgctggaagcagaaactgagttctcttggcctgccgcgaggaaacccgcgtcctgcccccacccaaggtgggtatctgggatccctacacaccaggagtcaggtcccgaggcccagcaggagtgaaatccccagggcctgtgaacgtggctctctcaaagccacggcctgccgggcctgcattcccgccggcgcccccgccctgacgctccgcagcaagcggggctatttccggctcccccaacgcggtctggttttccagcctgggagtggctggagggggagccgccccagagctagagccgctccctgccctgcccggagccccagtggccctgcatgctgcctctcgtccacctgcatctctcttgctgtcgcgtgtactcgtgtctgcaatcggcaccatctcgcccgctgcccctctcgcggacgccacacgcacctgcacgcgcccccgcgccgcgctggcctgcaacacggccgcaccaccacctccgccgtcccccccctccccccctcccgcgcccccccacccccccctcgctcctcctcgcccctccccacaccacttcgcccctacccccgcaccgtcgccccggcccctaccaccaccccccgcaccacacctcgcaccccaccccgacccccacgcccccagcccccctccacacccgccccaccccagccctacgaccacccaccacgcacacccacaccacccccacccgcaccactcacaacacacatccacacccccctaccaccacaccacccccactcaccaaacacaccacacacacaccagcacccacaccaccccactccccccaccccactcacaccccacatcctccaacacacacaccaccaacccctccgcccccctccccacaccacaccctccacccaccccaccaccacaccccaccg

SEQ ID NO: 218973 - DNA, 467 bp, Homo sapiens
aaaaaaaaaaaaaaaaagtctaaaaggctattctccagaatgttatagagtaattatacttgggtgctgaacttataggttatgttattttctttgtgccctagtccttctaattctgaaacagcaacatgatacttttgtaactagaaaacatcttatttcttgaaaaggaaatttaaaaattgtgatgcctggtttgtccttaccttttgaaaccacctccttctgtttctttgacttagagagctcagagtcctgctatgctagtagcatctctttgtcatgggcagcagtgcactgaacccccctgcagagtcaggctcatttgcaagtgacaggagattcttgactgcccacatcattaagaactagtataatcagaatgctctaatgattagcctaactgtcttgtcagtctttgtatgattcactccactagtcctctattgtaaaacttcttttcattt

SEQ ID NO: 218974 - DNA, 618 bp, Homo sapiens
tgtttggtgcgtggcttcaggcatagcaggcccttgaggccttcagtcagctgccagccgagccagctccctgggatgcgctgccggggctctccgtgaggagcgttcaccctgcttggagccagagccacagcggcgtgtgctccacagcgtcagggtcacgctgggccagccgcgtgcccagggcccggaaacctctgcgctcacccaagggtctgggtaccgccacttggtgggggctggcgtggcaccacctgtcgggccatagagaggtcaaaagttctgcttctgcaggtctaagcaaatactaatgacagtaataacagcaacaacatccaaaacactaaacacttttaaatatcaaaatacattcatcataacttctttttttttttaatttatttatttatttttattgatcattcttgggtgtttctcgcagagggggatttggcagggtcacaggacaatagtggagggaaggtcagcagataaacaagtgaacaaaggtctctggttttcctaggcagaggaccctgcggccttccgcagtgtttgtgtccctgggtacttgagattagggagtggtgatgactcttaacgagcatgctgccttca

SEQ ID NO: 218975 - DNA, 331 bp, Homo sapiens
gaatttccttttaaattttatcattaagtatcgtttctttctggtcagaactgccagcctcacctttaacgggatcagattggttccatcagtgggtcttgatgttaggaaaaaagtagagcatgtacaagttcaaaagtacagaaaccttacaggggcttttcttgtttttcctgttatgtgaggtctgtgaattgcaccctcaagcagctcctttattgaaaatgcagtttcagccgggtgggtgtcgagcatccgtagccccagcttcctgggaggctgaggcgggtcgttcgagtccaactgggcagcaaagcaagaccccgtctca

SEQ ID NO: 218976 - DNA, 1136 bp, Homo sapiens
  misc_feature (716)..(716): n is a, c, g, or t
gaggatttggaagacccagagcgggatgaaacgggacagagccctgaaggggcagggatgggggaaggcggaggagtttctactgaggccagggctccacgctcgcgcccgccatgccggagcagttcagcgtcgccgagttcctggccgtcaccgcggaggacctcagctccccggctggggccgccgccttcgccgccaagatgccccggtaccgaggggcggcgctggcgcgggaggagatcttggaaggagaccaagccatcctgcagagaataaagaaggctgtgcgggcaatccatagctccggccttggccatgtggagaatgaagagcagtaccgagaggccgtggaatccttaggcaacagccacctgtcccagaacagccatgagctgtccacaggcttcctaaacttggccgtgttcacccgcgaggttgctgcgctcttcaagaacctgattcagaacttgaacaacattgtctctttccccctggacagtctgatgaaggggcagctgagggacggtcgacaggattccaaaaaacagctggagaaggcatggaaggactatgaagccaaaatggccaagctggagaaggagcgcgatcgggccagggtgacaggagggatcccttgtgaaccgtggggatcccaagcaagcccaaccaagtctgaacgagggctccgagagccccaggaactccagaccagnctgacatcgggaacacccttcggagatgtactcccgcaggatccggtccgagacgcactcgctcccaatccggaggggggggggcgcgggagccatgtgagatggtcctctcagacaggaaggctcctgggccagagagggaacggggcaggagggcaaacaatgggaggggcaggggccaggagcggagagagcaccacgagacaggtctgggcgacatccatgggcggacacaaaccatcggggggagcacattgagcccatgataaggccgcagtgcacacaggaggcgggccaccacaatgcaggcgggcagcatctggccgtggtgacacacatcatcgcactagcagacagaagagtatcaccgaagaacgaacgcaaaagaagggagcagaaaagaaggggccacaacaaccg

SEQ ID NO: 218977 - DNA, 1059 bp, Homo sapiens
ggcggtgaggccggctcagcgcggagcagctcagtgccccccgcgccccgctccggcagctccacgctcgcgcccgccatgccggagcagttcagcgtcgccgagttcctggccgtcaccgcggaggacctcagctccccggctggggccgccgccttcgccgccaagatgccccggtaccgaggggcggcgctggcgcgggaggagatcttggaaggagaccaagccatcctgcagagaataaagaaggctgtgcgggcaatccatagctccggccttggccatgtggagaatgaagagcagtaccgagaggccgtggaatccttaggcaacagccacctgtcccagaacagccatgagctgtccacaggcttcctaaacttggccgtgttcacccgcgaggttgctgcgctcttcaagaacctgattcagaacttgaacaacattgtctctttccccctggacagtctgatgaaggggcagctgagggacggtcgacaggattccaaaaaacagctggagaaggcatggaaggactatgaagccaaaatggccaagctggagaaggagcgcgatcgggccagggtgacaggagggatccctggggaggtggcccaggacatgcagagagagcggcgcatcttccagctgcacatgtgtgagtatctgctcaaagccggggagagccagatgaagcaaggtcctgacttccttcagagcctcatcaagttcttccacgcccagcacaactttttccaagatggctggaaggctgcccagagcctgttccccttcatcgagaagctggcggcctcagtacatgcactccatcaggcccaggaggacgagctacagaagctgacccagctccgggactccctccgagggacactgcagcttgagagcagagaggaacacctgagccggaagaactcaggatgtggctatagcatccaccagcaccaaggcaacaagcagtttgggacggagaaagtgggctttctatacaagaaaagtgacggaattcgaagagtctggcagaaaaggaagtgtggaatc

SEQ ID NO: 218978 - DNA, 918 bp, Homo sapiens
ggcggtgaggccggctcagcgcggagcagctcagtgccccccgcgccccgctccggcagctccacgctcgcgcccgccatgccggagcagttcagcgtcgccgagttcctggccgtcaccgcggaggacctcagctccccggctggggccgccgccttcgccgccaagatgccccgatcttggaaggagaccaagccatcctgcagagaataaagaaggctgtgcgggcaatccatagctccggccttggccatgtggagaatgaagagcagtaccgagaggccgtggaatccttaggcaacagccacctgtcccagaacagccatgagctgtccacaggcttcctaaacttggccgtgttcacccgcgaggttgctgcgctcttcaagaacctgattcagaacttgaacaacattgtctctttccccctggacagtctgatgaaggggcagctgagggacggtcgacaggattccaaaaaacagctggagaaggcatggaaggactatgaagccaaaatggccaagctggagaaggagcgcgatcgggccagggtgacaggagggatccctggggaggtggcccaggacatgcagagagagcggcgcatcttccagctgcacatgtgtgagtatctgctcaaagccggggagagccagatgaagcaaggtcctgacttccttcagagcctcatcaagttcttccacgcccagcacaactttttccaagatggctggaaggctgcccagagcctgttccccttcatcgagaagctggcggcctcagtacatgcactccatcaggcccaggaggacgagctacagaagctgacccagctccgggactccctccgagggacactgcagcttgagagcagagaggtcagcccctgaactatcccaaaaggaatgccctccc

SEQ ID NO: 218979 - DNA, 628 bp, Homo sapiens
tgatacatcccagagatttggtatgttgtatctggttttcatttatttcaaataatattttgatttctgccttaatttcattcttttcccaaaaatcattcaggagcaaattgtttaatttccaggtaattttgtcattttgggagatcttcttggtactgatttctatttgtattccactacggtctgagagtatgttcatatgatttcagcttttttgaatttattaagacttttttgtggtctgtctttgagcatgttcggggtgtagatgaggagaatgtgtaggctgcgattgatgggttgagcgctctgtagatgtttgttaggtccaattggtcaagtatccaacttaagtttaaagtttcttggttagttttctaacctaacctcaatgatctgtctaatactgtcaatgggatgttaaagtctcccactattactgagtagctatctaagtattttcctaagtctagaagtagttgttttatgaatctgggtgctccaatgttgggtgcttatatatttaggatagtgaagtcttcttgctgaattgaacccttcatcattatgtaatgcccttctttttcctttttcctgtgttcatttaaagtctgttttatctgat

SEQ ID NO: 218980 - DNA, 565 bp, Homo sapiens
tgatacatcccagagatttggtatgttgtatctggttttcatttatttcaaataatattttgatttctgccttaatttcattcttttcccaaaaatcattcaggagcaaattgtttaatttccaggtaattttgtcattttgggagatcttcttggtactgatttctatttgtattccactacggtctgagagtatgttcatatgatttcagcttttttgaatttattaagacttttttgtggtctgtctttgagcatgttcggggtgtagatgaggagaatgtgtaggctgcgattgatgggttgagcgctctgtagatgtttgttaggtccaattggtcaagtatccaacttaagtttaaagtttcttggttagttttcttttattgtgatgtcctttttgggttttggtatcagagtaggcctggcctcacagaatgagttggggagtgctccatcttcttttattttttggaagagcttgtgaaggattggcattaaattcttcattaaccctttggtagcgttcaccagtgaagtcatctggtcctcaacttttctctgt

SEQ ID NO: 218981 - DNA, 847 bp, Homo sapiens
tggaatttggacgatgtcgcgtgccatgtcaagcattccaatgttgagactaatacagaatcttgttcatgtggggagacctctgagaccctgagttgcattagcatggcactactgtcatctccaagcccgtcagagaacagcgcccgtccagtgcagacatttgaagctaggcgaggcgggttacacagcctggggagtctttgtacttttcaatattctccaagggaagtctagacaggcttcacattttgttaagtacagctaggttctgtccacaataaaacagaactaggacaactgttttggaaacatagttagcacataattgtagctaatttagtttttttctctgaagcagcatgaaaagaaatttgtttttgtacaaaagatgtttttatcttctatagcccacaattcccaacaacagagtgtcctctctccttccctctgctgcaaatatatgcacctacataacacccacatggcacgtttttttctagcctaagccactatctacccctgctgttctctttttggggatttcttcaagcatatttacaaaacacttgctgagcccaactgccgcctcactgctgtatcctagttacatgagccatcagttccccaaacgcttgctttcacctgtctgttgggaaaccacctaagcctatacgaggaagaaaaatcattcagaacaaatgttggcttgaatactcatgtcgttttcttaactgcttgatacaggctttcaccgagatttggtgggaatcaaaagtacatctttaaaagaatcctggcctttaccttacactatatataaataaactcaaatagatcaaagacc

SEQ ID NO: 218982 - DNA, 1127 bp, Homo sapiens
caaatattaatgtcttttggcaacaccctcacacacacacccaagaccagtactttgcatctttcaatccaatcaagttgacactcagtattaagcatcataatggtttttattttgattatacttaagatgccgtaaacttcgatatggtcaacagcagtatcttccaaaccagtatccttatttccattccaatctgagcaagacttgaaagccagaaaaatctgaagtgcatctccaatctgttatttagcagataattttaaacatctgctgtgtgccagacacctctttaagtacaggggatttagttgtgaacaagacagaagacagagtccttgctctttagagggagttcacagtctagatgagaagtcaaactttgaacaataaatttcagcttcagagtcttaatgacattaagttcagatgctttgcagcccttgaataataagtttcatctaaaggactcatctcctggcctgcatacccatttcagatgttgttagggagaggcttcagaagaggctttctagagcaggtgacatttaagcccaaggcttgaaagaataagagtcagaatagggtacagtatgtacaaggaaactctgaatagggtacagtatgtacaaggaaactctcagttggaaaactgacataaatcccattaagggggagagtggaaaaagatgactggagagagaagttgaggtcagatcaggcagactttctaggccttcttaaggatgttatagcaagacagtgggaatccattgaaaggtggtcttacaggatcactataaggggatagaggggatgcacatactaccctaggatctgatattcatattataaccaatctgggacagtgcccctggagttgtgcagtgccagaataatctggagtacagccatctgtactcccactggaacatggaggagtagactaaacaggactttgcatgtatatggtgaagatcagtggaataaaaaatggtacctggctgggcactgtggcttacacttgtaatcctagcactttggaaggctgaggcgggaggatcacttgaggccaggagcacaagaccagcctgggcaatatagcaagaccccatctctaaaaacga

SEQ ID NO: 218983 - DNA, 440 bp, Homo sapiens
agaacagggccctgctctcagcaccaggggcatctttgtcctggggccatcctgtgtggttagggtattgagccgcaccccggcctccaccctccaggtgcccgtggcacctctgccccaagtcatgacaaccaaacatgtctccagacactgccagtgtcccctgaggggtaaaattgcccctggttgaaaacgaccactttagaattgacatttactaacccatcaccgtcaaatctaaggttgaaaggtgtgtgcataaacacagggaccgaaattctcaacaaatgccgtaagttggcaaaatcacaggtagttgaaattcctaattatatctttattaccagtggagagaagctcccctaggaagtgtcagatcccacggggacgcctcacagtttctcattattgatcacgatctacgtaaccagagctctgtt

SEQ ID NO: 218984 - DNA, 150 bp, Homo sapiens
tgggaaatactgcaatatactgcaagtgtcctttctctttacgtgaattgaatttgtattttattgtttctttttccaggtctagccttagaaattttataatatggccaggcgcagtgtctcacgcctgtaatcccagcactttggcag

SEQ ID NO: 218985 - DNA, 514 bp, Homo sapiens
agtaccaagacgctgatgtagatcctcttcttggtgctcgactgtcccaacttgaagctgaagaagctgctttggatgcataggtcattggccataacagtgtttgccccagtgttgtcttatttcatcattaccagcatcgccaaaaccttaagtgttgactctttgatcacaggcccaagaggcctttacctttcttggcctgtggagtaaatagacaatatattatgaaaggacttgtatgtaccctttctgtttacaatgagatgtttaggtttcttaattttgaacaaattcaatttaccaaatattccagaacacttgatttcttctttttctttgatttgtttcttatctattcattgtctgtgtcttacttttttcatagtaagattgttcttgaaaaatgaaacttctaggctttctaaaaggctggagtgcctttttagaagaagtcaacagctaatagatttgttcttatcattgaaatttcaaaagttataccaaccctcca

SEQ ID NO: 218986 - DNA, 208 bp, Homo sapiens
tttgtataatcagcatgaattagctttcttagcatttcattatgcccggttaaactgaccactgagtccatcagagccaaatgcatgtctaagatgatactgtctctaccacatacagaatccccataaaatgtttagggtgcagacgaccatggcacccaagcaattccaggacaagcatgtatatgcagaacagaatgtgacattc

SEQ ID NO: 218987 - DNA, 344 bp, Homo sapiens
aacaatcaaaaaggcaaagaaactcttgggtactttatgcttctcactacttactcttgaggaagaaaaaaaggtcaaaagcagcttttctttaccaatgaagaagttgttgtcaatattttgtaagcaattcagatcattgcaatatttcttgtattcctattcggtgcttagcactatgctaagtattagggattatataagatttttatagtatttaggaagacaagattagttatttcataaaacttggtcttgggttcccaaatcctttcgagttctgtttattcctcagcaagtaaataaaaatgtcaatttctttggcactgaatctaaatagcaga

SEQ ID NO: 218988 - DNA, 534 bp, Homo sapiens
cagtggctcacacctgtaatcccagcactttgggaggctgaggcgggtggatggatcacgaggtcaggagatcgagaccatcctggctaacacggtaaaaccccatctctactaaaaaatataaaaacattagtcgggcgtggtggccggtgcctgtagtcccaactactcgggaggctgaggcaggagaatggcatgaacccgggaggtggagcttgcagtgagctgagatcgtgccactgcagtccagcctgggcaacagagcaagactctgtctcaaaaaaaaaaaaaaaaattaggatgacatcttagaaacaacataattgagaagagcatgaaacaatgcttttgaggtactgaaagacaaaacctatcaacttaaattctatatgtagcaaaaatacctttcaaagatgacggcaaaaaaaatacattcagacatacaaaagctgaattaattcattgcccaatagactcacaatgcaaaaaatgttaaagaaagttcttcaggcagaaagaaaatgctaccttata

SEQ ID NO: 218989 - DNA, 625 bp, Homo sapiens
gaacaggttgggagttggatgatccacattctgttaagtttgacgtgcttgggagagatgttatctagagttttacatttcaaagtcttcagtctctggatggcatttaaatctttgggactgggtgaggtcagctaattattgaatttagatagaaaagataggagtgctagagaccaggcctacctgactccaagccctggggcccaacatttggaggttgggtagaggaggaaggtagaagcagttcagggcctcttgtgtttgtatcgtaccttcatacacgtaagggttaataaatatcttttaaaataatgctaagtgccaggtgctgagagatgagagcactcttcagggaccacctcctcctgcgaagtgcatggatgcccaccaccctcactgctttgggtcaggcagcctccgtctagactctcatgtccttctgtgtcagctggttgacttgaatattgatcaagagtcagttttgtttgtagcaaaccctgttttggtcagtaggacttgttgtaattgcgtaattaaaatgttatgttatctgattaaatcagtattatttttctacaaaaatatgttaaatactttggaaagcttccaaaggcaagcctca

SEQ ID NO: 218990 - DNA, 800 bp, Homo sapiens
tcaaggtcctgaaagccaaataaatagtatttcaagaattaaactctgaatcatcaatttaatgattagaagaaaatgagtatggtttgttagacctaagattacatgaaagaagaaataagagcactgcatttatctgattgtggtaggcagaaaaatggtcctgcaaagatgtccatgtccttccccgaacctgttcttccctgaataaaagggactgtgtagatatgattacgctacaaatcttgaaatggggagattatcctggattatctgctgggctcaatgtaattacaaggatgcttgtaagtgaaagaggtaggcaggagatttgaaggagatgtgatggaagaagaagagtcagagtgatcgttatgcagaatactcagctggtcaccactggatttgtgggcagcttctagcagctgctgaaggcaaggtaacagattctttcctagagcatccagaaaggagtgcagttctggaataggacactgatggaaaagcatgttccccacttagataatcctggccgttcttttaatgtggttggttaagatttttaaaacattcgtggagtttgtctgaaagaacaactaaattagacagcaatgtgtttaagcatatgtttatcagttcatttaaaagacataatagtggtggtgaactgaatcacaatttcctcccaaaggtttgtttcttttgctgttttttaatgtgaagctacacttcccaacactcttgcaactttgttaaaaatgaaccttgaaaggtgcctatataatttcatagtagtaaaa

SEQ ID NO: 218991 - DNA, 354 bp, Homo sapiens
tagtctcgaactcccgacgttgggtgatccacccaccttggcctcccaaagtgctgggattacaagcgtgggctaccgcatctggctgagtactataattattaatgatgatagagaaagcgttgtaaaagtacaagtgagggccacagctttgtctatttctgcaaatccgcagaaaatatcttctacagttagcctaccttgtgtttggaggatagtttctgcggtctctgtctacattttcaagtttaaatgtatcctcaccttagttaccttcagagagtgggggtatgcttaattacccctggagttggggtttgggggaaccacagcaacagggctctttaccagcag

SEQ ID NO: 218992 - DNA, 484 bp, Homo sapiens
cgtgcgccctgttgtaggtcagtgaaaggactttaggttttactctagggttaaaagtccctaaagggttttgagtagaagcttgacatagtttgattaaaaaaatttgttttttctagttgtttggttgagaatagactgaagtggggcaaaggcagaagcagagagaccagataggaagctgctcccaataaggctggtgagagggtggcttggatctggtgtaggtgtggtgctcgggcccgagagatgcagtgagtcagtgccgaggccatgtcgggggacagactgccttgctttcagtggagcttggttctggatctgggacaaaagtggtgggaagatcccagctcaattttgaaggtagaacagattggacgtgacgtggtgcacgagagaaagaaaggcaaaagagatgaacctaaggtttctgattaaatgttagacattgtgtaggaaaaaaatcacatagaggctctggcaa

SEQ ID NO: 218993 - DNA, 601 bp, Homo sapiens
atatgtgaatatcctcaaaggaagaataaataacatagcaaggggaaagccagtgattccttgaactttccgttctaatgttcactcactcaaaaaggtatctattgagcaccctattgtgttacagaaactttgccaggataaattgccaaaataaagtaaagctaaaatgaagagtgtctaaaagatacttccaaatcctttgcacatccccaagtatcatttttgagcattttccatctgtcattttgttcatcttattctgtctttcttgatcttctactgtgaaagcagacacaggaacgtgctctgttagtacaggatgaagagaaaattaaaaggcaagaaagatctactgaaagagccttgccccagcaagaaaatgaagaaattcttcccaaggtttctattccaatccctgaggatcacaagtctctcaaaaagtgccacctctactttagtacttttccatctcctcgtattcctttcatgatgtcttttctcgtgatccttgtgttggctgtttggtggttggtctttctgtgatcagaaaacagggtgctcatctgaaatgtcaagaccattgaacttctgtccttgg

SEQ ID NO: 218994 - DNA, 449 bp, Homo sapiens
aaaatgtgtggataggcaccgtgtctggccaagagtcaatatgttaagatgagaagttagtaatagataaaaattgaacttcccagaaaatataaagtaacagatcaatagcagggccaagttagaatcacttgaacccgggaggcggaggttgcagtgagctgaggtcgtgccactgcactccagcctgggcaacaagagtgaaactccatctcaaaaaaaaaaaaaaaaaaaaagagtaaaataagggcaatgggatagtgggtggctgggttgccatggaacttaaaattgggtggtctgaggctgagtgcagtgtctcacacctgtaatctcagcactttgggatgctgaagcaggaggagcgcttcaagccaagagtttcagaccaaccagggcaacaaagcgagtccctgtctctatttaaaaataattttttttgaaaaatt

SEQ ID NO: 218995 - DNA, 968 bp, Homo sapiens
aagtagctgggctggatcagaggcggtcattttgtcctccagctctccctgcagtcccattttacaaagggggaaactgaggccttgaatggggaatatgaacctccctattccaggcccagtcagaattcactttctccttgcggggtcctctttacgcagggatcctgtgggcctttgctttccactagatcaccaaggcctagtgccaggtacacaatttggtgctctgcaaatatctgttgaaagaatatcatcagacacatagtaggtgcgcaataaatatttgttgacttaactatgaacgagtaggggttgtatttatgaacaagacagactcccatcctgcctcctagaacctacgttctagtgggggtagaagggacagaatagggtaaaatgagcaaatatgtaaacaagatccttcagggtttgatcaaagtgatgtataaagaataaaataggccgggcacggtggctcacgcctgtaattccagcactttgggaggctgaggcgggtggatcacctgaggtcaggagttcgagaccagcctggccaacatggtgaaaccctgtctctactaaaaatagaaaaattagccgggcatctgtaatcccagctactccggaggctcaggcaggagaatcacttgaacccgggaggcggaggttgcagtgagctgaggtcgtgccactgcactccagcctgggcaacaagagtgaaactccatctcaaaaaaaaaaaaaaaaaaaaagagtaaaataagggcaatgggatagtgggtggctgggttgccatggaacttaaaattgggtggtctgaggctgagtgcagtgtctcacacctgtaatctcagcactttgggatgctgaagcaggaggagcgcttcaagccaagagtttcagaccaaccagggcaacaaagcgagtccctgtctctatttaaaaataattttttttgaaaaatt

SEQ ID NO: 218996 - DNA, 531 bp, Homo sapiens
ctgtgtaagagttcaataacttttataggaggaatttataaatgggggagagtaggtaaatccttggatatattgtgattaaattggaaatgttcatgttttattatgataaatgtgtttttgatattttagctataagtgaaaagtactattatactattaaaatgtttcaatgtatgagtcataaatgtgggattaattagatgtttttgttagtgatatttgattctactagttaagaggcaaatgtggtttgatttttaacaaatttatgctcagattttactgttgttacttggtaaaaaatatattggaaaactaaaaatggttatgaattgtagaaaatgtttatcataatttatctttctgattaaaatcagtttattttgtatatttcctgtagatttaaattaaacatcttagtactactttacaggaaagtgtttcaactaagaacaacaatattttctctatacaatttgttgttctatagatttaatttctttaaaagatgtaattcttaactttctg

SEQ ID NO: 218997 - DNA, 450 bp, Homo sapiens
tacataaacttacagaatagtggtgaaaatatttctattagagaggcagaatggcttgcttttgtggtttgtagctctgctccctgaagccctaggagttttcacagggctcactctgaggcaactatagagttgaaagacaaaaggatataggaaaaaatggcacagaacttgacaccttgtataagcaataaatgcaaacaacagccataaacaaacagaagcctccccattgacataaagtctaagaaattgtagaaatatgttaattgtccttttgaagatcaattttctcatctacaaaacagggttaatattacctagggtgattttgtggatttttctatatgttcaatgtaaaatacacagttcaatacaggtatctaatagctactgatttcctgtctaggtccccttcatccaagatttaatggctgacttttgatagtg

SEQ ID NO: 218998 - DNA, 347 bp, Homo sapiens
aactttatagcattaagtgcataaattgagaataacgaattagtgaaggaagaattttccaaaacaagttaatgacatagaaaacaggactgacaaagggtgtttcactacagatactacagacattaaaataacaataaaggactgggttccagttccacatgtaaggagtttggaaatcaccattacttcctaacaacaaataacaagctgaacagattgaaaaatcaacactctggatctagatgacacagggcaaactgttgcctccaacactggagagacagacaggtgaaagcagggagttagtcttgccagatcaaagactcatgaggataagaaaacct

SEQ ID NO: 218999 - DNA, 275 bp, Homo sapiens
caccagcctgggcaacatagtgaaaccctatctctacaaaaaatacaaaaattagccaggcatggtggtgcatgcctgaagtcctagctactctggaggcggatgtgggaggattgcttgagccctggaggttgaggctgcagtgagctgtgattgtaccactgcagtccagcctggtgaagagtgcagagaccttatctcatgaaacgaacaaaaaagataacgagcacggtcttctgcagaaatacccaacataagttacatgcattacttaa

SEQ ID NO: 219000 - DNA, 695 bp, Homo sapiens
tcttctatgagtactgcaatggtcattttcaaatctggagttgtaaacagaaactctagaatgagtttcacctatcagattgcaggtgaggccaggaacttcatcttttattcagaaaagctgccatcattaccattattcgtagaataattacaattatttctagaattgactcctgtgagtaaattaggatttgttaacaaaaaccacatccctctcttaactagaacccagcccaatttagcaaattactacagttggtttctaaagagataaagagaatataatactatccaggatggttagaatgctagcattttcttcaaagtatatgtagttgattttaaaaatatgccaattatcttattaattatacacttaaccacattgaatatacatttttatttacaagaaatatatatgtttatttacaaaagctttatcaaaatataattctcatatcatacaatttacccatttaaagtttatatttcagaggtttttagtattttcacaaaattgaaaatcttagaaaattattttgtaaaaatcaaaaagccttgaaagagttacctgattattataagaagtttattttcacagaacactttatttagtacttattttgaattgactcaaatgaaagcttcctttggttaaaacaaacgaaagtacttttggtatttttttaccaa

SEQ ID NO: 219001 - DNA, 570 bp, Homo sapiens
acttgtgatatggtttggctgtgtccccacccaaatctcatcttgaattgtagctcccacaattcccatgtgtggtgggagggaccctgtgggaggtaactgaatcatggaggaggtctttccatcctgttctcgtgagagtgaatcagtctttattagcagcatgagaacagactaatacatcttgtttagtatctgtctttccagagattacatactagaatgtcatctcatgaaggcagcaactttatctaaatcactgcatctccagcacaagaacagcatctgacatgtaaaagacactcaataaatatttgttcaatgaatacatttatgtcacacaatcacacgattaacttccataactgagtaccaataaccaaacagaaaaggcattttgcaatgaaaccctagcagagaaccatgatacactattacttggcaatgacttctaattggattccctaactactagaaacttctaggcacctgctgtccacagactcagaagttgtagctcagattatgtacctagaggaaaataacagagcatgcttctttgggccagtc

SEQ ID NO: 219002 - DNA, 246 bp, Homo sapiens
tccggatccaggaaagattaactcacagaaaaagagactaaaatcttataccttcaaagaagttttgacagaaaaatgttactgcaggccaccatgtattctttctgagagttgctatctgtgagatttctgcaataacaagtctgcttttgctcaccatgcctttcctcctctctccctcccatatcctatctttcccctattccttctgtaacctcaagatggtacaaaaacttcagctatctg

SEQ ID NO: 219003 - DNA, 443 bp, Homo sapiens
ttactggtgagaatgtaaaatggtgtagccactttggaaatgttaactagagttgccatatgacccaactattccaccttaggtacacacccaagataactgaaaatatatattatacaaaaatttgtacacaaatgttcatagcaacattatttataatagcccaaagtggaaacaattcaaatgtccctcagctaatacatggacaagcaaatatttatcctgataatgaaatattactcagccatgaaaaggaatgaagttctgatacatgctgcaacatggatgaaacctgaaagtattatactaagagaaagaagccagatgcaaaaggccacatactgtatggtttcatttatgtgaaattatttatcagaatagtcaaatctataggaagaagacaagtggttttcagggaccaggatgaagagcacatgggcagt

SEQ ID NO: 219004 - DNA, 498 bp, Homo sapiens
tgagatgtgggtagggacacacagccaaaccatattagtcatttacatacttctgaccaaaaaccaaatctctggcctttgacctaaaacatgcgtctcagagaaagcagcctgagcctaaatcctcatgtttctctcactgttgcagctagtgtcattaaggcaggttagaccaccctgctgtagggagggtcacaacagaaaaagagtgaatcaaacgggcagagcataccatttgaaacatggtttgctcctgagaaagaagaggggacagtaagtaatggaaagagacactaatgaaaatatttttgtatctaatatctaatcaaagtattgccaagtcagcctataagggcaacggcaggagaaattcagaacataggtatataccacacacagaccagcaatataggaatgcttggtataggtgctacttcacaagctaggaatgtaaggcccatccccacaaaatttgtctccaaattctggtttactcca

SEQ ID NO: 219005 - DNA, 437 bp, Homo sapiens
tcagtttactgaagaattcaaaaggactgaaaggaaaagaaactataggtctgatatggtttggctgtgtccctacccaaatctcatcttgaattgtagctcccataatccccatgtgttgtggcggggagataactgaatcatggagatggtttccacatactgttctgtgatagtgaataagtctcacaagatctgatggtttaataaggggtttccccttttgcttggccctcgttctcttgtctgccaccatccatggaagacatacttacctggcaggggagatgccatgatcacgaaggtggttttcccagggcgaggcttatccattgcactccggatgtgctgacccctgcgatttccccaaatgtgggaaactcgactgcataatttgtggtagcgtcgacgcggccgcgaatttagtagtagtaggc

SEQ ID NO: 219006 - DNA, 325 bp, Homo sapiens
gatgttgtgaggagcaggtctggagttctggagcctctgctggggcaggctatggctcactgcccgtaaaggctgcagagagggtgcacagatgcagtttcatcggtgaaactccagaaactcgccttgagttgagtgcttgttgaaaagatgggttaaacctttatcttttgtaattcacagactcaagccatctttagaccctttaagagcattcagtgaaaagatgataacagaaagaacagctgatccctcttctgaggcctttagaaaagacttagaactggagactgttctgaagctgtggggattgtggataggaaat

SEQ ID NO: 219007 - DNA, 178 bp, Homo sapiens
gtgtacataggggactttgagaagttccaatatatttctagggatttatgcagttatgtgcaggaatgtgtgtatgttcagagaagacctgaaaagacccaatctctcccttatgactgaccttgaagctctgtgcaatagacagtaaaggtcatttcaaagtgctaagtgactggaa

SEQ ID NO: 219008 - DNA, 435 bp, Homo sapiens
gtttcatcccaaaaccagctcccaccacccctcacctccagtccttggaaaaattatcttccaggaaaccggtttctcatgccaaaaaggttggggactgcagttgtagatgaattctccctgtgtcttcacatcatcttctctctgtacgcgtctgtctctgtgtcaaaatgtcccctttttataaagactcctgttgtatggcattagggcccatcctagtgacctcgttttaatttgattccctctataaataccttgtctcctaataaagtcatgttctcaggttctgattacaaggtgtctttttttgcttgtcacaattctacctataacaaacacctactagtagccaggcactatatgagccactcacaaatggcacagtttctgccctcatggtgcttagtaatctagcaaatataataatcatta

SEQ ID NO: 219009 - DNA, 469 bp, Homo sapiens
ttccgtatctgtaaaatacaaataatatgtacctcatagaagcattatacagataaaagaaaaatgcatagaaaagctgtaaagatcctgagctttaaagtacatccatactcagcaaaaaagaaaacaggaaagaaaaggaacaaatcactaatacctgcatgaaactcaaaagcattatgttaagtgccaggagccaaaaatctgtacatatttcatgatttcatttctgtgacattccagagaaggcaaaactgtggagacagaaatcagatcagtggctgccaggggctgggtgtgaggtgagagactttagacaagggaaatttctcgcagtgatagaaatgttctatattttgatcgtttggtggttacacaactatacatgtttgtcaaaactcagaattgtacacctcacagggtgaatattactgtatgttaattatacatcaataaatcttacttttca

SEQ ID NO: 219010 - DNA, 691 bp, Homo sapiens
cctgtgtttgcctcctgactctttgtatgatcatgaacaacacatttaaattccttaagcctcagtttccctatctgtaaaatagagatgataatagcactgccctgacaggtgtttttaagaaaaattaagataatcatatgataaatttggtgtataccagaactcaatgcatgtttttaatatataatattcacttacttagactaactaaagttttgctttgtaaggttcttttcacaccaaacggaatttgttaatctgtcatgacaatgataactcttggaaattttttgttcttccttctcatggtggttaaattatttcacagtatatcagctatgatccaattccacagttcatactcaggcaaaactgccttctcaaataacaggagtttggtacagaagctacaaaaccagggcaaaggatgttaaattgatacttccaatgtgccttattttgagcctgatactatggaattttgcctgctattacagtacccaattattgcttggaataattttgcatttcctcgcattttacagagcatggcttgactgacaatttgacaatcagatagcctaggctgatgccattgtatctatttaataactttgttaaccaattaacacaagcagacaattcccataataattgagtattaaaaagcacaacaacaaataaacag

SEQ ID NO: 219011 - DNA, 228 bp, Homo sapiens
caatagtttcacttttaaaattggtgtattttccccttccgcatatgtgtatgtacacaaaggaatacaaacaaggacagacctgattgttcctttgttataagtaaagaccatctaattataataaagcacaattaataattgtgtgtaatgagcaaattagagcaataatacaagaaaatgagaggcaattccttgaaatgtttctgtcttatcttttaattgaaa

SEQ ID NO: 219012 - DNA, 473 bp, Homo sapiens
ggtttcattttccatttaccaacttgcaaaattagtaaacttggaaaacatccccatggttaattgagaaacaagaactccaaactacccagagataacaacactcggttagggcagtatttgctcagattggtgtttttttgttgttgttgtttttgtgtttttgagacagggtctctcactctgtcgcccaggctggagtgcagaggcacgatctcatctcactgcaacctccgcctgccaggctaaagcgatcctctcacctcagcctcccacgtagctgaggcgggagaatcccttgaacccaggagacagagattgtggtgagccaagattgcaccaatgcactccagcctgggcagcagagcaagacagtctcaaaaaataatataaaataaacataaaggcagtaacaagcactggggaatacatagaggaactggaatcctggtacatgcattgctgttgagaat

SEQ ID NO: 219013 - DNA, 781 bp, Homo sapiens
tacgtctctgaccagcaggacacattctcgacagagtttctgttttgttgtccagatatttgccttttatcattctttcactcagtatctcatcagggatgaaccatgggaaactatgatctggggcactgattggagtccagctcctggctatgctcttctcccttagattatcagtggaggaagcagccctggctcaaggcgggtacctgaaggtttggtgtccagccagaacccacagggcctggtcaaccttgtcagtcttgtcaaacattttaggctttgtttaaagagcagttgggaagccatggaagtgttttttgaagagggagctgcgatcacattttgcacattgactggttagggcaagacccagagggcatatacgggtataatattcactttgctggtgacattcagagctaagtgaccagaatatcgggagccatttctcccctctcctccatcctcagcctggagaggggccatgtggtgggcatgctctgtggatctacacagaattaaaaataaagttaaaaggtcttgttgattacaggaaacgagtttcttttcttttcttctcttttcttttctttttttgagatggagtttcgctcttgttgtcagggctggagtgcaatgacgtggtatcagctcattgcaacctctgcctcccaggttcaaacgattctcctgcctcagcctcctgagtagctgggattacaggcatgcaccaccatgcccagctaattttgtatttttagtagggatggggcttctc

SEQ ID NO: 219014 - DNA, 403 bp, Homo sapiens
gggtagggatttaggtggaggttagaaaattctctgctattatctcttcaaatatttcctctgtctcatgttctttctcttctctttctgggactctgattagacgtatgttatatgttttcactttgccccactgtcttatcctcttttctctatttcccactcttttttctgtctgggcttcagttcatatatttgctattgacttgttttccagttcacatagcctttctttggctatgtctaattctgcttttaaatacattcctgcattttttattcagctatatttttgagttaaaatttttatttagttattttttatagttcccaattttctgggaacatcttcatttttcatccatttcccccctttcctctatttttcttggaaatggtaatg

SEQ ID NO: 219015 - DNA, 166 bp, Homo sapiens
ctagctttgactcctctgtcacttgtccgctttggcatcacctcctcatagaagacttctatgactcccgagattctcaggagcatggcaggtgaagtgctcctcccatgaatggatggagattagggagtgtgtgttattcatgcttaattcaccagtgcttagc

SEQ ID NO: 219016 - DNA, 213 bp, Homo sapiens
gggtcatgttagtgcaaaatgtagaaaactacagttaatcatctgttgccttctgtcttgcataatgtagaagaacaagcacaagctttggcatcacacagacttggtctagcaagttaattttagtcccagttcctcatctgtaaaataagaatgtgtaccttgtaccttgtatgggcattggattaaaagtaacataaatcccctactaca

SEQ ID NO: 219017 - DNA, 559 bp, Homo sapiens
cgggtcaggcagtgtcaaggtagagtcagggaaaacagttagaaagttattgcagtaatctaggcaggaaatattagcatgctggattagggtagtagcaatggaggtggtaagaaaccaatttctgggtaaatctttaaactatagctagaagaagatatggtaggatctgaattttgtaaattgaggacacctatcaaaaactaatacaaaattagaaatacataattagatacaaaaaagaatgttattcagaataaaaaaaagaaactacaaattttaaattacaaataaaaatcataaaatataattttgaaagctgacaaaatgccacaaacatcataaaatcgtggaaaataacataatagcacacatctataatgcttccttcccccttacattttggtttcatgctctttgacagcctttccatgtgacaaacatcgtgtagtattttctttggagattatagaaaaacaatccagtctttcctctaacatgatttttaatattgatagtttggaaatgcttacaattttcattgatatgccttgcagaa

SEQ ID NO: 219018 - DNA, 464 bp, Homo sapiens
catttaaaagttaagtctttatgctgggtgcagtagctcatgcctgcaatctcagcactttgggaggccaaggcgggcagatcacgaagttaggagcttgagactagcccggccaacatggtgaaaccccatctctactaaaaatacaaaaaattagctgggcgtggtggcacatgcctgtaatctcagctactcaggaggctgaggcaggagaattgcttgaacccaggaggcagaggttgcagtgagcagagatcacaccattgcactccagcctgggcaacagagcaagactccgtctcaaaataaataaataaataaaagttctgtctttacaaaccaaaatgctaaacaaatagcatttttttccaaatgttgaaagtatgtgttgtttgtaaccaataaagccaatttccacaactttatatgttaataaacaagccttaaggtaaggcttttattga

SEQ ID NO: 219019 - DNA, 464 bp, Homo sapiens
cgtttcgagttaatttttgtagtatatggtataaggtaagggtccagcttcattcttttgcctatggatatccagttttcccagcatcgttggttgagaagactgtttccccattgagtggttttgtcagtttggttgaaaatcatttgattttgtatacgagggtttttgtgtgtttcttaaaaaacaaagcaattaaattgattcattttttaactgtagtaaatgtatttttaaaataaacttataatggaaaacctgaatcattatccctaaatagaaggtcacactaaaaataccatggagctaggcagatgtgttcacccgtgcctgtggtcccagctgctcaggaggctgaggcaggagaattgcttgaacccagcaggtggagattgcagtgagccgagatcatgccactgcattccagcctgggtgacggagcgagactctgtccccgactcccc

SEQ ID NO: 219020 - DNA, 521 bp, Homo sapiens
agagagcaacccagaagccaggcctggagaaatctcttctgccccttagagaaggccaacagaggtcagagagtggcccagcagcactgcacaggaaaggctctgagaattaaactgccatttgaaccacagctcatgaaagtaggacaaggcctgcatgaatctcaacaaagtgactggctgttaaaattaaagatttaaataggaattagacttgtcatgtataacggacaaaatatcgaggatacaatctatgatcagtcattataaaaagaaccaagagaatcacaactggagtgaacaatagacaatgttactgatgctaccactgagattaatcagatgttgaaattctctgacaaggattttaaagcagccatcaaaaaatgataaagaaacagtaaaaaaaaaactcttgaaacaaataaaaaatagattagcccagcaaagtaacaggagtaatagaaaagaacaaattgaaagttatagaactgaaaaatacattaagagaaatatagcaa

SEQ ID NO: 219021 - DNA, 535 bp, Homo sapiens
gtgcaattgtgatcagatcatcttcctgcttgactttattaaacccaatgggtgcctaagtcctgtaagtgtatggcctaattaatctctgcccatggaaatcagatggaaagttctgattttctatcctgtgctcctacctgctaacatcattcacttgttaataattattgttttaaaaaaaaaaactcttgtcaatagacgtgtcagatttagacctgtggtttcagaaaaatttttggagcaaatttaaacatgtttggcactataggtaaatttgtatttaaaaaaaaaaacaatgtttgagtgtgcttttggtaatgctgagctttctttaaatggcttgtggagtcgtgaacttttgctaatgatgtggctccaaaaggtaatacatattaacattagactttaactttctgtaaaattggtttacttaaagttgggcggggggtgtgatactgtattagtattgttttaaagtggacactgtaacacgtgtggaaaaacaaataaatatgaaataaagtttaaatga

SEQ ID NO: 219022 - DNA, 195 bp, Homo sapiens
cccctttctccttacacccccaccctcctcccattcatgattaaatcacctcccaccaggcttcaccacccaaatttgggattacaatttcacatgagtttttctagcaaaacacagccaaaccatattattccgaccttgacccttctgaatctcaggttcttctcacagggtaaaatacaatcatgccttttc

SEQ ID NO: 219023 - DNA, 251 bp, Homo sapiens
gtggggatatgttctctgactcttggcacatagtagtcttcaggattgtaatcacaaaatcctttccccctatcctagagaaacacttttgggagctccttttatcatcagtgggagggggtgtgttgaaagtcttgtctgtacgtgttttctgtgctaatctgagagctggacccaaccccgggacttgggtcacttatgcacagagatctcattgtgaggggggaggaaaatggcagctcctcagctgc

SEQ ID NO: 219024 - DNA, 547 bp, Homo sapiens
catggtgactcacacctgtaatcccaacactttgggaggccgaggtgggtggatcacctgaggtcaggagtttgagaccagcctggccaatatggtgaaaccccgtttctactaaaaatacaaaaaattagccgggtgtggtggtgggcacctgtaatcccagctgcttggtaggctgaggcaggagaatcgcttgaacccaggaggtggaggttgcagtgagctgagattgtgccattgcgctccagcctgggcaacgagagcgaaactccgtctcaaaaaaaaataaaataaaataaacccttttcctttaagagaacctttcttattgctttgaggctacttccttactgctttgattgtgtgaggcgaagtgaaagttggatatttataattcttttggcttaaaaagttcttccctggaaagaaaggaacaaacttggatttctcaaaatggtctaaaatgtatgactgatggtttgcagcaggtgcagagcaagtccggggcagtgtctggcacagtacctttcctgtgtggcatccattg

SEQ ID NO: 219025 - DNA, 528 bp, Homo sapiens
caagacctcaattctttggagaaaaatggatgaagttccagggatggaatccgagtgatcgctaaggcaattcatatattttacccaccttaggataactggtttaggattggacaaacaatctcagctgcttcaatcagactcacttcctttcattcagatggaagatgggaaaacacaatgctatagactttggaatattgtatgggctcgtaatcagcgtactgaatttcaagccattccttggccactcaatggccactactaaatcacacaacccacccaactggagaattaaatcaaatatctggagcaatttaatgtgcatgcattcgtggccacaaaaatgaagatacaaataagtgctggatattagaccttcgtcagacacatagaccagtggaacagaatagagaacccagaaattagatcactcatcttcaaccatccaatcttcgacaaacctgacaaaaagcaatggggaaaggactccctgttcaataaatggtgctgggagaaatggctggc

SEQ ID NO: 219026 - DNA, 509 bp, Homo sapiens
tgtgaagcatatctgtcatgtctcctttaattccccatgttgattcagtgctttgtatgtggttggtgccatatatatttaaattgttaaatttgaaactgttaaattgaaatatgggaaatagcaatgggttgttcatataacctacttaatgacaatgtgtttaaaatagagactgacttaatcttgtaattttaaactttccttaaattcaccagaatattttttgtcctacaaattttacataatttctcattatcattactgtcttcttaatggatatttctcctatccttttttattggtaaaaagaaaacaactaaatacatgtatctgcttgctgtattttaaggaaatctaatagaagaaatggaaactgatggcctttgagaacatcttttaagataaatattttagggaaagggaactagtataccatttggtaatgtggaacggagtactctggaatgttggaagtcgtttattgaaatatttttcaagtctttttg

SEQ ID NO: 219027 - DNA, 376 bp, Homo sapiens
actggaggggcctgtttcctgttctcatctccgaagccctcaaaggacagcagcttccagcctagggtagggacgcgaaacaaggggcctccagaagaaggctggcgtctcagcagggagcacggacagggggtctgcagtcccttttccctcccggagcgcggcccggggtggagagagatacaccacactgcccaccccggctccgcctcccccagccgcggctcccgctccggctcagccagactccccatccggcggcacccggaggacggacaccgagcgcgcggctgcgcctccaagccctccccttcgccctccctctctggggtctctgcctccgtctccttttttaaaagctgcgtcacatgcatgc

SEQ ID NO: 219028 - DNA, 611 bp, Homo sapiens
cctcgacggtgtctgtgaagtggagccactgtggctctgcctgcttattacaggcttcacacactttgggaacaatttccttcttttttctcttttttgagacagggtcttgccctgttcgcccaggctggagtgcagtggctcagtcatggctcactgcagcctcgacccttctgggctcaagggatccacctcggtctcctgagtaactgggactacaggtgcatgctaccatgcctggctaattttgtattttttgtagagatgaggttttgccacgctgcccaggctgggaacgatgtcttccatcctgtactgcagcactaaggttcccagggaccagggccttaaaatgaacctgcagtgtttcctgggaaccctggtgtttcctggtggcacagtggttactgggtctcttttggagcaaaagaggagacagctgcctctgcagtgacttcagtgttatccacctgtccccacgtgccaggtggcagagaccagggcccagcaaaactcagtgtccactcgtcacacattattcctctcacttagagcaagcttgtccaacctgtggcctgcaggctgtacgtggcccaggacggctttgaatg

SEQ ID NO: 219029 - DNA, 634 bp, Homo sapiens
aactatgccgtggctggtggagaatttgaagtggtcattaaaaatgttaaaaatcccatcttttaaagtgataccacagctcattcaagaagatactggatatctagagattaagaaacgtggtctcctgttaaacatgaaaatgactccgtttataagcttctctaccacatgcacttgtctttgcatgatttcccatccagccttcttcccctcctcaatcacacaataccttaacggcgcacatttaggaaaaatgcaacctcctgggaccaacgagcctgatataatagaaccatgtcaacctaaagtatttatgacaaagataaactcttattttgcagaaatggtctgcttccttcagccttgttctagtatagagatctgccattccttgttgatccagattcaccaagacagatacctttatgtcataacagaagggaagttccagaggattctggagagtaatgaagaattgggctgagaaaccacctgaaggctaacagtgcattgcatgagatttcccacagtaaagctgaggtgcttttgggttcagtaattaaatattgagttcccaccctttaaataagcagttctaggttcctcaagcaattatttcactctgtaagta

SEQ ID NO: 219030 - DNA, 414 bp, Homo sapiens
tctgatgtgaaccaggccccagtgaggggcaatttaactacccaatggaagtgtgagcatggaaaccaggcagccagcccactggcagcaactcagggcagggggcgggggcactcccggaaggcactgtggccgcagactccccacaaggccacctggctggggacctgtccgtcaagaggcaagagccgtcaccagggtggtttgcagcttgatgactcatcctgaaggccagcattcaggttgaaagtcacaagttgcctgtgaaatcctgttagtaccactttaatggagtattaagttacaatattatgtaaaagcatgttgtaccgcaaaggctttcaccccagcagaccaaaacgcctgcattcctcatccagtgagcgtgcaggatgcctgcagggcaccaggagc

SEQ ID NO: 219031 - DNA, 420 bp, Homo sapiens
cgcacaggcaattctcctggatcttgtgtaaccttagcaaagaactgggactgaatttcccggtaggtggcaagatggggactcagatatattttgatataaaataatatgtactgtgacatttctttcaccctcaaacatcatatactttactgcttgttctaggaagctccatgacctcagagaaaaagataggctttacagaaaggcaaatttatattctaagcaaagactgtctcacaaataccactgtccaacaatgaaactttcccatgcttgtttcacctctaaaacaacactaggactaactttaaaggattgtttagaggattaaaatgtgtcaatacacaaggtgctaaaaaaaaatgtgtagcatgtaaaaatggctcaataaatgtatttttactgtggtatagcagg

SEQ ID NO: 219032 - DNA, 334 bp, Homo sapiens
cccccacccccagttgcaaatgctaataagtagttcaaatttctagattgattctctaaaagtttatgcaaaaaagaaataaaaaagaaaaagaaaaaagaaggaaaccaacaactaactctgtttctaagattttaaagcgataggcaagtcgaagaagcagagatttatttggagagaaagctcctgaaaccgacccagcctttggaagaccagcccgtctgcttagaagttgggactgttgattccttcaattaatgaaatgcatttggtgtttttaatcgtatttattttactttatgagaagggggagacgctaggagggtgcattaaa

SEQ ID NO: 219033 - DNA, 331 bp, Homo sapiens
aagaaaacgctgcttggaattgatgaagttaagtgctttaatgtgtagtgcctgacacattcattgtgaatttagagtgaggttacatttccgtgagtctggctcattcatgagattattcttagctatttttgaacccataaagcttgcttatagctcttcatatgcaagcattctcaacaaggaagtacacacgtaagaagtttgctcagctgggcaccatggctcgtgcctttaatcccaggactttgggaggccaaggcgggcagaccatgaggtcaggagttcgagaccagtctggcaaacatggtgaaacctcatctgtactaga

SEQ ID NO: 219034 - DNA, 370 bp, Homo sapiens
agtggtttgacttgggaatattcagaaggtttgggctacacataacagcctaggaggtttgaacagccctttcttgatggctagttcggcagtacccatctgaggacaaagtttcattccttgcttcttcattcatctgtgtgctgtttcattgcatgttattttgacccagtagccaacagccctctaatatggtttaggggataaagaagcaggcagagggacacttccacaagtctttgtaattgaacaaccaccaccagaagatggtttttctccactaagtctggcattttaatgagagaagttctttttgtttcctatctctgataactgactactcctccccaatcccccttcatcctttgcc

SEQ ID NO: 219035 - DNA, 515 bp, Homo sapiens
taaccaggcgtccacagcaccaggcggcagccagagggcctgcggtgggcagcgtaggggctgcgggactcgagtcacaggcgctcagatgctggcacccattcgcgtccctgacagggcgtggggtgtcctgcagaaaacttttgaggccaaaacacaaccgctgttagtctcctttcaaacattttggaactctagaaagaaataccctaaaactaagtcaccaaagcccctgggccagcctctgtcctctgctttatccatttcctcatgttttcccacaagaggaaaataaatcccaagctcgttcattcatcttcaattgctgcttcagctgctatctctcaacactcactgcagaatgaacaaatccccagcagtctccacacctttgctagggaactccttccccattcctggaaagcaggaggtagcaaagctgcttctcctagcaacaccctcccaagcttttactcctgcacttcaattaataaaaatcacgagcactgccccga

SEQ ID NO: 219036 - DNA, 538 bp, Homo sapiens
cttgtgggtgctgaattccgttcagctgcacggtcccacaccacccaaccgtggggtgttttctctgaaccttttgtttcaaggctatcctggagatgggtgatgacggggatgggtgtttaagcagaaatagctcaggagaccaggagcaagtctagaggtgagttcaggggtcaggctgtgggccacaggtgggcagctctacccaagagtttgatgggaacagagtttcattttaggaagaagaaaagagttctgtgggtggatggtgatgatggtagcagaataatgggaaaatatttaatgctactaaactgcatacatagaaaggttaaaatggtgtcttatgttagatatatatagtggctggtattcttaccctgtctataaacacacactttttggcactgccccttccctgccatgttgagtccccatgggtgaatctctgtgtgtctccaagtgtgtgccactgactgtcttctgtgctgtgtcccatgtgctgtgcccacaatctcatacagccggtgacttcaga

SEQ ID NO: 219037 - DNA, 517 bp, Homo sapiens
ccctccctttatgttcctaggttgcatctagattcttagcgaagaccttctgacatagtgtcacccaggcattgtcaactgccctgcacacagggagtgactctaatagtgaggagtctggcgtcaccatagaggatggggtaaagatttgaatggatcctgccagcagcctataagcataacatgaagatacttgtggcaaagattcttccttgaccgaactatacttgggttcctctggactgtcttctcaactaggccctgacttctgggcttccgtgtttgcctctgcattgtccaattttagcaagaatcctgctaaaccagtttaatcagaatccaccaccctcaatatttgattgatatctgatcagcttcctcaccctctaccatccccagatgatgtctggtaactctggcctgccttcagtaagaatcctgttaggttggtttagccagagtctacccttagccctgatgtttcctcttaataaattttcattcactgaccccgcca

SEQ ID NO: 219038 - DNA, 196 bp, Homo sapiens
cagtgattatttgattggcaaaggaaaaaggggtaagtcagggaaggatgactagactcatgccaagtggataaggttagggaaaagacatttcaggaagaatgactagtacatatatgcagagttatagagacatgaaatggtgcgatgcgctctgagtgctagaaggaagtctgtattgtttgtataaaatgcc

SEQ ID NO: 219039 - DNA, 416 bp, Homo sapiens
aacgagaaagaaatgtgtaaaaggctataacccagcccttcctgtttagaatccaagtaacagctttgcctgaccaaggcaggaacttacataaaaccaaaattgaatttgagaatagaaatgtaaattgatcaggctgggcatggtggctcacgcctgtaatcccagcactttgggaggctaaggtggttggaccacctgagttcgggaatttgagaccagcctgaccaacatggagaaaccctgtctctactaaaaatacaaaattagctgggcgtggtggtggatgcctgtaatcccagctactcaggaggctgaggcaggagaatcgcttgaacctgggaggcggaggttgcagtgagctgagatcgcgccattgcactccagcctgggtgacaaaagtgaaactccatctg

SEQ ID NO: 219040 - DNA, 554 bp, Homo sapiens
tctattgaggagtgaaaatggaactcctaaataaactagtatgaaataacgcaagccagcagagttgtcttaaattagtggtggatagaagacttagaatagaaacttttaatattaccgatgggggaaaaaaactactgttaacactgctaatgaaagaaaatgcctttaactttctaatgattatagataaatataatatgcatctttttcacaatatcctatgatttttagactaggctctagtgttcagaattcatgaaattatccatggtaaaaactagttataaaaattacataattcaaagataacattgttattcttaagccttatataatattgtaacttgcatgtatccatacctggatttgggatgaaatacttaatgatctttccattggaaataactggaagtgaagaggttttgttgcttgtacagtgtcagatgaggaacaccactattttaattttgcgatacactgcatttgctggtgctatttttatacagtgaagcaacagctttgcagcaaaataataaaatacttctttgtta

SEQ ID NO: 219041 - DNA, 195 bp, Homo sapiens
ggtcgccgggcgccagcgtgggaacctgtgtccctctgctccacgccagggccgggaggaaggaggagccgcccggctgccgcgccaccaggaaggtccgcggtccccgccccgagggcccgggcggtcgctgggaggcgggggcggtccctgggcggcgggggcggtcgctgggccgggcccgggggcgggacg

SEQ ID NO: 219042 - DNA, 496 bp, Homo sapiens
taaggctcgagtcttgattgaccttgttactggaaaaggacccaagtcttgctgcaaatttatcaagcatctctgtgaagaagaccctcaacttgcctcaaagatgggtttgcactaagagagaagatggaactctggagcacttcagagacttcccagagcttcttccaagggagaagatattctcgtgaaagaaaaaaacaaaacaaaacaacagtgcttttttcaaacctgattaatttcatcaatttccaataaatctttcattctctcatattactttcttcttattctttctctcctcataccaacagaggataattcatcaataataatgaaggtcatgatgattgtaatgtaattaagaaagtccctccctttcccttcctttctgtttagttcctttgcaatcctgtagagacatgtacagcttactttggtgcttttagcactgagagtctgctgtgatgggaataaaatgaagtcccagctcaga

SEQ ID NO: 219043 - DNA, 371 bp, Homo sapiens
ggtcactagagattgtattagtccaaggttaaagagtcataatgctattaattttgcacaaagactctgaaataggcaatattcctatacgggagaagtaacagcatagataaccctgggatagaagaagtcagaataagccaaaaatgttgtgttggtgaatgaatataggggatagtgtcattacttgagaatcaaggtaatgagtagaaaagagagaaagctattgtgaccagggttaaagggaaggctgaaaaatattcagaaatcaggaggaaaggcagctacttgttagtaagattgaattctttctttatttttattttttttgagatggagtcttactctgtcgcccaggctggagtgcagtg

SEQ ID NO: 219044 - DNA, 811 bp, Homo sapiens
tcactgcaagctccgcctcctgggttcacaccattctcctgcctcagcctcccgagtggctgggactataggcgcccgccaccacgcctggctaattttttggtatttttagtagagactgggtttcaccgtgttagccaggatggtctcgatctcctgacctcgtgatccgcctcccacagtgctgggattacaggcgtgagccacggcacctggagagaaaaaagcttctttaatgacgacctcaacataatttacatggagaagtttcttaggtggaaaaccgatttgtatggtcctcagaatgtaacctacaggttcttgccctcagaaaaatgcatgcatacttttatgttacaggcttattttccaaatgcggtagagggccatcccttctttggcttcttgccttgtctctgaccccactgactgccccttttctgcctccatagctagtttcttattttcctttggctttttttttcttttcttttcttttcttttcttcttttttttttgagatggaatcttgctcttgtcacctaggctggagtgcagtggtgcgatctcggctcactgcaccctcctcttgggttcaagccagcgaggtagatattatcattttagagacagcaaaacagactcagaggggctaatgtgcccagtgccccaccgcttttaaatggtagagctgggatttgaatctaggcatacaggtaccaggatttctgttcttatctcccccatagcacctggaatgaggccatccatgtaagaggccaagtaataaagatttgttgaatgaaatgga

SEQ ID NO: 219045 - DNA, 575 bp, Homo sapiens
aaaagaaaaaaagaactaatcttcatctttccttctccttttggcttcttattagttagggttgtttccatagtgaatgtcaaaaacacaattcaaactggcttaaatgaaaaaggaactttgttggctcatgcaattgaaagtccagggatagtagtagcttcaggcataattgggtcttggtgctcaagtattagctttctccatctctaggctccacattcccctgtgcaagcttcactcttagagaggctctctcaatatagaggcaagggtggccccagcaactccaggcttgccaaccacagtgggatgagatccagctttcccagtagttccagccaatgtcccttttttttgacttgggtcaactgaacatccctgcaccaatcacagcagccaggggaatggatctattcatgggccaggccgggtcacatatctaccttaggagcaaggcgagtgggtcagcccccattgagctacatggactgagagtaaagggaaagatggctgcaaaggaagatctaggggctgaattcgggagcaggagatgaaactcacaaacatcctct

SEQ ID NO: 219046 - DNA, 556 bp, Homo sapiens
cttagttatggttggagagggtgttactgggcttcactgtaggggtgacttgggagcagtgaaaggatcaaattgcccagccctgactccacatgtgaatcctcatggtgccctggaggaggcagtgctgctgaggtaggcacttccctcgctgccacattccttctgctcctcttctctctgaccctcagaggtcaagtgggacaccctggaaagggaagcagctgcccacaaggccagtaccctccccagtttttttaggtaacaatctgaaaggacaaagccacagggcactacttggtccagcaggggcttgtcaggtaaaacgtccaaagagaggaaagggaacaaaagtttttttctttagttacctagaattacaatttattctaaagattttacttaaaaggaaaaaaagggactgattatcttggggcggagcagccatactagagagtgcccgcttcccgcctccctctgttgctcttatcaaccagagactaagaaaacttcagcttcagggggctgaaaacctaaaacaaatgaaagaaaaata

SEQ ID NO: 219047 - DNA, 381 bp, Homo sapiens
tacaaagcaaggatataatattcattcactgaaatatataaatattcatttgctgacaaccttcttcacccacactgtactactaggtattgtagatataacagtaaacaaaaaaggtacagtgtgtggattctgcaatctagtatcttagtcaaatgaggataaaattagaaaagaaatgtgaaggttttaaaatcctgtaattatcagtttattaacaaagcatacatatacttttgaagttcatcagatactttaaacttaaatatttcacctctataggaaaccagtgcataccttggattgacttctttagtttttttttttttttttttttttgagacggagtctggctctgttgtccaggctggagtgcagtgg

SEQ ID NO: 219048 - DNA, 469 bp, Homo sapiens
aggcggcaccggcgcccgggcaagccgagcccttccgcgatgagtcggcgccctggggtcgctgcgccaagagctcaggagaggcgcctcccctcctcggtgtttccgcagcccgcacggccctcccgcccaagaccccggggcgaccccttcccgcgtggcggggccagcgagctcctcttgcggggcgtggacggggccggggtgcccgggcaggcgccgccccggagcccacggtccacgcgctcccagcggccctgactttctccttgatggaactggttgacttcacggaatatatggagtgacttttcccactggattggaaactgttttaagcctgaataatgttagatacaatgagttctaaacttcccttcaaagaatcagtatatcagtatgttcagtctttgtcctgcattttaaagtctaccttcctcgcagtttcagtaaacaaccttttccacca

SEQ ID NO: 219049 - DNA, 135 bp, Homo sapiens
ggaaattaaacaaaatacttcataacaagcactagatccaaacagaaataaaaaggaaaccaaaacagtattttgagaccaatgaaaaaggaaagaacataccaaaacctatagaatgcagcaaaaccaatccta

SEQ ID NO: 219050 - DNA, 362 bp, Homo sapiens
gtggatggaatatgaactctctggcctttctccatcattctggaagtgagaggagatgggacattataatgctcttcatcaaagcatgggccctgtcagcatagctggtagtgtagtctccatttaatgtggttactttaatctaggcattcacttataatgcccacttcatattatctgataaatacttggatagagatatgacacagaggttaagaactaagagttaacttttttttattaagtttcagagccctataagaataagcatcgcaaataaaaatgttggtagcgtccggaaatttgcaattgcattcttaacccttctcccatccttgccaccaaccccaaagattctatga

SEQ ID NO: 219051 - DNA, 175 bp, Homo sapiens
tttaactctagagtatccttcgattggtgggattagagagcaggaagcaaggaagaaaggaaagaaggaaggaaggaaaggaaggaaagaaggaaggaaggaaggaaggaaggaaggaaggaaggaaggaaggaaggaagggagcccagacagggaagggactcacctaagtagc

SEQ ID NO: 219052 - DNA, 436 bp, Homo sapiens
atccttgtaaaagtggaatcatacttgtccttctgtagctggcttatgaaatctgttttttaaatgctggtaactaattcatttcattttttaaaaatgtattttatgtcttaaaactgcatcagattaaattgccagtttgaacatcaggcatggtggcatatgtctgtaatcccagcactttgggaggctgaggcaggaggactgcttgagcccaggagtttgagaccaacctgggcaacatagtgagaccctgtctccacaaaaagtacgaaattagctgagcatggtagagctcacctgtagtcctagctactcaggaggctgaggtgggaggattgcttgagcccaggaggttgaggctgcagtgggccatgattatgccactgcactccaatctgagctatagagcaagacccatctcaaaaaaaaaaaa

SEQ ID NO: 219053 - DNA, 433 bp, Homo sapiens
tatttctttattctgaatcattaaccaatgacctgttttttaaattctgaaacatttttcagttactatgcatttacagcactctaaaacactaaccaatcagctaacaagttttattgtaatgattttattgcgctagagaatacttttttattataatatttgagttctaaactattcatttctttttgttcttgaataagaatttaagggattcttggagattcttagctgcttttatatttagaatgctagaacatgatgcaaataccctcactttaatcaggaaatatggacactgacattaaaaagtcttccccctcacatacttgtgagtcatttttcctctacaagattcttttctgcagatttccactagacccacacctcactcaaatagactctcagtctcttgagtcaggcattcatttat

SEQ ID NO: 219054 - DNA, 484 bp, Homo sapiens
ggaccctgggtcctgtgtgtggcagatggtcctccctgcctgccccggcccccgccttccccatgggcctacggccaggactggaggacttgccccagcctaggttggccctctggccaggggaccgtccgggattcccgggcccaggcccactgaggtctgccatggacaagtgtaagatgcccaggacccccttccttggcagtgcccagatgggcccaggcccggcttctcccccagggcggctggcggctgcataaaccctgctcccccagggccctggcaaaggccgggcacccagcccaggagactccacaaagggttaaggggcgcaggcggctgtgcccacagtggggcggagcagccgggctggtgctgggccaggagcacgggcgaaggcgctgcattttaatgaatcgttattgccggcgaggcctttgtctttctttatccggtgcacaataaaagaattaattagacagaa

SEQ ID NO: 219055 - DNA, 280 bp, Homo sapiens
tattggagttggtataggggatgatgactgactgaaataggacttgcgagctcttttggggttattggaaatgttcttaaactggattgtggtgatgattacactccataaatttactaaaattagcaaaatgtacacttaaaatcggtgaatttttttacactcattatgtgaaaattcttaattacagacattatttgtaaactgttgggtgacatttgtattgacaggtgatagtaatgaagaagccattcaacaacaggtttgtaaaaaatacagc

SEQ ID NO: 219056 - DNA, 359 bp, Homo sapiens
tcgagatccagcctggatgacagagcaagactgtctcaaaaaaaaaaaaaaaaaaaaaagatggaaattgaataaaagctgcagatgcttcatataaaaacatcacacggtgatacccatctatgtagaaggagaattctatcctctccagctccgtagaacaagcagccacctctagcaagaaagatgtcatgggagaggtcagaacaaccgtgatacaaatcacgtgcgcaaagccttgcacttggctctttgaaagacgcctggggcttaaatcaatcatggtggttttgccacagttgcaatgagcttgggtctctctggcttgtactaaggtagcaccactggggtcaaacaat

SEQ ID NO: 219057 - DNA, 164 bp, Homo sapiens
aacttggggcagaattttgaggatgatgactaatctagtgaatccaaagaatgacaatgataaagagatcaaatcatgtagacttgagctgtgatgatggccttctggttttgaatatgatcatttacttggctttaccaatagctattcatttatcaataact

SEQ ID NO: 219058 - DNA, 235 bp, Homo sapiens
caaacccttagaatagataataaagagggatcaacacagtgcttacctggtcaggtgtggtggtcattatacttttatatatgacccttattgcacaattttaggaaatcactcaggctgggcacagaggctcgttcctgcaatcccagcactcttggaggctgaggcaggaggatcgcttgagtccaggagttccaggccagcctgagcaacacggcaaaaccccacctgtcca

SEQ ID NO: 219059 - DNA, 328 bp, Homo sapiens
gggacttgggggaaatggtgggagggaggtgagggatacaagactacaaattgggtacagtgtatactgcttaggtgatgggtgcatcaaaatctcacaaatcaccactaaagaacttactcataaccaaacaccacctgttacccaaaccctatggaaataaaacaattaaattaagaaaaaaacactggtgaaagaaattgaagaaaacacaaattgcaaaataccctgtgttcattaattggaagcattaatactgttaaaatatccatactacccaaagattcaatgcaatctccatcaaaattccaatggcattattcacagt

SEQ ID NO: 219060 - DNA, 491 bp, Homo sapiens
agtttgagacaagcctgagcaacacagtgagacgccattgctagcaaaaaactaaaaattagctaggtgtggtggcacgttcccgtactcctagctactcaggaggttgaggcaggaggattgcttgagcccagatgtttgaggttacagtgagctatgatcataccactgtactccagcctgggcaacaaagagagatcctgtctcaaaaataagtaaataaaaacagagtagaaaaattcaatcaaaaccaaaagaaggtagtactagaactcagagaaaaaaagataaacacttgcataaaaaaaaaaacccgcaaaatgacagaaataagcccttttgttgtatataatttggctggtttttgtccctggtttctggaagacagcctctaagtctaaacctttggaatttcccccagtgataggcgtgcctttgttattcatagtggataccttagaccacacctggtaaggtgactcatggtgggc

SEQ ID NO: 219061 - DNA, 543 bp, Homo sapiens
cctgtgactttgtatgcaccctgatcaaaaatggcattctgctctcagtcctgggtgtgggaaaatgcctgcagctttcccaatgtcttttccttacaaagtctccaagcctctccccaagttagctcttggctttgggagaagcaaagtgctctcccttggcctgggtttcttgaatctgcagtggaaaggtcagttacagagggaggccctctgcttctttcacatactgggggtcactcatttttatcagccggacactgataaaatcagaatctgaggtgtccttcacaatttgtatggattcctactttccttcttgaattaaagctgacagagttggtctttatgcactgtcttgctatttccaagtggctgaggtgcactaaaaatctctaatcccccgtcttggggggaacaaaatcaactttttttaatgtctatttcttttatctttcaaagagtatgtaaatcatgaaacaagacagaatatgagaatatgccttcatgtttccaggtagtcttttatttcccctcttttcc

SEQ ID NO: 219062 - DNA, 483 bp, Homo sapiens
cagaactgagcagaaagtagagagttcctatatatcctgaagttctactttcaacatcctacattggagtagtatatctgttaaaaaaatcaatgtacctacactgacacatcaacacgcaaagaccatggtttacattagggtttactcttgatgatgtacattctatgggttttgacaaatgtgtaattacatgtctctatcattacagtatcatcatacagggtagtttcattgccctgaaaatggtctgtgctctgcctattcacttctccctcctgcctcggccctggcaccagtgatctttttattgtttccatagttttgcttttttcagaatatcatatatttggaaagctacagtatagagtcttttcagattggcttccttcacttaataatatgcatttaggatttcacatgtctccttgcggcttgttagctcaatttttttagtgctgaataatagtccagttctggagg

SEQ ID NO: 219063 - DNA, 311 bp, Homo sapiens
tgcttacttacctaacgcactgcctggcacatagtaggtctacatggatggggctattgttgtttatctggctggttcctttgctatcagggacaaaagctaaccagaatgaaagtgctttcacgttacacacttaagccttatgagggaggcattgctataatccccattttacagagcaggaaactgaggctcagatagctgagcagaacactctcactggaggctgtaaagtgaggagttaggtgttctgggttgggaacctgggtctctctcccatccttacctctcctcagtccctctaccccttg

SEQ ID NO: 219064 - DNA, 537 bp, Homo sapiens
caagccctgaggcagagggtgtggacaaaagtactggagttccaacaattgtctataatgtccactttccacaaacaagagacaggcaaagaaacaggaaagtatgattcacacactggaaaagaagcccacaacagaaactgcttgtgagagcaaccagatttaacaggcaaagacttcaaattatacattataatacatattcaggtagacaaaggaaaccataaagaagtaaatgtaggtatgatcataatgttgcatcaaaaagagaatatcaacagagataaaaattattaaaaataaacatatggaaattcttaagttacaaagtataataactgaaatgaaattttcactagaaggactcaatagtagacatgaactggcagaagtattaacaaagttgaagacagattaatagcaatggtataatctgatgaacagagagaaaacaagacaaattaacatctcagagaaatgtgggaccccattaaccacactgatataaacaggagtaccagaagagaggtgagagag

SEQ ID NO: 219065 - DNA, 355 bp, Homo sapiens
ctgttgctaggtgtgtaatgtgctacaaaagattaaggaagtaatcagggagttatttatttattttcatttttttgtagagatggggtttccctgtgttgcccacgctggtctcaaactcctggcctcaagtgatccacctgcctcagcctcccaaaatgcttggattacagatatgtgctgtctcagccaggccagacaggtatttttaacatctaaaatgttaaattggcccagaaatcccaatttggaatccagaatgttgagatcaatgacaaaaatgtttattgtagcattatttgtagtgacaaataattgggaacaatcaaatcttggaataaattataatctattc

SEQ ID NO: 219066 - DNA, 560 bp, Homo sapiens
actggaggtcagtgtagccatcatctgtgctggagagccttgagtatatcactttactacggagattccagccaggttgatgtgggagggcatcataacacactgacacagctacagttggagtgccatgccaggctgccagtggcgagactttgctcacagttggcagcagaggcacccaaggctgtgccacctaactgccacccagcccaccccagcaagggccagtgccctggaagtctacttgacctcttttagaatctgtttccttatctctgaaaggggacaatgctgataccacctcaagggttttgtgagagattgcagagataatgtatgtaatgtggctcacagtaattgctcaataaatggtagattaaaaatggcaagggcagtgaagtagccagcaaaaaagaggttgaagtgatgcacaatggcacctacactgggtagggattgaagccatgaggtgataatgagctggagaatgggagaaatcaaaggatgggagatcttgatgagaatgaaaaatgtttggctgtgaaatgagtccttgatca

SEQ ID NO: 219067 - DNA, 336 bp, Homo sapiens
tcacagagatctgtggaatgtgtgggttccctgaagaggtggacggacccccggggtcgcgcgttttctcagccctgggcccgtagcggagctcgatccttccagagctcagggccagaaatgttgcgattccgaacactttgcctttcttctgagaggagccgcccggcagacgctcatcattaagaagcaacgtaattaacaacgaatgtttccccttggcgctaatgcgaacaccctggggaactgccaagtctggtaggggaatcgcagccgggggtgtctgggggaagccagcgtgggcgggcgcggtgggcctgggattgcttttaggcg

SEQ ID NO: 219068 - DNA, 859 bp, Homo sapiens
ggagtggggaggccccacagagacaggatgcccctgagaggctggaggctatgtaggagcttgcaaagcttgggtgggcagaggatgacatgatcagcagtctaggcagaggcacagagacacgaggctctggggaattaccagtggatctggatgacatagtggcatagtagaaggtggcgaggccatgagagagctgagttgatactggagagtctaggctctccccttttagcaggagagagcctccagaggcttcagcacctgcttcaggggagctgcaagcttagtctgggctctgggaagctgattttggagcacagcgggaggagggttggtggtgaccagtgtgaggaggagggttggtgatgaccagtgcgccccctctcccctacgatgcccctccccctgcggctgttcgcgcgcctctctgctctcccccgccctccttgccccctgtccgtctgttccctctccgtccgcgatcggccgcggaccgcctcctcccgcctgtcgtcacatcgggcgatacgctgtcctgcaccctacgcccgtccctgtctctccccttgcccccgccttgtctcccgctctccacccgcagccggtttctctccactctctctttcccacctccaccctcttccgcttctccggcccgcctccttgccccctgctcctttcttcaccccccccgcctcgcctccgcccctccccgtcctcttcgccctctccctctccccgacgtccccgccgtcgccaggctcatctgtcctcgtcctccccctctcctctctctgctcttccaccgcctctctcagtcctcatttctgccccgaccgcgtcctcacctcgctcc

SEQ ID NO: 219069 - DNA, 549 bp, Homo sapiens
ggagtggggaggccccacagagacaggatgcccctgagaggctggaggctatgtaggagcttgcaaagcttgggtgggcagaggatgacatgatcagcagtctaggcagaggcacagagacacgaggctctggggaattaccagtggatctggatgacatagtggcatagtagaaggtggcgaggccatgagagagctgagttgatactggagagtctaggctctccccttttagcaggagagagcctccagaggcttcagcacctgcttcaggggagctgcaagcttagtctgggctctgggaagctgattttggagcacagcgggaggagggttggtggtgaccagtgtgaggaggagggttggtgatgaccagtgtgagtctcgcctcctaagagacaggagagaactgaagtagggggagggagcaggtgtggaaagtacccggggagttctgggatcgtaggtgccctagttacggtgccctagtggtgttaccaccccaccctcattcctgctgtgtcagtgagaaggacttgaatcagacct

SEQ ID NO: 219070 - DNA, 377 bp, Homo sapiens
ggcgagactgtgggaaaagaggcccctctcgtacattgtctggtgggaaaacaaaatggtgcaagccctacctggaggggaacttttgccgcaaaattacatttgaatttaccctttccctggcaatcccctcttggcaaaaataagagaagacagattcataaagctattcatggcagcatcatttgtaattgtaaaaaaactagaaaccactcaaatgtccatcagtaggggcagcttgaccacacaatagacaactctgtagctagaaaaaggaaggaggccaggcgcagtggctcatgcctgtaatcccagcactttaggaggccgaggtgagtggatcacaagatcatgggttggagaccagcctggccaat

SEQ ID NO: 219071 - DNA, 114 bp, Homo sapiens
ggtgaaggctagacatagcaaaaaataaagatattcaaggagcgaagacattgatgaatgtctccaagaaagagaataacagagtaataaaaggcaaatggtgctgtaatattt

SEQ ID NO: 219072 - DNA, 192 bp, Homo sapiens
actaattgagctaattgcttatcttttgatgtggagattcaataagttttcctaaagttaataaattaagaaacagttttaatatattaaaacttacaagaataactttaaaatcaaaaagcattccaaatctcaagaaaaaaaataaagaagaaagcacaataaaatacgaactattcaacaaaacattga

SEQ ID NO: 219073 - DNA, 479 bp, Homo sapiens
acatcaaattatttggatccattatatctgatttgtttgtacctttagtctttgttcataaggtgatttttcagctgaattttgtgatttaatacttggccattgttcaaatcaatatctttgatttccatattatagaacagaaattttaaaatcttttgaaattcgtgtttctggcttttgtacatggtaaacagtcatttgtgaaacttgacagcatacaattgtattacttagaacaaatgtttttgcaaccacgtttgaaagatgttacacaatgcagtatttttacaatgtcttctttagaatgtgtgactatatttgtcaggttcagatgaattatgtaacaattaaacctcaaagctgttatgaagtatacagtttatgattacttttgtaaaagaaaatggaaagcatttgaaatataattttactctgtttcatatgtactttgaaaaagaaataaagtattataaatt

SEQ ID NO: 219074 - DNA, 365 bp, Homo sapiens
gtcagcatcttatcactgtgggcttactatgatgcctttagaagtcttttagaatgataatctttattttggaagtcagttatccttacatataaagttccaatttagaggtagtgaatttccaaatagaagtttatataatcatatacctttatcagaccaattgtgaatttccgaaaatagctgtagtataatttagtggaaacaactctagtctgaaaaaaatcatgagaatgttcttagccacagactgccatacttaactttgagtctgagtcacttaaatcatgttggccttcaaacttccccatatgtaaaatgagtgttgaactgattactgtggtcccattcagctaaaaaaataa

SEQ ID NO: 219075 - DNA, 491 bp, Homo sapiens
aggaatgtttataaattgttagatgtgcagcaaatctgtgaaagcgcaagatctatctcagggagaagtatacataacatataatgaggcactatcaagtgctaggaaacattttgaaagattctttgtgttgatcttatttaaactttcctttctgtctttcctccctctctctatctgtatctgtccgtggagtttcagctctgtttattccacttattggctttccccacagggaagagaactaattatctggatgatcaaaacacattatctactgtagtatatttattacttatcatgatcactgtgttctaaaaatcagaggaattcatacaaatccgtgaatgacctctcttgtactttatttgggcatcaagctgtgtgactaaattaaactatgggcagttctgtggatggagctgctttatcccatccatctctgttgcattcatcattgtcggcttagtgggtgcccatctgtcttcagg

SEQ ID NO: 219076 - DNA, 417 bp, Homo sapiens
tgctggtcagatttgttgggtgaggctccaccttgtggagatctctgagcagagctcggcttcaaaaccaaactcccaatgatgggttatgctttcaagtcgctactggtgtgttactgtttgaacctctgaaattactggcctgagacacaatttgtcaaaaacacaaagccttgcagtttgatagtaaatagaggatccttaaagaggggctttatttgggttggagatagtgatttgttcatatgttgaaactaggaggtccaattaaaccataggtgataaaatttatggggagagagaggcttattaacactttagtattactgaataataaatactgagaagagcgtaaattaaactggctttttttccatgacaagcatactttggtatcaaatcaacaagaggaaagca

SEQ ID NO: 219077 - DNA, 443 bp, Homo sapiens
atggaagaaaatatttgcaggctattcatctgacaagagattaatgtccataatgtatatgaatcttaacgctatagaaaaaatctaataattcaattaaaaatggacaaaagacctgaatagacatttctcaaaaaaggacatgtaaatgtcaaacatgtatatgaagaggtgctcagcatcactgatcatgagagaaatgcacctcaaaactacaatgaggtatcattttactgcagttaaaatggcttatatctaaaaggcaataacaaatgctggtgaggatgtatagaaaagggaatcctcatccatagtagtaaaaccactatgaagaacagtttggaatttccttagaaaactaaaaatagagctactatattatccagcaatgaaactgccaagtacatacccaaaataaaggaaatcagtatatcacagagata

SEQ ID NO: 219078 - DNA, 376 bp, Homo sapiens
tggacatgacaatcacccttcatctcatgcagattaatcttcctgtcaggttaaaaatgtgggggtggggttaggattgctaagagccaggtagattccttgagtaaaaagcattaatatacatattggcttaaggctagagtctgctggatacagttacaccatatcttggaactcaagccctaatgaattattcaactgagcagaataatccagcataactagcaataagcaacacattcatttgaggggaatgctgtagggaggacagacaggaatatttatttagtgtttatctgtattgtgccaaacaccttaagaaggacattccgctattccccttacacagcgaaaacacggagcctcagaaaaagat

SEQ ID NO: 219079 - DNA, 714 bp, Homo sapiens
gacttccatacaaagtgaaaaaaaaattaaagaatagatgaaataaagaccttcccagacacacaaaagctgaaagaatttgtcaccagctgaccatcagtacaggaaatgttaacagaaggcttttagacagaaagaaaatgataccagatggaaactgaatctgcacaaagaaataaaaagcactagaaaaggtaaatatgaacataaatacaaaagacttcttgtttttaaaaatatctttaaaaaacaattaactgtttaaagcaaatattataacaaggtattatggtagtaaaatctgtgacaatagtagcacaaaggccaggaaggggcaaaagggaaaaagtgtcatgaagttattataatatatataaagtggtataataaaacttgaaggtagactgtattaatgtaaagacgtttattacaaaacttaatgaaatgcctaaagaaacaatataaagagatatagctaataagccaataaagaagataaaaaggaatcataaaaaacacttaattaaaaagaagttaaaaatgagcaaaaaggaacaaagaacagcttggaaaaatagaaaacaaatagcatgacgatatatttaaactcaatcattttaatagccacattaaatgtaaatggtctaaactctgtcaattaaaagacaggctctgtcagactggattaaaaaaaaaaagcaggacccaactttc

SEQ ID NO: 219080 - DNA, 501 bp, Homo sapiens
gggatttcataattggttaatcttgcagtaacgccaggtgggagttaatttgaacagtgctgctgtgagcatcctcagacgtgctgttgtacagtcaggtaagtatttctttaggcttgaagtccaagagggttgcctgggtttagaatctgcctcagcgccatttgcactgagagcacaccagcccgttctcttagcagttctctggggaacatctctcggggacagggactgaccaggacttttcttccatgctatctcttatttgtagccaacagcctccatccctttcatgtaagcaataagttcctgcaccgcctaccatgtcatagatactcagaacatttccattgaacagaaaccgttttgttcatattaaagtgggatctgtttgttttgtttggttttgtttttaaagagactcagttaaatcacgtttatttccgcagctgtgtcattagccttgcgttgttatgtttaagtgtctacaccaggctccaa

SEQ ID NO: 219081 - DNA, 448 bp, Homo sapiens
caggggccaagttcattcagtcctccactcaactaataggtcttgaccatatgctgcatgtttggttttgtcctaggcactggagatacaacactgaataaaacagacaaacccctaccctggtggagcttaaatcctggtggaagagaaacagacacactaaataaaatacgaaatatattagaaaataattttctttttcttttttttggagacggagtcttgctctgtcaccaggctggagtgcagtgacacaatctcggctcactgcaaactacacctcccagattcaagcgattctcctgtctcagcctcctgagtagctaggattacaggcctgtgccaccatgcccagctaatttttatatttttagtagagatggggtttcaccatgttggccggggtggtctcgatctcttgaactcatgatccacctgccttggcctc

SEQ ID NO: 219082 - DNA, 432 bp, Homo sapiens
ccgcgatctcggctcactgcaacctccgcctcaccggttcaagcgattctccagcctcagacacccaagtagctgggattataggcatgcgccaccacgcccggctaattttgtatttttagtacagacggggtttctccatgttggtcagcctggtgttgaactcccgacttaaggtgatccgcttgcttcggccccccaaagtgctgggattacaggcttgagccaccgcgcccagctaagattaatctttttatgccctgcagcaaacaactagtcatgccaaaccatttttgtgatttggggaaacatgagcagatgatgctttggatctgattataattcacagtgctcttgtaatttacgtgagatttgcatacctgcctcccagcctcacaaaatgcctttaaaaaattacatcttggccaggat

SEQ ID NO: 219083 - DNA, 331 bp, Homo sapiens
ttgcctgtaagagattgggagccgagggcctgagggtgaagcctcgtttgtgcaggtgactgtgggactctggtgtaagtaacgctgggcccaccctggtaatgaaggaagacccaggcccaggcaggggcggtgtcacaggcacaggggctcgcaccctgggcactgacggtggctgtcgcaccagggccgctccttgcagaaacctcactgagcctgtgcctgttgagtagcttcatgaggagcggatatcaggcagagaaagcccgggcaagagagtgacacacggggcttctgcccagaacacgtgcgcccacaatcccgggagctg

SEQ ID NO: 219084 - DNA, 684 bp, Homo sapiens
cattagaccagtaagtgaaagcacataaaagtttaatgaaatccatttataatgtgtgccacagaacaaggctaaccctggccccaaatgaccagtgacacaaattatctcactttaagtatatgcaagaaccataactaaatccctgggaaaacactgtactaaatgggcttccactgtattcacataatatgttggtcaagaaggagagccaagattaaggatataactagatggagatgggaaggacagctctgagttttggatcccggaatacactgaaaaagatcaggagatgctcagttcatgtcaaatcaatcacaggtaggctttcaaacgcagactaatcagaaagaagcatcttgtatgatggtggagggtgatggaaggtggctatggcggtcaaaaggaaaaaacggcaggggcaatctatgtaaacatgagccagtgatttaacccctaggagcctctgtttcctcctctgcaaaaggggatttacagtatcttcatctcacaaagctatgatgaggattaaatgagaacatttgaaagcatatggtgcatgggtatataacagcacaataaatatttgatatttttaataatgtttaagcagtacagtgacaaaattaagacaagcaaataaaaagacctgagtagatacagttcagggcaaccaaagat

SEQ ID NO: 219085 - DNA, 428 bp, Homo sapiens
caagtccactgtgcagaaatgtttgccctgccttagtgatggtgaagataaggtgagtggagggaccataatttagtgtagttcatgcctgcctttgtcagattctgttcatttttgtaaaaagacgttaggaattaaacatggcctcacgtgctatgtgtctgaaaagtggtctttttaagagagcaaggagttatgctggaagcaagcttatttacttgtataatttagagtttgattgactccatgtatctctggggacattattttggcactagtttttgaggacttaattttctagtaataataaaaatgcatatattctcttatccccaccctcaaacacctgttcatttgggacatgcacatgtaattagaggcgtgtttcaggacttgcctgtaaaattcctttgcatgcagttactgtg

SEQ ID NO: 219086 - DNA, 369 bp, Homo sapiens
actttagttttgttttctgggccaaagaacagagcgaaagcatctgtccactgatttctcctccagtctctccctgtcaacctgcgcagaaagcacagccacaagtgtaatccaatactgagacaaggactgctgtggctctccagccgcttgagatgggagtggaaggacgctggatgaccgaacaaagactgtcagggaataagagaccttcaacatgagaggagcagaaaccaatacggatcaacattccctactgatacaattgattcattttcctgtatttcctcagccattccattttccttgttaaaataaaacattgcctggaaacctctgttaacagccaacggaggactcatgtgaaaa

SEQ ID NO: 219087 - DNA, 515 bp, Homo sapiens
cctcgactaaattgtgaaaaatgctttttaaaaaaccaaacattccttgtttcaagccatccacttttccatttagtcgttttcagggaggttttgtacaaggaatagttgtttgtgccgccgaattccaaggtagtgtggtatacaagttgcatgttgggatcttgactaatttctttggaaactggctgaacatactactaatgtatagcagtaccacaaaaacttgatttttgtgcataagaatcaataggaaaatttgtatttctcttacgatgaaaagtggttaaaaaaatgaatatcattagtatttcagtaaagcttggggggagataaatattaaaatctaatgagaattattgtggactttaaaagttgtgtttcttgaatagtatggacctttttaaaagaaaaccgaaaggacagagaaaaaagggctagaaaaaaagtctaaaaagctgttcaggtatgagttggtacccgaattatatctcaataaagttgttagttacaaa

SEQ ID NO: 219088 - DNA, 441 bp, Homo sapiens
aaatgaagctcagagaggtatgcatttctctcaccatatcacctctttttgacactaagagccagcacaggaaagtaaagcagtgcttctcacacttaattctgcataggaattgcctggagatcttattaaaatacagattttgatagagtaggtctgggtggggtctgaaattctgcatttctaaccagctcccaagtgatacccagtccatggaagaactttgagtagcaaggtcttaccttgtctctttgacatgcttctctctgcctttgccttatttccctttctacttcttgccttcatctagctttaaaaaacttcctaacaggaatgtcccacaagcgtgagccagtatatttgtcattctcaaaaggatttatagcattaaattcactcagataacaggtaattaatgcagaattcctctgtgcaatattc

SEQ ID NO: 219089 - DNA, 602 bp, Homo sapiens
tgtgttcagaaaacaatgtgagtctccaattgagcttttctctgcagtccagtgggaagcacagaaacacatgtttcatgatgaacaaagtttaagaggggtaggtttcttcttaatttttcttcttgttttctttacttgaaaaaaatatctgatgatattgtctgacaataaagttagaaagaagcagagctaacagactcgttaggctatcagaaaggctttagtatcatagatgtcatatttagtataatagatgtcagaggctcccacaaagttcataaatattatattgatagccttaaagaagagtgtaattgaatttagattttgtctatgtgtgatttggtggaatatggaaagcctttatcctttactttttttgccattctactaacttatgtatctaaagaaaactgttgctttttgatgtcttattcaagaaccaaagtggagtttttatttttttttcagtggataatgggttgtttgtgagtaagtcacctttacagcatattataagaagtactatgaggccgggtgtggtgggtcatgcctgtaatcctagcactttgggaggccgaggcaggcagatcacctga

SEQ ID NO: 219090 - DNA, 392 bp, Homo sapiens
cacctcccgggttcaagcgattctcctgtctcagcctcccgagtagctgggactacaggcgcccgccaccatgcccagcaattttgtatttttagtagaaacggggtttctccatgttggtcaggctggtctcgaactcctgacctcaggtgatccacctgccttggcctcccaaagtgctgggactccaggcgtgagcacctggcctgttctgacatattcaatagtgtcagggttcttctgtctcctgaaatgaggggcctgttgaaagcagtaggggtgtggaagaagaacagagggtaacatagaaacgaggcagcaaacacttgcacctgctacctgcgcccaggctgccgtcagtcgacgcggccgcgaatttagtagtagtaggc

SEQ ID NO: 219091 - DNA, 284 bp, Homo sapiens
accacgcagaatcctctcttcaacaccaccttgtctgtggtggttgtgcccactccctccactgcccacactgctccagactggtagtagccaatacgtgcctcctcctacctacccaacacattcaggtgctcggagcgatgccctgcagatggaccgaagtctgccatttgattactcacgttctgtttcctgtttctcttttcttactttcttgaaggttatttgaacatgttttagggttgcatcttgatttatctgtagtgcttttgaaccatatcgct

SEQ ID NO: 219092 - DNA, 352 bp, Homo sapiens
ccttgtgatcaaggtcaggctcttaaagtaatgtgatcattctgtacacattagaagtataccagaaggctgggcccgatggctcacacctgtaattccagcactttgggaggccaaggcaggcggatcacctgaggtcaggagttcgagaccagcctggccaacatggtgaaaccccgtctctactaaaaatacaaaaattagctaggcgtggtggtgggtgcctgtaatcccagctactcgggaggctgaggcaggagaatcacttgaacctgggaggcggaggttgcagtgagctgagattgcgcccttgcactctggcctgggcgacatatgatactctgtctcaaaa

SEQ ID NO: 219093 - DNA, 399 bp, Homo sapiens
tcacccacatactcttttgcttttttccaagagaaatggcacattttctggatgtgagagttggtcaaaagatcacaaaaaaagtcaaaaaataattctactctgtgaatgaaaaatggatatttgtacttaccctcataagcattaaaagaaaataatgcatgaaattccatagaaatgtgcctatcatgttatactgactcaaaccagaagacctagagtatgatattgctaatataatacatgtggtgggtatgagtggaagtatgtgtgtgagatttatcattgccatagtgtaaaagagttgaattagcttccacttgactagatgagagctcttagttcttattttgaaagcaatcaattgagcatggttaattaggatatcaccaagtagtt

SEQ ID NO: 219094 - DNA, 181 bp, Homo sapiens
gagcttttgcatggcaaaaggaagagtcagcagagtgaacagacaacccacagagtgggagaagaagatgtaaaagtggtccacaaacatgagaaaatgctcaacatcactaatgatcagggaaatgtaaatcaaaaccacattgcgacaccaccttacacctgcaagaatggccataatc

SEQ ID NO: 219095 - DNA, 664 bp, Homo sapiens
agccggtccttcatctcctcccacctcaggctgtaaaaacacatctgctacagtcccttttgccatgtaaggtaacatattctcagggattaggacttggatgactttaagagccattattctccctgccccagccagttacacttgactgatattctctgagccccgtgtgagcccagcctatgccagttggaaacagagaggaacagggctggatgagcctctttctgcttccaggccccatctgcttatgggaggtcaacattccctctccatccctccaccaccacttccaccccggccctgcccttcacctcccctggtgaccttgcgccctctgtgcaaatactaggctattactcctctcttccccaatgcagcaggcttctgacaaaggaggtgggtctgagaacttatttagaagatggacagaggccatgcctagcatccggccacctggccgcttgtgatgaattgtagggatgggacagagatcagcacacacattgttagtgctttctgggtgccgggcatattccaggcgctttacttatagtaaccatttaatcctcacacccacccttcccggcagataccacactagtttcctcatttgtggggcaccagaaggctgaataactcgccaaggtcagctagtaagcag

SEQ ID NO: 219096 - DNA, 1104 bp, Homo sapiens
tggtgtttggcaaggagtacacagtgggaaccaaggccatgtacagctgcagtgaaggctaccacctccaggcaggcgctgaggccactgcagagtgtctggacacaggcctatggagcaaccgcaatgtcccaccacagtgtgtccctgtgacttgtcctgatgtcagtagcatcagcgtggagcatggccgatggaggcttatctttgagacacagtatcagttccaggcccagctgatgctcatctgtgaccctggctactactatactggccaaagggtcatccgctgtcaggccaatggcaaatggagcctcggggactctacgcccacctgccgaatcatctcctgtggagagctcccgattccccccaatggccaccgcatcggaacactgtctgtctacggggcaacagccatcttctcctgcaattccggatacacactggtgggctccagggtgcgtgagtgcatggccaatgggctctggagtggctctgaagtccgctgccttgctggacactgtgggactcctgagcccattgtcaacggacacatcaatggggagaactacagctaccggggcagtgtggtgtaccaatgcaatgctggcttccgcctgatcggcatgtctgtgcgcatctgccagcaggatcatcactggtcgggcaagacccctttctgtgtgcgtaagtatgtcatccactctccctagtcatggggctcagattcaacatggactttctccctgtctcttaattagattagctagaggtttgttttaaatatatatatatatatatgattgctattttttttttcaaaactgaaagcattgttgatctaatgttttcagttctctgcatcattaatcactgttttcacctttattatttccttccttgtgatttcttttggtttacatttttgttcattttctagcttttgagtaggaatttaattcatttattttcattctttcatttctattgagttttattgctataagtgcttaagactatgaaatttcctctgatcactgctttaattgtatcctatagagtctaataataaatgtttattatttattagaaattctgtaa

SEQ ID NO: 219097 - DNA, 5463 bp, Homo sapiens
tggtgtttggcaaggagtacacagtgggaaccaaggccatgtacagctgcagtgaaggctaccacctccaggcaggcgctgaggccactgcagagtgtctggacacaggcctatggagcaaccgcaatgtcccaccacagtgtgtccctgtgacttgtcctgatgtcagtagcatcagcgtggagcatggccgatggaggcttatctttgagacacagtatcagttccaggcccagctgatgctcatctgtgaccctggctactactatactggccaaagggtcatccgctgtcaggccaatggcaaatggagcctcggggactctacgcccacctgccgaatcatctcctgtggagagctcccgattccccccaatggccaccgcatcggaacactgtctgtctacggggcaacagccatcttctcctgcaattccggatacacactggtgggctccagggtgcgtgagtgcatggccaatgggctctggagtggctctgaagtccgctgccttgctggacactgtgggactcctgagcccattgtcaacggacacatcaatggggagaactacagctaccggggcagtgtggtgtaccaatgcaatgctggcttccgcctgatcggcatgtctgtgcgcatctgccagcaggatcatcactggtcgggcaagacccctttctgtgtgctggtgtcctgtggccatccgggctccccgcctcactcccagatgtctggagacagttatactgtgggagcagtggtgcggtacagctgcatcggcaagcgtactctggtgggaaacagcacccgcatgtgtgggctggatggacactggactggctccctccctcactgctcaggaaccagcgtgggagtttgcggtgaccctgggatcccggctcatggcatccgtttgggggacagctttgatccaggcactgtgatgcgcttcagctgtgaagctggccacgtgctccggggatcgtcagagcgcacctgtcaagccaatggctcgtggagcggctcgcagcctgagtgtggagtgatctcttgtgggaaccctgggactccaagtaatgcccgagttgtgttcagtgatggcctggttttctccagctctatcgtctatgagtgccgggaaggatactacgccacaggcctgctcagccgtcactgctcggtcaatggtacctggacaggcagtgaccctgagtgcctcgtcataaactgtggtgaccctgggattccagccaatggccttcggctgggcaatgacttcaggtacaacaaaactgtgacatatcagtgtgtccctggctatatgatggagtcacatagagtatctgtgctgagctgcaccaaggaccggacatggaatggaaccaagcccgtctgcaaagctctcatgtgcaagccacctccgctcatccccaatgggaaggtggtggggtctgacttcatgtggggctcaagtgtgacttatgcctgcctggaggggtaccagctctccctgcccgcggtgttcacctgtgagggaaatgggtcctggaccggagagctgcctcagtgtttccctgtgttctgcggggatcctggtgtcccgtcccgtgggaggagagaggaccgaggcttctcctacaggtcatctgtctccttctcctgccatccccctctggtgctggtgggctctccacgcaggttttgccagtcagatgggacatggagtggcacccagcccagctgcatagatccgaccctgaccacgtgtgcggaccctggtgtgccacagtttgggatacagaacaattctcagggctaccaggttggaagcacagtcctcttccgttgtcaaaaaggctacctgcttcagggctccaccaccaggacctgcctcccaaacctgacctggagtggaaccccacctgactgtgtcccccaccactgcaggcagccagagacgccaacgcatgccaacgtcggggccctggatttgccctccatgggctacacgctcatctactcctgccaggagggcttctccctcaagggtggctccgagcaccgcacctgcaaggcggatggcagctggacaggcaagccgcccatctgcctggaggtccggcccaatgggagacccatcaacactgcccgggagccaccgctcacccaagccttgattcctggggatgtttttgccaagaattccctgtggaaaggggcctatgaataccaggggaagaagcagccagccatgctcagagtgactggcttccaagttgccaacagcaaggtcaatgccaccatgatcgaccacagtggcgtggagctgcacttggctggaacttacaagaaagaagattttcatctcctactccaggtgtaccagattacagggcctgtggagatctttatgaataagttcaaagatgatcactgggctttagatggccatgtctcgtcagagtcctccggagccaccttcatctaccaaggctctgtcaagggccaaggctttgggcagttcggctttcaaagactggacctcaggctgctggagtcagaccccgagtccattggccgccactttgcttccaacagcagctcagtggcagccgcgatcctggtgcctttcatcgccctcattattgcgggcttcgtgctctatctctacaagcacaggagaagacccaaagttcctttcaatggctatgctggccacgagaacaccaatgttcgggccacatttgagaacccaatgtacgaccgcaacatccagcccacagacatcatggccagcgaggcggagttcacagtcagcacagtgtgcacagcagtatagccacccggcctggccgccaccaccgccaccgagagccccgcctccagcagccgttccccagggggcaggaagtaggctcccctgagcacagtgcccagtgcccatcttcgttcgtctccttgcctgtgtctgctactgctgggactcaggccctcgccctgccgccatctatgccagttaccctggagaggactcctgccgtgtcctgaaaaggcagaaaaggaagaggggctgcagacagaggaagaaagtttatggatttaaaatagcaaagcaacttgtggatctgtgtgtgtgtgtgtgtgtgtgtgtatgggcctgatcacacacaaacacacacacctctccttcattcacgtcctatggaagagaccataaaggcttcaaaactagaagtgcgcatgaaggatgcttcatgccctgttccccacacagagaagagatgaagagggggaggtacggtcagctttcaaaacaatatgccccccgcccatcccatgtgtgaggacatggtgactcggtgactgtaacagtaggacacatcccatcatgcggtcagagtgcagaaacccggtcagcgtgcagaaaccagctgtctgctgatgaacggcccatctgcacagcggcagcaaggattaccccaagggcaggaaaaaagtctttggaaatagattgaaaatcagtttctttatttttttcaaacactgttttattgagttctaaacccagtggattaaaaagtcatttgggtcctgggaagcactgggaaagaagggagagccggggaggatagggcaggagtctggccaggagcccaaggtcaagtctggctgtcaactgacaaagagaagagaagacaagtctgtggcccagacagggtgccaagtctgggggcagcagcagggtccttgagagaacaggggagcaagcctgccccagtacccaaaaaacaatggctatcatgtactggggttattctctgtgcctgacactttacctatagtatttctagtctgcacaataacaccaaaatgtaggatttgttattcccctttgacagatgagaaaacagaagcctgcaaaggtaaagacagagttaggaagtgtggagtcagaatgcaaacccagatcagtctgccccaaagtccactacaccagctgccagaaaccctgttctagaaggggcagctaagaagggaggagccgatgaaactctacagtagcactgtggccaggtctggaaagccaggcaagacacctgtgtgtcctatctgggttctgctgtctccgcgtaggcagcttcggggcaaggattcaactccccaggcctcccacggttggtgctggctccttggctcccagcagccgctgaccatagccagcaaaagacctggcaggtcctgaatcaaaacaacagagtggctgaaagtcacacctctccagctccttgcgagtgggtttgattgattttgacagctatatcatgcttgggtcgttcatgaattccatgagaattgttgggaagttcatgagtttaggaatcaaagtatagcatttagggccactttctctgtcctcgggaaggcccccacaagcttaagcccctgtatacgtgtgacatgctggcctcagagattcatgtcacatattgaaatagcaaatagaaatgtgcaggagcggagggacagcgacacctggttcttaagcaaattctagattggaacaattagaagatctgactgatgttaagagtggccagaggaaagtgagaggcgtccatttccagcagacacaatggaggctgacagaggcaggagcctacccctggccacaccacctctgggacacggcacccccctgggcctggagggagagggccaatccagacacactcacactctcatctctttccttggctggaaacaagtgcaggaagctcccctcccaatttcttatgctcccttcccccttacactcctctccttcgactgctcccttcccccttcttatgcccctctcagaccacccagcggatgcctattcccgccccccacccctcccctgcgtctccttgtaaagttccatgagatgctcgaggagcacctgctggtggggcacccagcactctgctgggcatcaccctccgcacccctgacatttctctccacctccagaggcttggaagggaacagggcagatgaggcccttcacccaccatctacgccatatacccatcaccatcccatgaggaaaaaaaaaaaagtaaaacaaagacaaaaaaaatcttttgtacagagatatatttttattatacaaagtttgtacagtaccaaaaaagaaaaaaaaaaggtgtaaatttttttttcattattgtaggtaaacggtagtggaagccttttttgtaaatgtaataaaatgtataaatatggttttcagaaaacatcaagtgctgtaaatatgtaatctacacaccttcttggcttgtctgcagtatatacatttaatttatctgtctctgtatatgaggcttccccctggggtcctgcattatggtactttcctgaatttgaaagcaattttaaattttttgaattcaaataaaatataaatttttgcattg

SEQ ID NO: 219098 - DNA, 442 bp, Homo sapiens
tgctggaatggggatttgaaccgaggtccatcaggattaaccagtgcataaggccttagaggccaggggcggggccccaggacaagcatgggagctgcttggggaaagccactccatttctgccctgcagcctttgcccagcccgccaagtccgctgctctctggagccagagggtggccctcaggctggtggcctgcctctcccgatggggcctgcctgcaactcgataaggctaggggaaccctctgctaattgtctggtaacctttgaaattctccttcacggtgggttctcttttcggatgtttttcaaggtaattcattccttttccataaattgccagtggcggagcattaggcagctggtaattaatcataggagcagcttcgagttgattctttgaaaaagaaaaaaaaaatgaggaagagaaagccttggtga

SEQ ID NO: 219099 - DNA, 327 bp, Homo sapiens
catacccagcttaaatgcatataggttttataccttagtctattctaatacctcagtaatgatgaaactgatttctaaagtttccaaaatcattatttttggagaaataccaaatacttgaaaagttccaagaaagcataacggtgagataatatattaagagccatatatttgtaaattagaagccaacttagctgacttgtacattaattgaactttctataggttctcagttctctcaaaaggcccataatttgcttgtttagatttatctgctaattacacttttcaaatatatttccatttctgtagcagtcctagattcga

SEQ ID NO: 219100 - DNA, 277 bp, Homo sapiens
taatgtaataagctgagggaacttactgtagagtctacagtagatcactttgccttaatttctatgtctaaaaaatgaaaagcatgcttgctgaaccacataggcacactgtaaagaaggaactgatacccttttaagcatttaggaaattctggtataaagtagtgccagcttaaaaagatgtactgccatataatgaactgaaatttacattatgtgaaataaatagaaaattagcggccaggcatggtggctcacgcttgtaatctcagcactt

SEQ ID NO: 219101 - DNA, 461 bp, Homo sapiens
tttaaaggatgaattctttgtatttctcttgtgaaccaaggcttagtctgctctaccacgtttttttaaaggaggcttttatcactcaatttacatcagtgagtgaagctgcaagatatttttcctctttcggaactgcgtttttccaccctgagatattacacataaggctctagagtgtgactatgcctcagggtcgtgggactttcattgtcaacccaatcattccaaaactcaaatctctgagtttcctgtgttatttaataacattttcaattaggctgcatctatcaaggtctggtttgcgtttaggtaaataggtgagcataaatgcacacttcctatctaggatggatgggagagtgtacgccatggaatattccctatcaggttcccatatttgggtaagagttggcttggagttgaaacacaatagggtagttggacctgaagaaatataa

SEQ ID NO: 219102 - DNA, 155 bp, Homo sapiens
gcacacgcctgaagtggacttatgtctgcagggtggacactgtgccctgtctcctccacctggcgtgtgagtatgccccctggtaatgcagttcacccagatcttcaaatcaaaccatggcataccttgtctgtggatgtattatgatggggtga

SEQ ID NO: 219103 - DNA, 493 bp, Homo sapiens
aaaaccctgtttttctccccgcaccctgctccaggtattcttctctgactcctcacagatcttagctaggaagagtctattatacatattacaacaatataatcccttacgtttttatggtgttttagagtttacaaagcagtctcagatagtttattccctttgatgctctcagccaccctgtgagatggggcagagaagaaatgaagtctcagttcctgctgcagatggttgtagagtgaagagcagattcccaggttttccaaatcaaagtctgcttttgttctattacattaaacgtacatttgtaatacaaaatctgtcacctattaaaatatctttgcaggtttatcccaactaggtgccatatcttataaaaagaaagccctagggatcgttaactaaatctttcaactgcctcaaagatcccttttattattattattattattgccctatctgctgatttcctactggtagaaaaagaatctgg

SEQ ID NO: 219104 - DNA, 387 bp, Homo sapiens
tggcacatgtatacatatgtaactaacctgcacattgtgcacatgtaccctaaaacttaaagtataataaaataaaataaaataaaaaaaggaaaaagaaaagaaaatggaaacacaaacacacaacccttgtaggaatgatctggggaccttctcacaaggtgcgggaccacagggcaatttcacattgctagccatcacatgctgtgcagtgcttcttttccagggaggcttttggctttccgcagaaaccccatggaaactgccactcaaactttttcatcctaagaggagccatccagaatgatttcatgtaacagcagtgacctgtaaaattaattccaaacaacggatactttctgtgtcccctataaatgttcaaattac

SEQ ID NO: 219105 - DNA, 123 bp, Homo sapiens
gagccgagattgtgccactgcactccagcctgggcaacagagcgagactccgtctcaaaaataaataaataaaaatagatgatcatagacaggagggatgaagtagaagattcaaagcagctt

SEQ ID NO: 219106 - DNA, 422 bp, Homo sapiens
cgagcggccgcccgggcaggtacctcacagaggtcccaagattatcaaataaaagcacacacacagggtgtgaatgtgccatcgtgaagcaccaaataatgtataaacatcagcatatttaataaaaataaatatgtataataaatatctcatttaatcttcaatgatgtcaaggcctttaatctcagttttagtagatgccaatactgaggctccaagagtttgctgttaacacccaggattatatggcagatttgtatccccagtcccagttcataaggctccaaatcaatggtcatttgacttaatgggttgtgaggtatgtggctgaaagtcattccctacttatcatcaaatattaaagtctggaaatttaaaaaataaatataatttagaattatattcaattttgaattatacaa

SEQ ID NO: 219107 - DNA, 831 bp, Homo sapiens
gaattttacatttatacacatacacacacacacacacacacacacacacacacacacacagagaaaattattgctaaattaacattccatgatcaataagcaacatggaggatgacgacataggtgctgcaatatttagcccatacaccattttgtatgattacaaagtactaaagaaagtgactgtcatagcatgtgacatttgggggatttcaaatatttttacagaatatacacttaagctggcccagagttcaggtgttaatgatagcactctccactcaacacccacccccatcaagaagcaacaagacagtacagttaagaacacaggctttgaagccatgttctttgttaccaaaaaaaaaaaaacagtcttactttgtcgcccaggctggagtgcagtggcacattcttggctcaccgcaacctccgctgcctgtgtcaagccattctcctgcctcagcctcccgcgtagccgggactacaggcaccccccattgcacccaactaatttttgtatttttagtagagacgggggtctcatcatgttggccaccctggtctcgaactcctgacctcaagtgatccacatgcctcagcatcccaaagtgttggcattacaggcatgagccaccacattcggctggagccatgttctaatcccagctctacttctcactagctatgcggttttaggtaagatattaatacttaagtgctatgaatctcagtgtcaccatctatacaaataggactgagaacacctatctttcacagtttaaggtgagaattaaaagcattcaaatatatgaaaggtcctgtaagtca

SEQ ID NO: 219108 - DNA, 595 bp, Homo sapiens
tgactgtgaaaaggggaaggggataatttgccactaagtaggggatagaaagaaaggttgccatctttatacttttcaaaataagagcacgggatttggatttataatcctaacttttgttaatcaaaagctgtgaaactatgaacaagcctcaacctctctcagtttcctcatctgtacattgtggggaaatttcctaagtcataagattgcagttaaggttcaatgaattaatgatgtcaaaagtgttttgaaatccacaaaatgccaaacaaacgccaatcattacaaagttgtctgtcttctcatcagtttaccagctacataggacagtggttatttaccatttgacaggtgagatcatcaaagcccagagaaagtgcttaaagtaacacacagctcaattctgacttcttacagcagaggtaactgttcctttactacaggggttcttaattagcctgcttgcctcattaaactgacagatctctgagggaggggactacatacatcttacacatttttgtaccccagtgcccatcatggcacacctaaaagatgtgaagtgttactagaatgatgactaacatattgg

SEQ ID NO: 219109 - DNA, 648 bp, Homo sapiens
  misc_feature (606)..(606): n is a, c, g, or t
catatctgttgtagcatgtaccattatttaattcattttgatggccaaataggattccaatataaaatgtacttaactgtttttccttatattaactggttgacattttgacatttgagtatttccatttttcatatttggttataacaaacaatgttccagtgagtctttgtgtgaaccaacattttcatctcttttgggcacatgagtgagagtggagctgatgcaccaatatggtaattccatgttaaacatttcgagaaactaccaaattgttttgtaaagcggctgtgctgttttacagttttatcagcagtttgtgagggttctatgtttacatctctgccaatgcttacttttgtttgttgttaaatcattctactgcataagaagggatatctccctgagggttatttttttgagacagggcttcacttggggacccaggctggagtgcaatggcatgcttatggctcactgctgcctccacctcccaatctcaaatgatcttcctgcctcagccactctgggctaagatgggaggatcacaggagcccaggagagggaggccaggcttcaatgagctatagtcataccacctaattncaccttgagcacagagtgaggccctgccctttaatcaaaatt

SEQ ID NO: 219110 - DNA, 443 bp, Homo sapiens
agtctgatttgcctaaatactgctaggtcgccttcttaagagtatgagaaactccactttcccatgcctgccagtttaaagtgttgactccgtacttggctattacagatggcataaagtgtgagctcattcctcttcattcatttattcaacaaacaggccgggtgtggtgttctcaggcctgtaatcttgacactttcggaggccaaggagggaggatcccttgagcctaggagttcaagaccagtctgggcaacacagcaagacctcgtctctaccaaaaaaaaaaaattaagaaattatccaggcatggtggtgcaacctgtattcctagctacttgggatgctgaagtgggaggatcacctgagcccaggagttggaggctgcattgagctgtgattgagccactgtactccagcctggactacaaagtgagaccccg

SEQ ID NO: 219111 - DNA, 201 bp, Homo sapiens
tatggccaggtgtggtcctgtggctcaattctggccagtggaatgtgggtgaaaggagtaagtgcttcttctaggccagcccacaaaaacctcctgggtcagtgtcccaggtgccttctccctctgttggcttagagcagccagtcatagtggtcttgggggccatgtgttgaaggtggcagagtcagaagagggaaggag

SEQ ID NO: 219112 - DNA, 526 bp, Homo sapiens
ctagaattaaaggaatggtagggtttcctgtggtaccatattgaaaatctgtctcatatttctgttccactttagctcccaagctgtccttcattgaagggagtgagattgaattggggataccaggaacctggttttgttttggatgatttttagtaagttatttctattgaagaaacttcttcaataagaaaatacaaactacataagtgcccatgattttctaattaagcaagttctgctgttactgtggggtcactgatgactaacaatctcattcagtctctggggcccacaactattctgatatttcaacaactagaaggaaaacccgtagcctatggacatgtgaatgccaattattctcttgaacatgacccagaaaaacctgcagcacacctgccaactctcacaagcaggtgctagccttgtgtctgtgtccctgtaggacactgatcctttttcttaccatttacagggattctcaaactttcaacatttctgtgtgattgaattgcaatgttac

SEQ ID NO: 219113 - DNA, 343 bp, Homo sapiens
tacctcagaatatgaccttatttagaaatagggtctttacagagataatgaagttaaaacaaggtcattagggtaggctctagacgaataggactggtatccttacaaaaagtggaaatttgcacagagacagacacacacagagggaaggcaatatgaagacggaggaagaagacagtaatgtgactggagtgatgaatctaaaagccacgaaacaccaaggattgctggcaaacacgtaaagctaggagagacaaggaaggattctcctctagagccttcagagaacaagacacttgattgtggatgtctaacaacctcaactatgggcagtaagtttctg

SEQ ID NO: 219114 - DNA, 554 bp, Homo sapiens
acctccaagtttgcatttttttctttgtcggttttggtttctgtctttcatgttagaggctttcctcaagtattttatgattccaggactctggaaagatgtctgttaaaattagggcatactgagctctgatatgctctgcctgtaaatttagagtttggattgtttgaagtttttgatccttttaaaggaattttgcttgtttacgctggagtgttcagatcccttttttcttttccaatccttttgtgaaggcccaggaggtatgcagggtcttcccagggtagaagcaagttgaagtgttgatgtcacatataccattgctgtttatggtgttgggagcacagtttgaattttttcttaatcaggtgcttaaacaaatagcttgtcttatgtaacaagaaatttggaggtaggccgtcactggcgtgggttcacgagatcaacactctcagagtcagcatatgtgcaattgttttggactttcctttgtagttataaggtgatagttgcagttctaaccatcgtgtttgtatttaaggcgcaaaaaaaaa

SEQ ID NO: 219115 - DNA, 686 bp, Homo sapiens
cctggctccaaaaatgctttatgatacttgtcctttgtccatcttagtctctgtgtctaaaattagcaccaacatccttcccaggcatgactgagttggatgaaggttataagggtagaagctctctttctggtcagctcttacagtgcctagaacagaactgcaggaatgcatactttttagaatctttatgaccccaattaagtaaaccctattaaggctcatcttcctatttcccctctctccgtttccctatttgaggaggggtaagtatcagaaagagagaacctgaactgaacaggaggaaacagaagttccacatcaactcactacctgtcagccttggtatcaggggtgcccacctcccacccctgccttgctggcggaaccgagaaactcggaaaaaaacaaacaaaaaaacaactgttgtagcttggagagaattaatagaactaggattccatggatgtgaaagtcttcctcaatatgctaaataaaccaagttagataacagtgcagtttgtaaagacacttttttcccacggtttctatcttccagtttgggcagagggcaggaaaggcacaattcttggaacttgaataaggaacagaaattcctaatttagcctcagaagagacatctctgaaaaatactctaccaggaaaaactgaagtgtaaaatgata

SEQ ID NO: 219116 - DNA, 734 bp, Homo sapiens
agcggtggctcacgcctgtaatctcagcactttgggaggccgaggtgggtggatcatgaggtcaagagatcgagaccatcctggtcaacatggtgaaaccccatctctactaaaaaatacaaaaattagctgggcgtggtggcgcacgcctgtagacccagctacttgggaggctgaggcaggagaatcacttgaacctgggatgtggaggttgcagtgagccaagatcatgccactgcactccagcttcgtgacagagcgagactccatctcaaaaaaaaaaaaaagaatcttacatgagatgaagcagctagtgccactccccatgctctcttgtccaagaatatggcagaagtggacgtgtgtgggatttttttgtatatccattgacacttttccctttaaattatacatttgaccagtagatacctatcttaccttcaagttgaaaacataccaggttactgttatatattctgaaatttgaggtatgaaactgatcataaggtcaagtgtggtgctgactcgtgcctataatcccagcgccttggaaggctgaggtatgaggatctcttgaggccaggagtttaagatcagcctgggcacatagcgccccatctctacagggaatgagcaagttatgcttgcggcgaatttgagctacttggccaatcgcccatagggggcgtatacaataactggccgggtttcaacggtggatggggccctgggtt

SEQ ID NO: 219117 - DNA, 584 bp, Homo sapiens
aatttttttccaaaaaaaattttatcttagtccatttgggtcctgagtttgggacactgcatatatgatcccgaagctctattctagaagtattattccttatccagagtatcccacaagcaagactgctccaagcttatatatatcatattaggcacggagggggacagggacatgtctaaaaggtatgctgtgaccctcacgcaaacattatgatccctaactctggacccctttggtgaagaacatgaagtcgagaaactactcgaactttatcagaaaatactgttgaactctccacagtgtttcccaactccttcctccttataattccttcaacaaataaactctttaatttcctaagcagtttctgtatctggtttttaaaaaatcaatccaaatctacaactggcatttgataacacagtggtcctgtaaggattaactggcatccttataatcttaaatcttttataacatggtatatccctccatttaaattatttaggggagaggtggctggagaaaaaataaattatttaggtctttttttttttgagacaggatctcactttgtcacccag

SEQ ID NO: 219118 - DNA, 394 bp, Homo sapiens
aatcagcttacggttgttgccagcattacacagtcatagaaagctttaccaaaaccgaccaggccaatgtgtatcaggaaatccctttcaatccccaaatctggccggcgtgctcctccagctgggacgttggctaaagaggcagcggaaaagactgtttattatggcggtctattcccagcatggtcggagtggaaaggctcttctgaggttaactagttcatccttccacctcctgacaaagctgccttctgaccaggccagcaaagagcataattctgacaaagctgctggagaaggattcccccactgcagtgctcacccagcccatgttctactcagtcagaccttctgacccaaatggttaagacaaaaaggacaagaaatctgtttt

SEQ ID NO: 219119 - DNA, 415 bp, Homo sapiens
gtcacaaaaaatttagcccagatgaataaatgaagttaagaagcatttgaagaaagaaaggaagtctcccaatttttgctagtttattaagctagtgcttgcattggaaagtagtgaaaaatctgttttgtttttaaaggcaaaactaggcaaaatcgcacttggcttaggttttgatgggatagtcatttggcttttaaaaatgcatcctacagatacaagagcatgcacagactaggaaccggcatgacttgtttcaaagttaaggacacaaatatggttataatatagtcatctccaccctacctccaccaatcaatcatttactcccctgtacctctttttagaaaacaaaacaaaacaaaataaaatgatatctttctttaagacccaacttcgctttccctgctaggca

SEQ ID NO: 219120 - DNA, 541 bp, Homo sapiens
ctatcattatatattacatgactgtactacctcatggggctgctcctggaattaaatgagttaaagcagtaaattgtttagcacactgcctgatacagagcaagatctcaacttagttgtccttgctgttacttataaggttggaaccagcaagcctgagagaagctccttggttttattgtagagatcagaaaaatcaagaaagaggtgaaatagtaatagcatgcttggtaaagtgctttacagtttctgtgatgtattttcacgtgcactgtctcctttaaaggctagaggactggccccatctctcgccacaccatttatgattgtgtgcatatcatactgagaggagatttggaagttatccagggaatgtgatgtgtatagaccccaaacagaaggaacgttggggactttccatcttagctggagaggagcttgggatggaggataggaaggaggtcaccgggggtcactgctgccttactccttgctatccacagaagaattccacaggaggcagaacagtgtgatggggagt

SEQ ID NO: 219121 - DNA, 653 bp, Homo sapiens
  misc_feature (240)..(240): n is a, c, g, or t
aaagtacaaaattgagctgggcattatggcaggcacccgtaatcccagctacctgagaggctgaggcagaagaataaaaggaaaccaggagatggatgttgcagtgagctgagattgcaccactacactccagcctgggcgacaaaccaagaatctgtgtcaaaaccaaaccaaaccaaaaaggagggactcagagagccagagaccagggaaggacaagccactcccgtaccggtgttnccctttgtctgctcccagacagctttctcctgcctcccagctctgcatctctcagatcctggctctgatcccacgctgctgttgcttccactcatgtacccattgctaacggcatcatttcttggagtaattcattgcaaagttcatttcccacgataaacgcagtctgtgctcattacagtcaacagggtggcccaaaagagttcagttaagggaaaaaaaaatcaaattttcccttgaaaagaagccagtgatatggcttgggtccatcttcctgaggtttgaaaacttctctgttagtgttagttgcttttaggcctggtcctgctgcatatacaatgtgtatctttctctctctctttttttttttttttcctttttggagatgagacaaggggaaacaccggggactc

SEQ ID NO: 219122 - DNA, 372 bp, Homo sapiens
agtgtgttgtctcacatctggtcttatcccacgctcgtggtcgatgacagcttatgctccgatgatctcaggggtatcttcttggagtgatctgtaggcattcagtttgcacgtagtacgtcgttctgtgctctcttgagtgggaagggtggcccaaaagagttcagttaagggaaaaaaaaatcaaattttcccttgaaaagaagccagtgatatggcttgggtccatcttcctgaggtttgaaaacttctctgttagtgttagttgcttttaggcctggtcctgctgcatatacaatgtgtatctttctctctctctttttttttttttttcctttttggagatgagacaaggggaaacaccggggactc

SEQ ID NO: 219123 - DNA, 1011 bp, Homo sapiens
gaagatttgttctattcaatattaagttaggcttccttcctgtattcatcaaattgaactggatggaatacgagtccctaatccaacacctccaactggagaaatagtctgctgattctcacagatctcatgtcctgcttagtgtagataattttcatatggattataatgaataatatgaatttaaacaattcactagaagcctaaaacattttgtttgaagctcttctttgtccagctaaaaataacttctggtctacaaggctaccatcataattgagttctacatctccagtcacaagtagaaccaaaattacagtcaacgtacaataattctttatctcttggttccagattttcctcaattatttatatctctctattatggtctcatattcctttctgttacagagtttcagtctatgttgagtcaagcaattttagggctgcttaaactctggttcattagccatggtccactagcatccatgtcatggcactagggtttaatatggttaataggatcctggctggatgaggaagtatattgaaaattaaactttaaattaaacataaaacactaaaaattattagaagcattaaaaaataaatgtttccatatatgggttagaaaatctgactttattttgatcctaggggctgctggctgtagtgaaatgtataaaaaggagagtgtgatcctagtttctgtctctaactatgagttacttgtgattaacttcaaatattctctccataagaagaggcccagaagaagaagatgagcttcagttattctagcacaactgctgtgatatttgtaaatattcaaaacctataataaaatgtataaaaggaaactccatttgaaatgatttgaaatctcacatggaaatctattttttttaaatcagagcttagtaagagaaaataacagaacattgtaataattgaattacaaaaacaactgaattttggaaaatttattttctctcatgtgatgtgtgtgta

SEQ ID NO: 219124 - DNA, 671 bp, Homo sapiens
tctcacctgaggccttcacctgagagctggagcctgtgcgatggattatctggacagggaccccaatgaacagggctctgctggagtgaggaagctgactgagggaagaaccagaaggctgccaaaatacaattgtgtgcctttaaaggaaataacaacaagaattaggagcgccctggaggcaaggtctgctgctggggaaaccaaaccacagtaacttcagaaatatatacttggaatatgtcatgtattaatgggtaaagacaccgtggatatgaaggaaatcacctatgggagaatattaagaagagaagaaggggctgctggctgtagtgaaatgtataaaaaggagagtgtgatcctagtttctgtctctaactatgagttacttgtgattaacttcaaatattctctccataagaagaggcccagaagaagaagatgagcttcagttattctagcacaactgctgtgatatttgtaaatattcaaaacctataataaaatgtataaaaggaaactccatttgaaatgatttgaaatctcacatggaaatctattttttttaaatcagagcttagtaagagaaaataacagaacattgtaataattgaattacaaaaacaactgaattttggaaaatttattttctctcatgtgatgtgtgtgta

SEQ ID NO: 219125 - DNA, 461 bp, Homo sapiens
tctcacctgaggccttcacctgagagctggagcctgtgcgatggattatctggacagggaccccaatgaacagggctctgctggagtgaggaagctgactgagggaagaaccagaaggctgccaaaatacaattgtgtgcctttaaaggaaataacaacaagaattaggagcgccctggaggcaaggtctgctgctggggaaaccaaaccacagtaacttcagaaatatatacttggaatatgtcatgtattaatgggtaaagacaccgtggatatgaaggaaatcacctatgggagaatattaagaagagaagaagatgctctccacaccagtccatggctgccgtggtgtcaatgattcaggactgtttttttaatctcttcaattcctcttccagagacatgaagttaaaaccaggtactatgagtgctcacttaatatttggttcttacgaaggtat

SEQ ID NO: 219126 - DNA, 347 bp, Homo sapiens
agttttgctcttgtcacccaggctggagtatagtggcacgatctcggctcaccgcaacctccaccccccaagttcaagcaactctcctgccttagcctctcgagtagctgggattacaggtgcctgccaccatgcccagctaattttttttgtatttttagtagagacaggatttctccaagttggcgaggctggtcttgaactcctgacctcaggtgatccacctgcctcagcctcccaaagtgctgggattccaggcgtgagccaccacgcccggcctcttttctgtctttctttcctgttttcttacaccctgtctcttccctttttccttctgtctgtctctc

SEQ ID NO: 219127 - DNA, 331 bp, Homo sapiens
ttctcaaatacagtgtttgtcattttccaagctctgaaacgagtgctttttaatttccaagatggtaatctgatcagaagtacttggttcatatgctatctgatttaacttgaccttcctcccccacacccactccccttgagtagtgatccatttttctttccaatccacattattttaaaatcctccctatggccctttaccttctatgccttttagcatctggcacccacatatgttctgtttattctgttgatgtgatgccagccaaccttctaatcagtacatggcttcttactcatttttctcaattttcttttttttttttttt

SEQ ID NO: 219128 - DNA, 433 bp, Homo sapiens
aaactagaaggactgcgattagattaggcaaggtgggaaagggataccggcaagtaaagcgccggaaacttacaacttgggttattttctaactggcgtcttgcaaagggacaccatgtaggtatcccgctcgtcaacttgtaaatgaacttcaggttctctttggtggcaggagaattctgaatgtgagaacctggcggccgttcaacgaccccgccctcggggtccccagggggcgtcctccggcaagcctgattgtctgcggccaaggcgcagggcgagcagggagggaggaggagaaccagggccggtggccccgaaagcacacacaaagcggcctgactcctttggtgggaacttccccggccgccagcggagcgggagcgggagggggcggcggagagggggggcggcggttcccctcgccgaggcg

SEQ ID NO: 219129 - DNA, 1028 bp, Homo sapiens
ggtcattttgagtagtaattttggagttctgttttctctcctttccctcttccatgttcccctctctctatctaataggtgtcctgttgcctctccctgttccctctacctaccacttaggtaagaatcaggtgtaaaaacagtgggtcagactgggcatggtggctcacacctgtaatcttagctctttgggaggccaaggcaggaggattgcttgagcccaggagttggaaaccagcctctcaagatgtagcgagaacccatttctacaaaaaatatcaaaaagaaaaaaaaaaaaaaaggcaggcatggtggtgcacgcctgtagtcccagctacttgggaagctgaggtgggagggatcgcttgagcctaggagtttgaggttgcagtgagccgtgattgcaccactgaactccagcttgggtgacagagtgagactctgtctcaaaaaaaaaaaaaacaaaacacacacacacacaccaaaaacagcgagttagattaaggatatcacacatcaagtcggtcagttgtttcatttcctgggctggaggccttatcacagtcctctccctctcttagttctgtaactttctcaaaatattaaactgtcatcagcaaattttataatctctttgtaggagtcaaggtggcacatcctcattcccagcctcaagcattgaactggttccattttaatggagcacttttcgtttttgttacttcattgaagcctgcatcttggctgtcactgcctgattacagaaccagaattgagtaggcccgtagcttcagccctccttaccattttacatttctgtttagtttctcttccataagtctgtcttgtgttaaatctagataatgtctgtttgtttgtctctctgttttctctattattgcttatacttgggagcagaactgtttcattaaagcctgaatgcactgcactatctggccgttcactggctccttttaagttttgttccatttttaaatatcagatccaataaaagaaaaaaaaataga

SEQ ID NO: 219130 - DNA, 303 bp, Homo sapiens
agatggggtctccctatgttgcccaggctggtctcaaattcctggcctcaagcaatcctcccacttcaccttcccgaagtgttggaattataggcacgagtcactgcatcccgtgccttcaccttttctttacttttccccatttaagaattgttcttccaaacagagaagcctgaggccagccaaaatgtgaacggttctgctttcccaatatgtatccttttgtttgtttgtttgtttgtttgtttttgagacacagtctcactcttgcccaggctggagtgcagtggtacgatctcagct

SEQ ID NO: 219131 - DNA, 388 bp, Homo sapiens
ggaagacactccttcacagggcggaaggagagaatgagtggcaagcgaaggggaaagatggttatacaaccatcagatcttgtgagaattcactcactatcacaagaacagcatgggggttactgccccccatgattcagttacatcccactgagtccctcaataagatttgggtgggacacagccaagccatatacataatgaatgatgatactgttgagccatcatcatttactcagaatttccctgattataaaattaatacttgcttattatagaaagcatgtacataaatataaaaataataaaaatcacctgtattggtccattttcacgctgcttataaagacatacccaagactgggcaatttacaaaagaaagaggttt

SEQ ID NO: 219132 - DNA, 407 bp, Homo sapiens
tcgagctcgctaccgttataggctgcagtgcactccagcctgagtgacaagagagagactccatctcaaaaaaaagaaaaaaaactcaaaaacctagttgtaaaatgtaaatttgaaggcacctgtagtattgtaacatagactgtttctcacaggttaattttggtggaggcataaaagtcattagaatcaaaatgaaggcacttgtgttagaaaaacaaacaaacaaaaagcccccacgaatggagccagtgaacgccgtgaagggagtgttcccacatccatcgaataacaaaaaatatgatagaagacgctgcaaaacccaaaaccttgcacaaagaccagcacaaccttacacaaaaaatacttctgcaaggatgtctgcccagcacctgcctgtccaacct

SEQ ID NO: 219133 - DNA, 491 bp, Homo sapiens
ctctagaatcctgatcttatttagaatctatctggaacctagaataccctgaagaaatacctattaactggctggcttaaaatggatatatattcgtgaggaaaattctggaatacctttgggtataaaatagagagcctgtggatactttgaaagccaggagaaggtgcacaaccaggacctgggaaggcaccgcccacccttccggatcgcctttgggtataaaatagagaaccctcagctttggccagattaggtttagcttaacctccaggggagagaccacagcaccatagtgtctcttgcaatattgcctattaaagcagaggctcctcaacttggaatagggtcccgtcccgataaattcattgtaagatgaagatactataagttgaaagtgcgttttcaatttatgatgggtttatctggatgtaaccccaccaaaaatcaaatagtgaattgaatacatattgcttttgcaccatcgaaaa

SEQ ID NO: 219134 - DNA, 436 bp, Homo sapiens
gcctcgacttcccaaagtactggggttacagatgtgagccaacacacctggctgaaaatatgcttttaattgtcgagttttttcttcttcatttattcatagtctatataaatggcagatagctggtgtagtttattctgagtcctttttataatgaacttggtgttaatggattgagatttgcgctggtccaaggtaaactattgtgtatggtgtaggggcttgacagatggggcattgtggagatccactgatgatcaggttccaaagttctgcattagcattaatgtaattaatataagacaagcaggctcttaatgatcacagagatacttgtctttgacgttaaagtttttatttataggatctatgatttttgtttttgtttttacaattactctttatttgaaacatttttatagatgaatagatgaat

SEQ ID NO: 219135 - DNA, 482 bp, Homo sapiens
catatatttgctaaaattatcttttaaaaaatgcaagaaaataatataaacacaaaattcagcatgtcagagttatgcagcagggtaacgggatggggaggattctatagataggcgcaaacattgctcatgtttaaattcttgggttgggtagttgacttttatcactaacaaagtaataagccagggaatacaacgggtaaatgaaaaaataaaatagagtcatgatgagaccagtgatgatagtatatcataaatcaatataaatcaactcttctcatctttaaaatggaattaataacagtacttagcctcctagggttgttatgaaggttgaaaatcttagaataatgcctggtacatagtaagttttatattagtatttgtgaaagatgaaagagagagagagagaccgagagacagagagagacaggggcgggtggggggcacggtggggggaagaagtaaaagaaggaagaaat

SEQ ID NO: 219136 - DNA, 354 bp, Homo sapiens
tgtggtggctcatgcctgtaatcccagcactttgggaggctgaggcgggtggatcacctgaggtcaggagttcaagaccagcctcaacatggagaaaccccgtctctactaaaaatacaaaattagccaggcgtggtggtgcatgcctgtaatcccagctactcaggaggctgaggcaggagagttgcttgaacctgggaggtggaggctgcggtgagctgagatggcgccattgaactccagcccgggcaacaagagtgaaactccgtctcaaaaatagccaaaatacagaatgaatccaggtattcaacaacagataaatggataaagaaaatgtggcatgtatacacaaca

SEQ ID NO: 219137 - DNA, 463 bp, Homo sapiens
agtgctggctctacttagcacacgcacagtggcactaggacctgcgtgcctggccctcagtgggtagggcggtgctgcctaggcacacagcagcgcttacgggccccaggtgcctactaggctgccttcctcttccccgctgtcagtctgtgtcctccacgtgcttatttcctgtggtgagagcagttgtggtgtttgtataccttgtgccttatgatcaaggtgggccttggaggagggcgggaaaggagcgaccaacatggcggtcctccacccctcagcgacacccaccgcccgagaaactacagacaatggccacaagtttggcgtccttcaatttaattctttaaagaagtgctgggaagaaaaagctatgtggtttctaccattttagcaggataaagaggataactccttccattagcaaattttacagttgttaacagtactctgccatatttga

SEQ ID NO: 219138 - DNA, 406 bp, Homo sapiens
tgattttctggaccaaataatgttccaccgtgtgactggacataccttagtctatccattctaccactgatgagcatgtaagctgttactatttttaactattacaaattatcttgctaacacatttttgtgcatgtcttttggtgaccaaatggactcatttctctcaggtatgtatctcagagtgaaactgttttatcacagtgtatgctttatatttagtgctttccaattcctgattaagaaatctttgcctgctcctaaggatgtaaaattattctcttatggcctggctcagtggctcatgcctgtaatcccagcattttgggaggccaaggtgggaggattgcttgaggccaggagttcaagaccagcctgggcaacatactgagaccctcatctctac

SEQ ID NO: 219139 - DNA, 452 bp, Homo sapiens
aggcagaagttagttaatgaggtataaagacttagagggtccgaaactgagtaaggtttccatgttagcttataccctatgctagttgaacaaaaccagatctcatcccagtgtggaagtgcacatttaggacctcctaaatattgatgtgatatgtgtggtagctcctttttggcactctttgctaattatcagcaaagtttgatgtggggtcaaatttgtattttgtgtgagttgattggccatttgtccttttgcgctcctgcaggcactcatcctcgcttttgtccttttgtgggttattttttttttgtctctatcagaaaatgggtacagagaccttcagcagatacagatggagagactcagcctaattcttctcatctcctaatgccttttagattcttaaggaggtataaaaatttttcccaaataaaaattgataagaagta

SEQ ID NO: 219140 - DNA, 580 bp, Homo sapiens
cagccctttgtgcaggcacacacatgcagagagagaaaactgtcctggtaagatcactgggaaattagagaagagaaaatacaggagaatggggccagatgccaagcccttaggatcccttggcccttaacaatcagcaaagggcttagatacttgtcctcttgattactctgaactacatcttgtaattaccaacttcagtcaagaaacactaaacagtttatccttcagaagctcccttcaaaatcctctttggcctggctcctgccctcatcatgccattaaactgccctctcaaaagccaccagggctctcggtgattgtctcaagtttgcaaaaaaggagaccagcggtagccaaagagaagctatatccttaactaccgctgctcagctggctgggggcaaagctgagggcctcttgtttccttagtctagggattattgctacatagaatttattattattactattattattttaatcaaaaaatgacatattgtgtagatttttggtatacattgtgaaactttgatatatgtatactttgtggaataattaaatcaaactaattaatgta

SEQ ID NO: 219141 - DNA, 314 bp, Homo sapiens
tgagatggtacatccctctgtcgcttgggctggagtcctagagtggagtggctcactgcagcctcaaactcctgggctcaagccatccccccacctcagcctcctgagtagctaggattacaggtgcaagccaccaaatctggcttgaaagcatattttatttgctgttctacaccttgcatttttcacttaattttttgtggaagatgattttattcagtaaatatagggctgcctccttatttagccataaagcattgcattatatgaatgtaccagaattaatttaattggtccctactgaaggacacata

SEQ ID NO: 219142 - DNA, 885 bp, Homo sapiens
agcttgacaacagatgctttcaatttggggtgttgaccctagccctggtgggggccaagagggagggagggaagatgctggcccgtagcttctcccttgggtttgttctctcccgccattgaggctgggagaggtggtggtccctgggaagctgcaccctcaggcgctaccttccttccacttcctacccctggtgtctacacaagcaatggtgaccgtggctctgcatctctctgggacctggtttctgggtgtaggtgttctaggtgtccagaaaattctacatacgaagaatcaacttccttttggaaggcacaaggagtgaactgaaggagaggcattgaggccacccttcttggtgtggacatgaagtagattttccttcaatttccattgtaaattaatttccaagttgagctccacaaagcgagtctctgccaatggggcattcttacaggcgcttccagcaaagtgcaaaactgattcccttctttatccgtcttccccaaactggggaagtctcagaaatgagtgttttatagacaggtggaaagatacgtcctccaattcgtgttcgagagggagaaagactggaggtaaatttcagcattgactgatcttgtgtgatgtggtttcatgaactgaagtgagaagatatggatgaatgtgaacacttagacaacctcaatctgtgaaaaatgttaaggagaggtaccagtagcagcaactacagcaacagcagcagaagctaacacagaagctctgcctgtgagccaggcccatataatagctttacattaaatatccccttagtcccagtaacaatcgtaagacgctggttgtgttattaccttcattacacagataaggaaagtaaggcttaag

SEQ ID NO: 219143 - DNA, 198 bp, Homo sapiens
gtgcttactatctatggtgtgtataatagggttgtcttattaattagtctgatgtttggatctggagaagtaaattaatgagtcaggttttgtataacaaatgatcactttttaagtaattagtgtagcatatgaccgtagagattaatattaactcttaaaatatggaaattgagactccgatggaaaatgtgaaag

SEQ ID NO: 219144 - DNA, 705 bp, Homo sapiens
atgttgaacaatgtttgagctacaactaaaggtcttcccacattctgtacattcacagggtttcataccagtatgaattctttgatgtgcagtcaggaccaaactaaatctgaaagttttcccacactccttacattcatagagtttctcaccagtatgaatactctgatgttgaacaaggtttgagccactattgaaggccttcccacatttctcaaattcaaatggcttctcgccagtatgaatgacctgaagtccagcaagctgtgtcagaaaactgaaggcctttccacattctttacattcaaagggttttttaccagtgtgaatttggtaatgttaaataagtggtaatgatatctaaaggtcgtcctccactccttgcatacaaagagtttctcactggaatgaattttctgatgctgaataacgtttgaaccacaaatgaagcctttcccacaccccttacattcacatggttttacaccagcacgaatactctgatgttgaacatggtttgagacacgattaaaggactttccacattccttacattcaagatgccttctcacctgtgtgaatgttcttatggcgattaagctgggtgggaagactaaaaacctttccacattccttacattcaaagggtttctcaccagtatgcaatttctgatgtcgaataagttgcatatgaagtcgaaaggc

SEQ ID NO: 219145 - DNA, 906 bp, Homo sapiens
cagtggttgcctttgtattaagaatataaaaggattccctgcctttttacatttttctctgctttccaaaatttccacatgaatattatacctagtaatcagaaaaaaatacagggacactcactcttatcctttacatttctctcctgtttggacctcagattcctcagtagaaaattaaactagatgccagcctgggcaatatgatgtcactctgtctttacaaaaaatgcacaaattagccaggtgtggtgttgtgcacctatagtcccagctgcttgggaggctgaggttggaggattgcttgagcccaagaaatcaaggctgcagtgagctgtgatctcgccactgcactccagcctgggtaacaaagcaagaccctgtctcaaaaaaaaaaaagaaaaaaaaagaaaaaaagaaaattaaactagacaaattcttaagcctgtctctctttttttttaatagtcttatatgaagactattacttcatttcctgtgttttgtgttaagatgagctttaaagcaactctgaaaaagaagagggtgcctataagtaattcatagactgtttaaacaatagtagaggatctaagcatagatcccaagaggtaaagggaatctttatcactttgggaacttttactgataaatagaaattactgtcagtacagtccacaaatatgttgtttatcagccatctttcctccctgtcttcctctagcactgtagcctgtgttccccagaaaatatagtcaataaaattcaacattctttactagcttactctaatttgtggttggccataaagtattcctggtagagataatagagataatatttaactggccatgagaaaggaaacactatcgtatatgatacacccctttttctactcattccaac

SEQ ID NO: 219146 - DNA, 105 bp, Homo sapiens
ttaattgttctgtgttcctgttcctaaaataactatgcagtaaggatcacttcagtggatgaaaaaaagggctgtcaaaggggaaagggcttcaggttgtgtata

SEQ ID NO: 219147 - DNA, 211 bp, Homo sapiens
gtgactcaatactgcaaggtcttgatgtatgatgccaaagtatatcccaccaggtgaaggaggctttctgtgacctgcctattgatgatcccaccttacgtgacctggaatctggaaactggatctttttttttttttttttgatacagtctcgctgtgtcacccaggctggagtgcggtggcacaatctcggcacactgcaacctctacc

SEQ ID NO: 219148 - DNA, 394 bp, Homo sapiens
cagccctgggtccattccaggagctggctgtggttgagtgcagttctgatcacttgcttgaggggtgcagtgggggtaaagagagaggaaaaaaaagaaaaatcaaattgttctcggaaatcatgtttaatgtagaaatctggttaatattaaaatgcaatctgcagttttcaagtattctattcctcaaggaaaatatttcctgttcaaggggcaggggcagtaagctctcccttattacatcacttcctatgtcaggccaaactagcattcaaaatgtattaccgtattgataatgctaatttcaaaatgatgcctttttccccccctttggttaaagggtctgggcaaaattccaatcatatggatcaatttagccttagatggcgctgcc

SEQ ID NO: 219149 - DNA, 1771 bp, Homo sapiens
acctcctgtacctcttagcttgtttaattttttttacagcatttatcagtttccagttgtacccctacaataatgtacgttccaagtgcctgaaatagtgcctagcacataatgtgtgaaacacacacacacacacacacatacccataacccactgaatgaatgaagagaaaccgaaaaaataaaagtataatatcccatccctgatcactctccagaaatgtatacttccaaggaacttgcatatttctataggtagaataattgatgatgataataacagtaatagctatatttgaatgtccattatttacactaatattcacagcaactctgcaaagtagttattatgaagagactgaggtgcagagaagaaagttcacataactgctaggtgctgaagctgagatttgtaactattggatatctgaatccaggggtcatgctcttcccattaactgcattgttatattatttcacaaatgtaacaaatatcaaaagaaaatcttggcattttcattttaagaggaattaggaaggaaaacaaataggtatataaaggtcagcctaagttgtcagcaattcttttccttaatctgtaagaatcttgctcatcgatcagggtgctgttaatcacactaggtcccaatctcttaataagggagttgggaggggtgtttcatcctaggacaggagtcatcagactcggttagagtaatgaaaaggattataatactaatttctgaagagaatgtgggactgaagctaaaaatactcactataaagtaactcttttggctatagtctattatatcacaaaaatattataaaaatcctcaggttcctttctatcttccacacctaattttcaaaaccgatcaatttttttaagccacttaacctgtgtgtaattactactgtggtctcctagcacagacaacagctgctgactgctgtggtattggcacggatcatgtagtctatagagaatttgataaaaagactccaaacaatttcatgccctgtgctgttacagaggagaacaaaatgctttcagcaaggatttgaaaactcttccgtccctgcaggaaaggattgatgctgatagaagagcctggacagatgtaatgagaactaaagaaaacagatggctggagatgacatttatccagggtcactttgtcaggccctaggacttaaatcgaagttgaactttttttttttaaccaaatagataggggaagggaggagggagagggaggacagggagagaaaataccatgcataaattgtttactgaatttttatatctgagtgttcaaaatatttccaagcctgagtattgtctattggtatagatttttagaaatcaataattgattatttatttgcacttattacaatgcctgaaaaagtgcaccacatggatgttaagtagaaattcaagaaagtaagatgtcttcagcaactcagtaaaaccttacgccaccttttggtttgtaaaaggttttttatacatttcaaacaggttgcacaaaagttaaaataatggggtcttttataaatccaaagtactgtgaaaacattttacatattttttaaatcttctgactaatgctaaaacgtaatctaattaaatttcatacagttactgcagtaagcattaggaagtgaatatgatatacaaaatagtttataaagactctatagttcctataatttattttactggcaaatgtcatgcaacaataataaattattgtaaactttg

SEQ ID NO: 219150 - DNA, 513 bp, Homo sapiens
cattaggccaggccagaaggaccagggactacaaactcaccttcagggctcctaagctgctgcggagctagacggcgggctgtgggtggggaggagactagaatattctgagacggggtcaggtgggagttgggagaggtaacttggagttgctgcccaagatgcagctcagctccagtggccacaccaagacggtttaagaccgagagcggaaccagggaggttgtttttggtggctgggggcttgggtttgagttccttgaacagcagaaggtgcttggatttagggaggctctaattgcctggacgaagaaccccgagctgtctggccggcctttcacagtatccgaccggggcgtcctggaccgccgccagctctatctgaccacctcggcgcgggactttcggttctatcccaagacggagctgtccggatacccccgcaaggactccctgacctactggagcttcgaagagacgccccaggtctggagccacggcccgcagcggccg

SEQ ID NO: 219151 - DNA, 726 bp, Homo sapiens
cattaggccaggccagaaggaccagggactacaaactcaccttcagggctcctaagctgctgcggagctagacggcgggctgtgggtggggaggagactagaatattctgagacggggtcaggtgggagttgggagaggtaacttggagttgctgcccaagatgcagctcagctccagtggccacaccaagacggtttaagaccgagagcggaaccagggaggttgtttttggtggctgggggcttgggtttgagttccttgaacagcagaaggtgcttggatttagggaggtgaggctgggaagggttcgggtatgagaaaggaagctgaagttccctggcgtgggtggcaggaagggctctaaccctggggcggggtgtgagggccgtggccgtcatggctgtcgaggccgaaggagagggattctgaactcgggacccagggcttgggatggggtatgaaatctatgtcttgggtatgcctcctcccccaatcttgctcaggctctaattgcctggacgaagaaccccgagctgtctggccggcctttcacagtatccgaccggggcgtcctggaccgccgccagctctatctgaccacctcggcgcgggactttcggttctatcccaagacggagctgtccggatacccccgcaaggactccctgacctactggagcttcgaagagacgccccaggtctggagccacggcccgcagcggccg

SEQ ID NO: 219152 - DNA, 461 bp, Homo sapiens
cattaggccaggccagaaggaccagggactacaaactcaccttcagggctcctaagctgctgcggagctagacggcgggctgtgggtggggaggagactagaatattctgagacggggtcaggtgggagttgggagaggtaacttggagttgctgcccaagatgcagctcagctccagtggccacaccaagacggtttaagaccgagagcggaaccagggaggttgtttttggtggctgggggcttgggtttgagttccttgaacagcagaaggtgcttggatttagggagtatccgaccggggcgtcctggaccgccgccagctctatctgaccacctcggcgcgggactttcggttctatcccaagacggagctgtccggatacccccgcaaggactccctgacctactggagcttcgaagagacgccccaggtctggagccacggcccgcagcggccg

SEQ ID NO: 219153 - DNA, 276 bp, Homo sapiens
ctatcaaagggataataaactgacagcagacttctcaccaactgcaataaaaatggaatcatatcactaaggcattcggggaatggggggaaatgtcatacccaactaaactacaattcaagaatgagtgaaataaagatagtctttttgatatattttaaaatatttatttatttatttgttgagacaaggtctcactctgtcgcccaggttggggtacagtggtgcgatcatggctcactgcagcctcgatctcatgggctcaagggatcctcc

SEQ ID NO: 219154 - DNA, 462 bp, Homo sapiens
atataaatacagctaaaaacaagaatagatattcattctcacaaagggagacagcaaagaaaatggaaagtgcactggtgctagcgttagacagcttgtgttaatgtctcaattctgctactaactggttgcagcttgtgtgaccttgggcacattgtatgatctcgcagaatatcatcccaaatctgcaaaatggaattggcatcatctcttttgcaagattgttatgagaattaaaaggttcttcattcaatataataataaatattttgtatataaatgaatatcaattaaaagttatgactaattccacaagtcaaacatataaattttatttcttgattcatgatatgtgatagtattcataaaaatgtacatgcatgataatttcaaggaataagtatatatgtgagaatcatggaaatgaaattaataatattaactagtaattaaattgtaatt

SEQ ID NO: 219155 - DNA, 674 bp, Homo sapiens
ggtgcagtggctcaggcctgtagtcccagcactttgggaggccgaggcaggtggatcacctgaggtcaggaggtcaagaccagcctggccaacatggtgaaactccatctctacaaaatacaaaacattagcagggtgtggtggcggatgcctgtaacccgagctacttgagaggctgaggcaggaaaatcgcttgaacctgggaggcagagattgtagtgagaggagatcacactactgcactccagcctgggcaacaagagcaaaactctgtctcaaaaaaacagtctgtcattagaattaaatttttctgttgagtaaccacagacatactttcactgctggaggaatgtcatctaaaaagattagttcaaggtattactgacttcaggatacttaaattcttcaactgaaaaccgttttttaaatgagaagaacttcaattttctgcaatttgacaatgttgttaattaagtagcatccgctaccaggaccaccactcacaccagttacagtatgaacattttaactgacagcaacttattagaagataaagatcatggcattatggaaagaaaatggtctgtagtttgtaaacaatcaagttaggttctaatttcagttctgccacaaactaggtatataactttgataaacctgttaccttttctgaa

SEQ ID NO: 219156 - DNA, 447 bp, Homo sapiens
tgaatttgcaccggccttggtaatgtaagaaatgttgatacaagtatgctatcgtagagaatgcagagaagttatctgctttgtccccaaatggagatttttttaatagtctagctcgttgtctaatgtgtatttgcctcctttagtgtttaaccagttttttttttcatccagtgaatccaggtaatttgacttttcactgataaaatatttacttgttatattaggcagggtgctaaacttggaaactaaaagtacagagttaaatttaaaatttgttgaaaagtatgcatcactatgtattctatttaatgttttggcagtgcctctggctcttctcatttaacatgctaggagacagactggcagcagttgtaagctgaaacctggttgtatgcagagagactgataggggtacaaaataaaatggagaaaatttgaaagtgt

SEQ ID NO: 219157 - DNA, 394 bp, Homo sapiens
caaataacttcaataaattctcagtttcacaccattaccattaatatgagaatttatttgccatttgaacttcagaactggcatcaaactacagtggataccaattttaatgctttggagctttgagtgcatggcagaaatgagcattagaagataataaatcaatacagaatggcttgtaatataatttcccaaaccgcttattaagatctcctttataaaaaggacataatttctatatacccataaatgatgctatggtcattattctagtttgcctttcttgcctgtaaagtaatacacttatttgttcatgagatgacagcaaaatctttattactgtaaggttttactgaaaaaatgcacattaaaataaaccagaaacactgaagta

SEQ ID NO: 219158 - DNA, 445 bp, Homo sapiens
catttaatataagaggaggaacaaaaaatgtcctggggatggagtcagatgaactgataaacactgtgctaatggataaatcctagcacagtgtttaccattgagtgcactcattgaagtatatggtatccccagtgcctggaatgtacccaacacatatttgatactggctgggttgaatgaatgtgctaaggaaaaggggaaaaagtgtttagaaaatttgtaaaagaaccaagttagtgaagtatctagtaaatgatacaaatacatagagggtagcaatttaatgatgtagttaagagcaaaatcattaaagtcggaagcttctaggttcaaatcctaactgtatttaccaacagtgaccttagaagaggtatttaacttctctaagtattacttacttctgtaaatattgggaaaataaacacagtattgttgtgagcat

SEQ ID NO: 219159 - DNA, 228 bp, Homo sapiens
gagggccagtcttgggggtctcacgctcatcacagccttcggaatgttttagctaatatgtggtgtgaacttcacagaaattacctgaattaatatgaaacaataaatgagcctatttatttatttactttgagaaggagtcttgctctgtcacccaagctggagtgcagtgagccgagatcatgccactgcactccagcttgggcgacagagggagactccttctca

SEQ ID NO: 219160 - DNA, 565 bp, Homo sapiens
tatttaatcacatctgcaaggaccctctgaatgctgtcttgcctcaactcattttacagataagaaaatcaaggctcagagaggtgaagtcactgatccaaagtcacacagcaggtcaaaaggagatcatgtttcctgcctggaggagaggccccggtggactggaataggagaaagtggagggggtgtatttcaggatagaatcctgcaccctgccagggaccacgcttatccttggctcactcaataggatgcaagggcgtttactgtggccaggtcttgtgagtgcccagagccctgtggcaagaagcctctgccagggaaagggatgcggggaagtggaggcagtgatggggaagcagagccaggagagacccttgggcttccttccttcaaggcctctggtctctagcagagagaagagagggagcagtgctctcttgcccttctgccttccaccatgggatgatacagcatgaagacccccaccagatgctggtgccatactcttggacttcccagtcttcagaagcatgagccaaataaatttctattgtttacaaaa

SEQ ID NO: 219161 - DNA, 920 bp, Homo sapiens
  misc_feature (244)..(244): n is a, c, g, or t
  misc_feature (455)..(455): n is a, c, g, or t
  misc_feature (913)..(913): n is a, c, g, or t
gataaaagggcatgttgaaaagttcttgtgcagaagaaagagtgggaaagtcatagcatttacgatgttccgatttttagagttccctggtaaaatgggaagattttttaacaacactctttcatctataaaactaatctcacttctctcctatacctataactttcttctcttctctctgccgattggcagagtcaagctcagagtctcgagtctcaatcacattcggcggcatctcggctcnacatttttgtagcacaggcttcacggacgtcacgtcattattggctcacgtttcctcactatctgcttcatccgccacgtaatatttcactttacatccaaacatcactttggcttcgaagccgccgcctgatactggcattttgtagatgtggtttgactatttctgtatgtctccatctattgatgagggtcttaaaaaaaaaaaaaanaactcgtgccgaattcggcacgatggaataggagaaagtggagggggtgtatttcaggatagaatcctgcaccctgccagggaccacgcttatccttggctcactcaataggatgcaagggcgtttactgtggccaggtcttgtgagtgcccagagccctgtggcaagaagcctctgctcccaagctcaagcaccgctcccatctcagcctcccaagttgcttggactacaggtgcacgctatcacgcccagctaatttttgtattttttgtagagatgggtttttgccatgttgttcaggctgctcttgaactcctgagttaagtgatctgccttgcctaccttggcctcccaaagtgctgggattacaggcatgagccactgcgtgcagccgagccaaacctcattctagattccatctccagcctgggtgacagggcaagactccctctcaaaanaaaaaaa

SEQ ID NO: 219162 - DNA, 859 bp, Homo sapiens
  misc_feature (244)..(244): n is a, c, g, or t
  misc_feature (455)..(455): n is a, c, g, or t
  misc_feature (852)..(852): n is a, c, g, or t
gataaaagggcatgttgaaaagttcttgtgcagaagaaagagtgggaaagtcatagcatttacgatgttccgatttttagagttccctggtaaaatgggaagattttttaacaacactctttcatctataaaactaatctcacttctctcctatacctataactttcttctcttctctctgccgattggcagagtcaagctcagagtctcgagtctcaatcacattcggcggcatctcggctcnacatttttgtagcacaggcttcacggacgtcacgtcattattggctcacgtttcctcactatctgcttcatccgccacgtaatatttcactttacatccaaacatcactttggcttcgaagccgccgcctgatactggcattttgtagatgtggtttgactatttctgtatgtctccatctattgatgagggtcttaaaaaaaaaaaaaanaactcgtgccgaattcggcacgatggaataggagaaagtggagggggtgtatttcaggatagaatcctgcaccctgccagggaccacgcttatccttggctcactcaataggatgcaagggcgtttactgtggccaggtcttgtgagtgcccagagccctgtggcaagaagcctctggctatcacgcccagctaatttttgtattttttgtagagatgggtttttgccatgttgttcaggctgctcttgaactcctgagttaagtgatctgccttgcctaccttggcctcccaaagtgctgggattacaggcatgagccactgcgtgcagccgagccaaacctcattctagattccatctccagcctgggtgacagggcaagactccctctcaaaanaaaaaaa

SEQ ID NO: 219163 - DNA, 552 bp, Homo sapiens
ttgagatctcattgaaaatattttcctagttagaaatttatgatgtattcatatttgtcttaaagtgcttaaatattacctacagttgtaaattccatttattctttagcacagtagatgctactgatccctttacttcattatcagaacagagcacaggagagaagaattacaactctctgacttagtaggcaccattagactgcttaatagccagagattctgatacataattttaaaggcttaatgtcaatgttattcaaccaaatatattttacaagttattttctttgaacatgtatacattttagttgtagaagtcagttgtctcttaaacgaagtatcttcacaggaaaaatcatcattttgtgaactctgaaatgaatgaaaattttaaatacaatatcagggtagcctgtaaatgatactagaaataaactgacccaaacacacttaaccagcctgttttccacttagttgtttccgtacttgtttttctcttttaaaacttggcaaattgcattttgaatcttcataatttatggtagctta

SEQ ID NO: 219164 - DNA, 593 bp, Homo sapiens
gctgctgatccatatgttgactgccagtcattaaatatattttcaatagcatcacagatgacaattttttacttcaaaatgtctctctggaaatatccattaccactgaatgcataacaatacaagtaacaccagctatcacttattgaacatataatatctgccacagataatataagacattttgcatttactacatcacttactctgtataacagcataacaacttttcaagttttgcattcatttattttatagacgaggagactgagccttaacataggttaggtaacttagagatagaactgggattccaaataggatcagcctagcttcaaattctgtgctctttaatctgtgggaaatctggtatttggatggtcatctcacaagtaaatgaactaaaaataatttcacacaaaggctttggggggtttgtctccgttttttaatctcaagaaaagtgctacaataattgatgcataaagtacattaaaaatatgttcattaaaatacagtatgcatttcaaaaataaatgagtatgtggattaatttcatgaatattcttctctcagaatgctctaagtcaagt

SEQ ID NO: 219165 - DNA, 512 bp, Homo sapiens
aagtcagatataatcccatgacctagaaaaagtatatcaaaaaccaatttcctttagggtttatatgtatttgtttccaaaatattaactaagaatatggatacttacatataaaataaataatacggtcatttaaaattttaaccaattagagcttgccaatttctacagaaagtgtgacaactacatatattgcatatcatagaggctaaggttttgtgagagaagaaattataaaaactaaaaaagttttattaggcacaaaattagtatcataatgataaagtattttttcttctgtaaagtgttgaatagtatatatttttaagcaacattcaaaattacagagaagtctatgcattgctgacagacatatatgtatatatgtttgcttaaatctatatgtatatatagattataacatcaacaatgagattaaattctgaaatctcaactttactaaaattttagtatttatatttttttctaaatcttcttagaattcctcttca

SEQ ID NO: 219166 - DNA, 176 bp, Homo sapiens
cactgggattataggcatgcgcaaccatgcccggccttgctttgccttgtttcagctttcacactaaacaactgtaaggtcctttacgggttttttttttttcactgccatgtttcttgcagttttgtgctttttgtcggtaatttcactgcttaacatggcccacagagtgctga

SEQ ID NO: 219167 - DNA, 570 bp, Homo sapiens
ctttcatgtgctgctttttaatatgggtaataattctagcatgacgtagaagtatttatagcaatgtttttcaaaactgtgactttgtagtatagtcagaactaatatttttagacaactttaccaagtctcttcaaatagtcttggctttcgtctgctaaccacttggtagaggggatgtaggtcaatgattgtcaccaaaaagcaaggcagaaaagataaaatatattcactgaccaagaatatagtctcatctatttagttgccagcagtttacaatcaaacatgctactttcccaatatggtccttgggaaaatcttaacagagacaaggattctatagttagacctaaatagcttggtgttttaatttaagggtcttattttgaaaaactgaataagaaatgtaacagccctgcctgttctggttgtatctggttgtgatgtgattggttgacagtattgcatcagttttctcatcaaatgctgctggtgcagaatgttactggtatcttcttagataagtagaaaataagcaattaagtcaataaaatcttgctatgatataat

SEQ ID NO: 219168 - DNA, 996 bp, Homo sapiens
agagtctggacccctcctcctcctcctgccccagcacagcagggaacccggcaggacagctgtcctctaggactcttgagttcactcacttcagccaccaagcgctgactgtgtttccaccaaagggcagttcctgcggcttctactccccctctccaaggtgccagggttactgccttgtcctccagccttccatggcatcactgtctctccagatcatctcattcaattctctcattgctccagtgagcctggatggttttctgttgccgacaacaaaaaaccccaactgataccattccccttccccaaggtcacttacccagggcaaggtccagcctgagatttgagttcctactgagtcccctacaggggcacagctatgagctgaattgtgcctctctccaggttcattcctaacccctgagacctcagaatgggacagtatttggacacacggtctttcttgagctaatacaggttaaatagtttactgaggggatcctcatccaatacaactggtgtccttataagaggaaattgggacacacattagtgtgcagtgggaagtccatgtgaggacggacaaagaagcttggccatccacaagcccaggagagagactcagaacaaatcaatctgcggacaccttgatcttgggcttctagcctccagaactgtgagaaaatacatttctgttgggtaagcggcccagcctgtggtcctttgtcacggcagccctggcagacgaatgcaggccgcacttcccaccgccatggtgccactgtctgtggacagcatgccagcctcatcgcacgagttatccctgaagatgctcaaattagcaggctgttcttagaaccaaatttcctggacaggcttcagaaaacattctccctggtgatacagacatctgaaaacacacacacacacacacacacccaagaaaacaaaaaacaaacaaaaatgccaaaaacaaataaaaaacccatgacc

SEQ ID NO: 219169 - DNA, 171 bp, Homo sapiens
gagtgcagggtctctttttggggtgatgaaatgtcccaggattagatagaggtggtggatgtgcaacattgtgatgaattgtgttctttacaatggcgaattttatgtcatgtgaaatttactgtgataaataaaaaggaaatatgaaattattccattttcaaaaggcta

SEQ ID NO: 219170 - DNA, 414 bp, Homo sapiens
ggcttctgaaggattgatgatccccaaactggattatgtgttcatgataatggtgtatttggtggcctagcatagtgaggtgaggtaggtctttaaaatggctcattataaacatcattgttcctgagctcacttgcccttgcatctcctgccagagtgctttgtacatagtaggccctcatcaatgcttgtagattttaaattcggaggcacacttggaagacaatggtggctggtaaattaattatcagggttagcaacttcatttctgcttacgcttaaaaagtgctgcgtgaggaggctgagacaggagaattgcttgaaccagggaggcagaggttgcagtgagctgagattgtgccactgtgttctaccctgggcgacagagcgagaatccgtctcaaaaaaaaaaaa

SEQ ID NO: 219171 - DNA, 409 bp, Homo sapiens
aaagctgtgatatcatgtgaaggtttgtctggagctggatgatccctctcaatttggttcgctcacatgtctggcaaattactgttagtttcattcaggaggcctccgttgccacatcagcttctctacagagctgcctgcatatcctcacgacatgggagctagcttcccctacagcaataatccaagagaaaaaaaaaacccacaaattcttttttaacctagtgtgtccaaggtcatgccccaccatctccacaatatcctagtggtcacacaggtcagctctattcagtgtgggaggtgaatacacacaggcacgaataccaggaggcaagaatctctgggagccatcttgcaggctggctatcacatttattaaaagtatttcttaaagtatcttcacctgacc

SEQ ID NO: 219172 - DNA, 294 bp, Homo sapiens
ggactaaccccagcactgctcaggggcagggagcccttaggacctaaatgtgggggggttggtgagtttgctctcatcttctctgagcacaggttgcctggctgcagatagatggtgcaaaacacaccagcgagccagtgtgcttgtctaacggtctgctcgtgtaacttttgcaccacaaaacaagaggtcaagtatgaaagggtggttaacaaattgagcagcccttttttttttctgttaaaggggccgtgtcagaaaaaacaaacaaaaaacaaaaacaaaacaaaaaac

SEQ ID NO: 219173 - DNA, 414 bp, Homo sapiens
ctcctcagttaagtgagagggaactccacctgttgtaaaactattcttagtagtctggattgtgttttttcattttaatagccatataaaattattcagatgattcagaataagcaggatctattttaaggtcccacatgataggttcttacttcagatcaaggaggtgaaaggttttaaagttgggaatttgggataaattctgtattggtggtgtgtaagtttttcttcaccattgttttaattacttacaaaggtaaaacttcaccgtctcctaatgccaaagcctactggggatgggtatttcacttgagattacttcccaatttttattctgtcttccagaggattaaagatggaactctaataccagttatgacaagattcttagtagagagttctccacaaccaggt

SEQ ID NO: 219174 - DNA, 614 bp, Homo sapiens
tgctaaaatctcacctcaaagtcaacaaggatggatgttacatatgtttacctactgcacatgctcttgactcctctcatacatacgtatcgctttgcccccaaactcctaaatatatgtgactctagtgtgatacaggccctgtgaggcataaaacccaatgtgtcccttcatcttcagcacacaccagagaaggtctcttcccagtctgtaaaatgttactgcctataaacctctcctttctattaatcagccatcctggtggttctttagatgaaaactgcaatccaaaaggtctctgaaatttccagaagaaaaaatgctaggcttaaggagactgtgtatttagaaccgatggattttgtcaaattgcttttgaaagagaatgcaataacattcccacattctgacaactgtcacgctgaggggttttgtcttacatagaaagggactttcatacttctttttaaaaagtatttctctcccataattcctttgagtaatttaatagtttaattattaatcttacaaataaacttttggaatgggaaatagatggcacccaatctcaaagaatattccagtagagagtacacttagcacctattagccct

SEQ ID NO: 219175 - DNA, 498 bp, Homo sapiens
aggaaaactgaaaaagacagaaatccagaatatcgaatttgaaccaaaagaaaaagttcaatgccctcctacacgtgtgatgatactgacagctgtgaaagaaatgaatggaaaaaaaggagtgtccatcctttccatctataagtatgtcagttctatatatagatacgatgttcaacggaacaggagtcttttgaaacggatgctgaaatgtttaatttttgaaggtctcgtgaaacagatcaaaggccatggtttttctgggacttttacattgggaaagaattacaaggaagaggatatatgtgataaaacaaaaaagcaggcagtagggagtccaaggaaaattcagaaagaaactagaaaatcagggaacaaggacacagattctgaatacttgccatcagacacctctgatgatgatgatgatccttactattattattataagtccaggagaaatcgcagtaaattgaggaaaaagcttgttccatccac

SEQ ID NO: 219176 - DNA, 255 bp, Homo sapiens
ataaacaaggtcaatagacttctagctagattagcaaggaaaaaaagagaagttccatgtaaacaaaaatcaataacaacacaggagatggaaatcaaaagatcctcagggatcattatgaagacccctatgcacacaaactagaaaatctggaggaaatgggtaaattcctggaaacacacaacttcccaagattgaatcaggaagaaattaaaaacctaaacagcaatatcaagttctgaaactgaaacagaa

SEQ ID NO: 219177 - DNA, 447 bp, Homo sapiens
aaaggtcagggctgttttgtgcactaatgttctagagaaatttcaagctcagagttaactcgtacagtgcagggaggggccttgtcagtaattatctgatcaataaattaaaagattgcattatgggccaggcgtggttgctcatgcctgtaatcccagcactttaggaggctgaggtgggaggatcacttgagctcagaagtttaagaccagcctgggcaacatggcgaaaccctgtctctactataaacacacacacacatacacacatacacacacgcacacacacacacacaattaaaaaattagctaggtatggtggtatgcgcctgtggtcccagctacttgggaggctgaggcagaaggattgcttgaacccagggaagttgagggtgcagtaagctgtgaccatgccactgcactccagcctgagtgacagagcaagac

SEQ ID NO: 219178 - DNA, 141 bp, Homo sapiens
cggcctctaaaatatatttctgtctctccacctatatgatcatgtcctaattcagatcacccactctgttggattactgcagtggtctcctaactagtcctttgacttccattcttctacccctttaatccgttcttcgta

SEQ ID NO: 219179 - DNA, 265 bp, Homo sapiens
aatcatggcccactgtagctttgaactccttggttcaaagtattcaaggtatgatcgaattaaacttcttccctcaaatcttcccaattccccaagtcagaatttattcattcattcatcaaatactgaacaagcacctattatgtgctaggtactctactaggttgtctgagctacgttgtagttctgataacattatagaacttctcatcccttcctatagtcattaatatttgcatatgcaatttcttccttccttaactgt

SEQ ID NO: 219180 - DNA, 257 bp, Homo sapiens
tagcctgggcaacagagcgagaccttgtttcaaaaaaaaaaaagaagagggtctcactttacacttgcgtgagccaccgtacccagtcccaacagttttttaaaacccagaactataatgcaataatgttagcatttgttttgggagtttgagcctaaatggttgaagtgcagtaaattgttcttaaaatacgttttatgaaagtatttggagtcatcttccttacatttttttctctaggatgaagacaacaccta

SEQ ID NO: 219181 - DNA, 552 bp, Homo sapiens
tcatcttgggcctgtgttatcttatcttgggcctgtgttatcttttttctttttgaaaaaaaaaagagattttgcatattttataatgagcttcattaagcaagtctctagttaccctgttttcacaatcagagtaaatgcctttaccttagcaagcagtactcaccataaataatggctcaaaacaacgatgtttgctatttttttaatcaaaaagaaaaaagataacatgggtatatgataattactattcttctcaaatggagtttttctagcttaaagcttgatatgtgggaattatgctttcaaggtttacactaatgtggtacagaggacatcctgttcttctaaatgtgcctctgcagttcttttagaagttacagcggcttcccagtctagacaatctatgcacagaggttttgataatagcatagtggagtcagactgcctgaatttcaatctcagcttcaccagagattaactgcatgacctcaagcaagttgttttacctttgtgtggctcagtttcctcatctacaaaatgataacaata

SEQ ID NO: 219182 - DNA, 764 bp, Homo sapiens
ctgtgacatctagagtggatatccatccagtattgatacattgcaggaagaaattcttttgcatatggagccaggagtttaattaccataaacttagttctgttgttgggaagctccattatagagttatcaagaattggcagcctatttcaacttgcaaagttgttttactctcagcagtactttttcatgtacttcttgaactatatagtgccctctggagatgtgaattgatcgatggtgtgttgaactgattttcagaggaggaaaaaaaaaagagattttgcatattttataatgagcttcattaagcaagtctctagttaccctgttttcacaatcagagtaaatgcctttaccttagcaagcagtactcaccataaataatggctcaaaacaacgatgtttgctatttttttaatcaaaaagaaaaaagataacatgggtatatgataattactattcttctcaaatggagtttttctagcttaaagcttgatatgtgggaattatgctttcaaggtttacactaatgtggtacagaggacatcctgttcttctaaatgtgcctctgcagttcttttagaagttacagcggcttcccagtctagacaatctatgcacagaggttttgataatagcatagtggagtcagactgcctgaatttcaatctcagcttcaccagagattaactgcatgacctcaagcaagttgttttacctttgtgtggctcagtttcctcatctacaaaatgataacaata

SEQ ID NO: 219183 - DNA, 417 bp, Homo sapiens
tatagtggatctcttactctacatcagagaattcatactggagaaagaccctatgaatgtaaagattgcaggaaatctttcaggcagcgtgcacatcttgctcatcatgagagaattcatactatggagtcattcttgactctttcctctccctcaccctccacatcaaatcagttgccaagacctgtaggtttcatctcctgaatatttctggaatccacctcttgaatccatttccatcccatcatccttgtccaatgcacattaatatatttgacatgggatactcgagtagctttctaattggtctccttgtactcaccattgtctctgtcagatgtccacattgcaaccaaatttgtatttttaaaaatatgtttaatctcatttctccctcattaaaatccctcagtggca

SEQ ID NO: 219184 - DNA, 694 bp, Homo sapiens
aaacactatattgtttatggccgggcacggtggctcatgcctgtaatcccagcactttgggaagccaaggcaggcagatcacctgaggtcgggagttcgagaccagccagaccaacatgcagaaaccccgtctctactaaaaatacaaaaaattagctgggcatggtggtgcatgcctgtaatcccagctactcgggaggctgaggccggagaattgcttgaacccgggagacagaggttgcagtgagccgagatcgtgcgattgcaccccagcctgggcgacaagagcaaaactctgtctcaaaaaacaaaagaaaagaaaaagaaaacagtatattgtttagagatatgaacgtatatgggagaaatcataaaagcgaggaaaagatgaacacaaaatcgggatactggctaccatctctgagggccagggagagaaggaaattggggttgggcccacaggtgcttctgaggtttgatcagcttctggttgttagggtgggcggcagatacgacaggtggtcactttagtctttaaaatgtgcgtatacaagtgtgttatcggcttgggatgccggcggggttaaacaactggtaaatcccaggaacttttggggaaggggccggcggggtcaggaatcactttggagggtccggcaagttttggaaccccccgggcccaggcccacttggg

SEQ ID NO: 219185 - DNA, 542 bp, Homo sapiens
ctgacccatgctgcctggttcagcctcactcactcagggccagtccacacgtagaagcagggaaccaggatgctagcctagggagaggtggggtgagcaaatccatcttagtccctttgctgcttagggactttttgttggaaaacaaaaatttgtttttaacagccccatcagtggcatatgagattatgcaattccccatatactcattaactttgagtattaatcagattttacacatacacacatggatgatgttaattttataattattaactatgcctaactaaatcatagtgcaaattcagtagggctgtctattctcacccatttttctaaagttttctctgatttgtgcccttaaaatttataatcatgttactatgcattgaatcgtaacctgttccctttaggctgaagcagcatttatttgaggaaactgaactcccacaaaacaaaccactgattattgcttcttgctaaaggtgttgccttcccttctgagaaatatttacattctctgagaaacaaggatcggagta

SEQ ID NO: 219186 - DNA, 454 bp, Homo sapiens
aagatgaatgctaataataaaaccttgactttaatttgtgcataccagagcaaggggaattagtacataattttaatgtccggctctgaaagtctggcgcattcatctttaagtaaatgagccatctgttacatgaaccagccggcattcatttagtaggttgcttactgcccccaccaaatgatttctaataacttctaatagtaatggcttcagataggtacatttcagttccagaccattggttaaattctcttctgacagggtgcagtgaaattaattttttaaaacaatttttatttttctcattttcagtattcaaaaagtgaatttcattttaacaaactctatattaggttaaggcctcagtattttaggttacagacaggttaatgtaggcataacccatttttctgaagatgtaacttagtcaccttgtgaaaccgttatgtat

SEQ ID NO: 219187 - DNA, 762 bp, Homo sapiens
gagcatctccctgtaccccagcctgcttgctctgacgccgtcaaatccattgagagatgctgtcagacactctgcctgtgctaggaatgcaaagaatgaaaagccagagctcctgcctttggagcagatatcgacagaccagtgtcaataaagccctgatggtggtctgggccacacgaagcctcttgaggtagctccgcaggatggcaggatgtctttctctctcctggtggagaacgaggacgatgtccaggtcacaggttctcaactctggctgctcattggaataaccagtggcggtttgaaaactctttcacccacattctgacactgagctggtctcaacagggacacaggcacgagtaggtatttctggaagcttccaggtgttttcagggtgcagccagggctgagaactgttgcactagcggaaggactcagattggagtcctatttggagaactgttaaagaaaaaataaaatggccaggcatggtggttcatgcctgaaatcctagcagtttgagaggctgaggtgggcagatcccttgaggacaggagtttgagaccagcttggacaacagagcaaaactctttgtctccaaaaaaaattagctgggtgttgtagcgcatacctgcagccccagttgctcaggaagctgagccagaaggatcacttgagccgaggaggttgaggctacagtaagccgtgattgggccactgcactccagcctgggtgacagagcaaaaccctgtctccga

SEQ ID NO: 219188 - DNA, 494 bp, Homo sapiens
ctctgctgagaaacggctgaaacaagtgcgtgagaaccacaggaagtaatacagatctcagctggtgtcagcggagtctagaaaaaggcagaattccctctcaggacggcgtggctctcgcaggcattgccactacttctctccatgtttctaaaacaaagtcttacgtgggcttcgaagggactcctcgaaggctctatcaatttctccgtctttcctggctactgagtgacaccgccaagttcaagtcaagaagtacccattctggtgtttttgacacagtcaccctactaggaagtgaagaggtgataataaaaaaacactccagcctttcgatttaaaataaaagtagtcttgggtggacactttataaaggcagcctaccaacaggtatccctaaaataattcttacgaagcactaaatcctaagtccctcagcctctgaaattaaaagtaattttaaaaaatcattctgctttatatgagaaacccaa

SEQ ID NO: 219189 - DNA, 454 bp, Homo sapiens
tactttctttccctaaagctctttcttaacccagccccaaaaggcatgatcattaggactttatcttctggagctttttgaggaagaaagctaggttggaacttttcaagttgacacccatttttttttctcaacttttcatggtgggaaaaggtaaaaaagaaaatatttacaatatttggctgtgcatgtgaaacagatttcagtggtctagagggttgcttcctgtctttgtataccaacctccacacatgatggattcaatgacagctcgtatccagttgcctttaaccatgtcatatgactaagtatacctatgcctttgaccacttttaaccgcactaccgttactagcaatatgcccctctttctgacttactggacttgtatagcaaatcactctcttagcatttagagatttggcagtgaaaaaatttgaccatttacattcttt

SEQ ID NO: 219190 - DNA, 344 bp, Homo sapiens
tactgcctgctgaacatcttgccctgcagtgcgcaccagactttctcactcaacattccaaactgaactcagcatcttatcactataactagtttcttatttcaattttcataattctagcagcactgccattctcccagatgcctacatttgaaaactaactttgtgcctctgtttcttctctgtccttccctccccgtattgtatgtcccaaatctatcaaaagtgcacttagagtaagcttggcatgtgtattcttatgatacctatcttattctcttgggaattacacagatgtgaccgttttaaggaaaatccataaaaagaaatgaaatttaaatagt

SEQ ID NO: 219191 - DNA, 321 bp, Homo sapiens
aagagggttccattttgaaagtggcaaccttctcctttccacttgattacagatccaattgaaagataagcataaaaatcagataaaaattatcacttaagtctttgggcaaatcggcttgttaaaattctgaattaaaaaattccctgaaactgcaggccactccgcagtgacagatccagctcatctgtgcttgtgacatggctacaaaatggtgagaaggatttgagttgtgttcatttcattcttcctgctcaccagtcaaggaaaggcactgctcatcagcccaaatgcccatcaatcaatgagtgtataaagaaa

SEQ ID NO: 219192 - DNA, 504 bp, Homo sapiens
ggtaagtcactttccctctctgacttcagtttcctcatctgcaaaatggtagtagtaaaaatgatggtgatggtgataatgatcatgatgatgaggaggaggaggaggaggaacagaagtaggaataggaggaagaggatttctctatctagggttgtaaaatttagataagaaaatctagaaaactctgcatatagaagatgtacaatgtgagtcatattcctttctactttccctaagaacaaaccatgttagtacttaacatttcgcttttaccaagcttttagcggtcgtttctttgctattcaatgagaactgaagttttgctgaaatatgggaaaagtaaccaaacatctctaaaaaacaaaacaaagcaaaacaaacaaaaatacaaggagtaagaaatatgccatattttctagacacattttatttcagttttttcccctgggtgtagagttagggtgcaaaatctatcaaattcttctattaattttaaattaa

SEQ ID NO: 219193 - DNA, 335 bp, Homo sapiens
aggatttgaatgaaaagtcttctaaatatggctctgaggccaggcatggtggcgcctatctgtaatcccagcactttgggaggccaagacaggagaatcacttgggctcgggagttcaagaccagtctggacaacatagcaagactttttctgtactaaaaataaaaataaattaagaaaaaaattagccaggcactgtggtatgtgcctgtctgtagtctcagctacttgggaagccgagacagaaggattgcttgagcctgggagattgaggctgcaatgagctaggatcaccccactgcacttcagcctggccaaaagtgagaccctgtctc

SEQ ID NO: 219194 - DNA, 450 bp, Homo sapiens
ccttgaataattaatgtgaatgggacaggagaacttgaggaaggatgtgcagagaaacggctgaattgctgagcaacagagagaaacgtttttgtgtagttttacctggtctaaattaactaactagataatgccctattttaacataaacatttaatgatgcataacacacttcatttcatactgttccctatagctgggcaatgattactccaaggtgtaatggaaaacatgaattaattagagatttcgggtacgaacgtgacatgaatgtaaaatatacagatcattaaaatcatgtctataaaatagaaattaaaatatgagttttgtaatgtatttgacaaccagataatttgtctatccacataaatcaaactaaccagattattgccatatttcagctttactatgaactgtgttaataaatatcatgactaaatactatct

SEQ ID NO: 219195 - DNA, 659 bp, Homo sapiens
agagacagaaggtcagcagaaaaaaataactacagcttctgtttgaaataacctggttatttctgtttgaaaataacctagctgttttgattgggggaagcagagcaactagtgaacatggtggaaaccttagcgtagggatttgagagtcaagtagcaaagtaatgttatctctaatgatgagggggaaaaactgtagaaaaagttttggttgttgaccatattgaaattcatcaggagatcatgtttgagaaagaattttgtggaattatctccacaagtaagtgataaacagaaaggagaatataaaaatgggctatttttaatttttttctaggattatatgtttttgcttatgttataaagccaaacccagactggcttttgtatttttatgtgtttacctttcatctctctctgcaacatggttttagaatatgggtagataactgctgctccacaactaacaacggcagtataaaacttagcttttaccattgcctaatcaatggaactaggtattctgttttcttacagaattatataacctgtccttattgatgggcatttgtttatattatcttagctctttacatcatcagtaagataaacgtctccagtggttagcgacatggtgtgtgttacagtcattgaaatgg

SEQ ID NO: 219196 - DNA, 480 bp, Homo sapiens
atccagctgcttctcctcttctcctctcctcttctctgctggtagagcctggggtttttatgggcacagggtaggggagtggggccatgggtggttttggaaagggcaacattatagtgggaaaacaggaatacatgtcactttgggctgcagttccaggattgagggtggagtcctcgctggggaccatcttcttctgcccagaatttccctgcctcctgtccctatcaaaatgatgtctacatatgctgtgtgatggtatttggaggtggagccttgggaggtaattaggtcatgtgggtggagccctcatgaataggattagtgcccttaagagacatgagagatatgatctctctctctctgctatgtcaggatacagcaagaaggtggccatctgtaaatcagtaagagggccttcaccaataacccaaccatgctgacatcctgatcttgggctttcagcttccagaaatgttc

SEQ ID NO: 219197 - DNA, 375 bp, Homo sapiens
caggcatgtgtcaccatgcccagctaatttttgtatttttagtagagacagggtttcactatgttggccaggctggtcttgaactcctgacctcaggtaatccacctgcctcggcctcccaaagtgctgggattacaggcgtgagccactgcgcctggccatatatatatgcggccacacacatatatatatggaaaaacaaattttcacttgattgtattatattgggttctgagcatttgtaagtctaaatctaaatcaatggttggatctcagctggaggggaggggagtggggaagggttttgtctctcaggaggcatttgacaatgtcgggagacatttttggttatcatgactgggctggtagtgttga

SEQ ID NO: 219198 - DNA, 456 bp, Homo sapiens
ctccaaagccaattttttaacttagagagcacctcactttgacacaagccccctcttcctccttaccatccccttggtactgacaagaagagtcattagcaagtcaggatgtagtggataggaggcgatggggagaagcttcttgaactggaacagtgaaagacatgggacaccatgacagcgaagatcacagcacaaatggtagatggggtggggcgatgcttagggagggagaaacaccaactttgaagttacaattgcccaggttcaaatcccagctccagctcttaatagctgtgtagcctgagcaggttactcgactacttatgatctcttcctcatctataaaatgggggcggtaacaatagacttggtgggggcatgagcgtgataacatttgagaaatactctgcagtgtttgccatagaaaatagtcaataaattgcagtattgttg

SEQ ID NO: 219199 - DNA, 506 bp, Homo sapiens
gcaagaaaaagaagagcaataatattctagttattgtaggccaggggacccacatccacgatatcgtttttttacagctcattactgaatcctcacaataaccccatggggtagatattactgttattacccttttatagatgagaacactggagcttagcgagggtaagtaatggactgcaaggacactctgtctctggcccagaggaacagctggaggatgcaggcaagatgtgtgttaagggggtcctgcagagtgggggtaaactgattctggattactcattaatgtagaactccgaccagtgggtggagggtatgggttcaatagggagctcttcagaaatggaacatgttgagaggccaggagttctccatccctgaaagcattcaaggagaggttgggtggctgtgggaggtattggagaagggattttaacatcgggagggaactggggagattgtgtgtgagtttctgtctgcaaaaaaaaaaaaaaaaaaaaaaa

SEQ ID NO: 219200 - DNA, 111 bp, Homo sapiens
caaattgtcatgaattcgttgaggagcttctggaaagtgcacattctgactcagcaggtattggagtctgcatttctcatgagcactcaggtgatgtttgtgctggtcctt

SEQ ID NO: 219201 - DNA, 408 bp, Homo sapiens
atataataataatttactcatgtgatttataataatcacatctatttgtgtggttcaaccctttaatcataatttgtatgcttttgctttccctgtgttttcttagtcatactcatgatgtttatgtattttattggtgatttaaaaaaaaccaactttttatcactttttaaattacactttaagttctgggttacatgtgcagaatctgcagttttgtttcataggtatacacgtgccatggtggtttgctgcacccatcaacctgtcacctacattaggtatttctcctgatgttatccctcccctagccacccacccactaacaggacccggtgtgatgttcccttccctgtgtccatgtgttctcattgttcaaaaatatatggaatgcttcacgaatttgcg

SEQ ID NO: 219202 - DNA, 639 bp, Homo sapiens
aatctcggctcactgcaagctccgcttcccgggttcacgccattctcctgcctcagcctcccgagtagctgggactacaggcgcccgccaccgcgcccggctaattttttgtatttttagtagagacggggtttcacgttagccaggatggtcttgatctcctgacctcatgatccacccgcctcggcctcccaaagtgctgggattacaggcgtgagccaccgcgcccggccattgtctatctagttcttaattcagtattagggaaggaaggtgaaatgtttttggccctccttggccacccttattccttgccataagataaagaaaggatatttcttctcacagtaggaggatgattgccataagatacagaaagaatatttctcctcacagtagcaggatgattaacctcaagtcctgggtcacactaaaggcagtaagaatgagtaagaaaggaggaggcacatcaagaaaagaatgtacctctttttcccttttcccagagccgtgggtgcaccctattcatttatcttctgtcatttggttaaagataggagtttccagactgaactgttgtctcagcggagaaaattaggataagtttggggttcacagtgaaatgtgagaagtacagga

SEQ ID NO: 219203 - DNA, 638 bp, Homo sapiens
atggtttttgcccaccaagaagtaccggatggcgatgacaccctcccattgcgtgctactcaaaacctgtcattcttggagagttgcgcagctcccttaactcaagtggtgctcagggcccttggccagggcttaacctgggtatgagggagagttgctacagggagcctcacccacagacgttcctctctgctgccctctttcatgctttctaacctggggactaatcccccagactttagattgccctgcatggttgtcaggcctgatgatgacctccgcgtctgacttacctgtgtccccagcatccagtgaagggcctgacctggacacaggtgctcagaaatgtgtaagaggcagctgcctaaagaagtgatcatattttcagctgggcgcggtggcttacacctgtaattccagcactttgggaggccaaggtgggcagatctcctgaggctaagagttcaagaccagcctggccaacatggcgaaactttgtctctactaaaaatacaaaaaatagccaggtagcacgcctgtagtcccagctactgtggaggctgaggcagttggaggctgagacaggagatcttggcagtaagccaagatcgtgccactgcactccagctctgtctcaa

SEQ ID NO: 219204 - DNA, 774 bp, Homo sapiens
ttcgacggtgtctggcatatttcttatatttttaatagagacgagggtcttgctatgttgcccaggcccgcctcaaagtcctgagttcaagcaatcctcttgcctcagcctcccaacgtgctgggatctcaggcgggagccactgcatctggcccaaaaccaagctttcttatcccaagcgctgacctttatcaagttgacctaatcctttatcatctcctaagtgtccctcatgagtgatcacttcacattcctcccacatggagagctcacccactggggcatatttttcccattggaaaagtgtggttattggaagtttcctgttattggaaagaacaggattggaggtgctctctggggtgtcctcctaccaagcagcctgttgaaggcctcgtggtgctcagggagcacgagcgacactcgccgtcgcttcagcttcatcttgaggccacacagcatctccgccacccagatctcctcaggctcaggggcgagcaccttccgtggctcctcctccaacgactcctcagattcgtcccaccactccctcttccttttccagcaaaaggacctatgcggggggctgggatctaccccaggggctgagtaaagaaaccaggccacggtgtaatgcttctgcagttgatcacactagagcccgacccaaaaccccaaaccactctccatcctcctcagcctcgcagactgctggcttctccaagccatctttccttctgtctgtctcctctgctgagttatatgccactccag

SEQ ID NO: 219205 - DNA, 583 bp, Homo sapiens
taagttaggggaaaacatcatttctaaagcaaattgtctcagagcctggtgctaggttccctttgcacggaatagtatccatgagcaggactactagaaaacattttttaaaataaggaatgtagtgtttgatatttcaaaatttattaacatggtcatcataggaaaagtcagaattgtattgggcttcctcttagttttcagtttacaattgttcttattttgaatcacatgttgcagggtctaggggcagggtccttcataatcttttcattgctttggactctaaagaacttcaaatttcctctctgaggtctccctccagcatctgaaaactctcacctcaggaaaaaaaaaaaaaaacagtggagattctgttctttctcagttctgccaatttaagacatgatttcagagaaatctctaagccagggtgtgccttgcttcctgcaataggaaggtggaaagactaaccatttagcaccttatgactggtgagaaatagctggtggttaatgaatcaatgcaaaggatttttcaaatactgttttcattactaatgccccattttcaattggtaaga

SEQ ID NO: 219206 - DNA, 634 bp, Homo sapiens
atctcagactgctgtgctagcaatcagcgagactccgtgggcgtaggaccctccgagccagttctcaccttgatgattttataaatacctgtgcaatcatttaaggatgctgttataacttgctatcacaggattcaggtccaagaaccctctcttaggatctgcactgggacctacccctttttggcaacatgttcttggcaaccacgaagggactatcctgaggagatccctgacccaaaggaaatagactgcagaaccaattggctgactttggcgggtcaaagaatatgtgagattccccacacatttatgccacaggaggagaaaagcctgcctaggggtgttttaacttatgcccagaagtaccacctggaagaggcaacgagactttattcataagaatctaagtggagcattctcccagacaaccagcggcggagcaaggaggggctggccaaacagtgacgttgactggtgcatgagacgaacagaggctcacagaagagcctctgaagagcccacaaaaaatgtccataaggaggtgcgacaggcttcaagccaaggctgtctgacctgagacaaaccaatgatcactctcacacgcattatctaaataaaacttatccactta

SEQ ID NO: 219207 - DNA, 922 bp, Homo sapiens
atctcagactgctgtgctagcaatcagcgagactccgtgggcgtaggaccctccgagccagttctcaccttgatgattttataaatacctgtgcaatcatttaaggatgctgttataacttgctatcacaggattcaggtccaagaaccctctcttaggatctgcactgggacctacccctttttggcaacatgttcttggcaaccacgaagggactatcctgaggagatccctgacccaaaggaaatagactgcagaaccaattggctgactttggcgggtcaaagaatatgtgagattccccacacatttatgccacaggaggagaaaagcctgcctaggggtgttttaacttatgcccagaagtaccacctggaagaggcaacgagactttattcataagaatctaagtggagcattctcccagacaaccagcggcggagcaaggaggggctggccaaacagtgacgttgactggtgcatgagacgaacagaggctcacagaagagcctctgaagagcccacaaaaaatgtccataaggaggtgcgacaggcttcaagccaaggctgtctgacctgagacaaaccaatgatcactctcacacgcattatctaaataaaacttatccacttaatttgaagtgacttttttgtagaaggctggttaacctgctaaagatacaaaaattgctgatggtacttgaatagtagtatttgagtgggtgtttgtggaggagaaatcttttaattagaatctgtgcatccctcacaataaaatgcaggcattagactttgatctcaaaggaaacttatagccctgttatttttaaaatatctactgttcactaatgggattaggttgaggtttgacacacagaaacctggattagtaatttatccttattgtctctccattattcag

SEQ ID NO: 219208 - DNA, 410 bp, Homo sapiens
taaagtgctgggattataggcatgagccaccgcacctgacctctttagtctctttaaagagaataattgtcaggcaagaattttgtatcctgcaaaactaagttccataaatgaaggagaaataaagtcattttcagacaagcaaatgctgaggcaatttgttactactagacaagccctgcaagaatgctaggagttctaaaacttgaaacaaaaggttgatgtgcaccagaatagaatctcttgaaagcgtaaaactcacaggcctataaaacagtaatacaatgagaaaataaagtaggtaacaatcaacatgatgacggagaaagtatctcacatctcgacatgaacattgaatgtaaacggcctaaatgctccacttaagatacagattggcagaatggaccaaa

SEQ ID NO: 219209 - DNA, 286 bp, Homo sapiens
tcacatagaggctcagtgcagaggtagtttcaggtcatgtttagtttaacagtttcttaggccacctccttcactgttcctacagcctacaccttttggaaacacttggtacctcagttgtatttggcagccatttggatggacaagacccaaaactcaggcttgatcgggccacctccaaaatcaagcttttgtacctacgatatcacctccagcacacacagtgcctctagacttaactgcttagttctgagtcctcctggtcctcctgtcccactccagcctg

SEQ ID NO: 219210 - DNA, 474 bp, Homo sapiens
aatctatgtcacttagcctgaatcctctggaaagccgagcctgaagcaatgattatgattctaatagtttattttccagatacaatcacatcacaggatgttgagcctcctcaccccatgtggaggtgaggctttcctcaggtggtcccctgccaaagtggggaagtcagctggattccttatcctactcagtaagaaggtatcaagtgcctacaatgtaccaggatgccattggctctggggatatagcagtgcaagacagaaatgcagctcatggagctggcgttctgatggtgagatgcaagcaccaaacaaaggaaatacgtagatgtcactgctacacgtgttgagaaagaagatcatgctccttgaatcctttcttgtgcaagacctttgattccctcggtaccatccgttctatcccattccctggaccaaatgtttgcaatatataacacttctttaaactttaaa

SEQ ID NO: 219211 - DNA, 472 bp, Homo sapiens
agatggggtctctttatgatttgcccaggctctggtctcgaaccaatggactcaaatgatcttcctgcctcagactcccaaagtgctggtattacaggtgtgagccgccatgcctggctatctttacattttaataaaattattttgggagactccaagcctttctagtgaatgggttgcatttagcaatggaattgcagctctaaggaagagatgattccaggcagtgggacctcccagtttcagataccctaaagtccagaagtgggcacggtgcctgtttaatgcctgcatgaggccattcccagtgctctagaatctgaaattccctgttaggagctctactcattcatctttgttatccggtgatttctcgcctgcaaagtctgctgaggaaagcacagccagctgccatctctttaatatttagaaatctgccttaataaatcctagctcttcctgcgtgttgcta

SEQ ID NO: 219212 - DNA, 221 bp, Homo sapiens
tttaagccaatcccttcagttctatcactaaattacatcttgaatctgcacacttctcatttttaccaccttttagttcaagatcaacttttttcctaggctactgcaaaagcctcctgaactggtcttctgattcaatgcttgcccctctctatattgtagccagagagagcttattggaaattaaacgactctccagctaaataaataaataaatattt

SEQ ID NO: 219213 - DNA, 723 bp, Homo sapiens
aggagagttccgttcacatctgggatgtggctcatttcacttattcattcaacaaccactgatgcttgctgagagccaggctccaagccgggtgctggggacacagcaggcgggacgccagacagagccccacgccgtggagccagcagacggtcagggatggtctgtcccgggcacatggctaggaagtggtgaaccaaggcgctgcccgcaggagtggggctcctgggcctagatgccctgttcccattcgaaaccctctcagaaccagccaagactgagggtccctgtggcccagtctggggctctgcccacaccttgcagaggctgccagtgcttggcaggggagctgggccatgttttcctgggaccttgggcaggtgactttggagagctgctggaatgtgaagtcccaaggtctgaaaactctcacaggcccaataggacgctcatgcccggtggccgcgtggagggaccgcctcctggtccaggcatgggtggggcctcgctggccacgcccttccagccaggtgcctgatggatggggcagggcccactccagggccacgtgggctcggtggccagactgtcaagtactttgttttcattagaaaagtctccttctcccaaaagaaagatcaagcacaggggagggggccgttttattttttaataaaatgccacttgctgtttctgaagcagcactctgtcagctacagcacc

SEQ ID NO: 219214 - DNA, 514 bp, Homo sapiens
cccagaaacaaatccatacatctaaagtgaactcattttcgacaaaggtgccaagaacatgcaacagggaaagggcagtctgttcagtaaataaagctcagacaactccactgcagaagaacgaaactagagccctatctcttgccatatataaatatcaaatcaaagtggattaaagactttaagacctcaaattatgaaactactaaaagaaaacattggggaaattctccaggacattggactggataaaaatttcttaataccctacagaagcacaggcaaccaaggcaaaagtggacaaatggaatcacatcaagttaaaaaccttctgcatagcaaaggaaacaataaagtgaagagacaatccacaggagaaaatatttgcaatctatccctctaacaaggaatttataacaagaatattataaagggctcaaataactaggaaaaaatctaataatctaattaaaaatgggcaaaatatctgaatagacgtttctcaaaaaagaca

SEQ ID NO: 219215 - DNA, 215 bp, Homo sapiens
tgtagtgacgggattttgccatgttgcccaggctagtctcgaactcctgggctcaagtgatccatctgacttggccttccaaagtgctggaattacagacctgagccattaggctcagctgaaatcattttagtatatttggtaatacagtaaataaatgaacgtaaagaattttaaataatttggttttgctttagattcaggggatatatgtg

SEQ ID NO: 219216 - DNA, 439 bp, Homo sapiens
caggtcctggcttgatacctgatccctgtggaagctgacacctcagcatgagagggatcagggcagacaccgctgccgccacgggagcctcaaccgacttcagggagagacgctgaggacactggcctgaaaactgttccctctcactccacactcagagagatgcatgtaaaaattcttatatataataataataatggcaggaaaagaaaaagtttccagttaagtgacttgactgagtttacacagctgggaaactggactcaaaatccaagtcatatgttttcagagtttatacatttaaccttttcttcaacaagccatctccttgtataatcaggtaaatatacttgttcagtgcctggtacatcataggttctccataggaatttgtttaatgaccacatgtaaatatatgtatacctgtgtttgtgtgcga

SEQ ID NO: 219217 - DNA, 398 bp, Homo sapiens
ggcggtctgaatttgaatcccagctccagcattcactggctgtgtgaccttaggcaagttgcttaacctctctgaacctcaatgtcctcatctgtaaaatgggagtaatcattgtgagggttgggggtggccattcatgggaagcgtgtagttgggggcctggtacctaagtgcttgaaaaatcatgcgggaaaccagccatcccggggtctcaaaaccatggccgacctgtgtgggtgagagagtggcctttgaagctggtggatagaccaaccctgcgggctcctgacttttcaagtcctgtgagccctgagtggttgtctgaaaggcggacacagtggtcctcagtgcacagtgtcctcctgggggaatcactgagcaggcaccctgaattgcaa

SEQ ID NO: 219218 - DNA, 421 bp, Homo sapiens
tacaaacttcagttgtaatcaagtcttgctaaagaacacattctgatctcttaaggtaaccttacatttctttacattagaactttatatttcttctaatccatatgcattggttctacagttttagttttgtaattgccaaaaaaatacaggattctcagtcacatcagaatttcagatgaacaatgagtgattttttagtataagcatgtcccataaatttcatgggatatacctacattaaaagtgatttgttgttcatttgaaattctgtttaactaagcaccctgtatttttatttgtaaaacctgaccaccctctctccaagggaaatcctagttccctaatttccaaattggtggaggtggtggtgacctcatgattgctcatgtaacctatccacagtttcaagaagaaaaga

SEQ ID NO: 219219 - DNA, 353 bp, Homo sapiens
agtttttagtgtctcacttttcaatttaaaaagacagctaacgatcaccagatatttgagaaaagtttgaaacatgaaaggcagaaattaaaagagacaacaacagcactagaaactcacaagaaatagagaaaatatagggagcagaagaaaacttcacaaaacctgtaattactagtctaagagagataagagaatatgttgcattaataaaataaaagcaatgtgcaacaaagaggagtttcagagactaagaaagaacttttggaaattaaaagtgtgatagaagaataaatcagtagagggtttggaatatagaattgaagaaaacttacagaaccttgcagaaagtc

SEQ ID NO: 219220 - DNA, 202 bp, Homo sapiens
atttttattagaatatgttgttgagtgtgattcataactattttgtacctttgtcactcctctgataatttaacaaatataaatttaatgtcaaccatgtacaatttgactatgctaaatgctgaggttactgagttttaaaatgaaactagaacatttcttcaacgttaacactaaaaaagacctccagatagataagatt

SEQ ID NO: 219221 - DNA, 390 bp, Homo sapiens
tgggtagatttgtgagagactcagggtgcagaagagagggagaagatgatgctgttttaaaatgatgctttccactggttgtttcctctaaagaagacaacggtgagtccaggggagctgttatttttttgcttagggttggaaggagggaaaagacaacttctttttaaaaatttataaaatgttatgtatttttgtttatgcttaatttatatctgtgacatggaatttgagcaaagtggccacatatttttgtagggaaaaaggaggcatctgatagttttattttccacattttagggactactttccattgcagcttgaggctttcactgattaaaataatggcttttcaaaagttaatgtgttatatagtgagcacataatctc

SEQ ID NO: 219222 - DNA, 298 bp, Homo sapiens
ataagtgggaattgtacaaaagacaaagaaggaatcaccaacgtgttcaaccagtttccaacaaattgagaagtagaattcatgtttcatgaagaggtcttcaataaatccatatctcaaagcactcaagacaagctatacctgttttctctgaactactgctgtgaaatagtgtttctcatgaaatccacaaaacttagttaagataagccaaatgaattcagtggtcctccctaacttgtgcctcattccttatacataaaaaaaatgcttaatattttatatataaatgcaatat

SEQ ID NO: 219223 - DNA, 233 bp, Homo sapiens
gttataatagctaatatgtacatagtgggtcagcatctaacttgctgaattctttacatatactaactcttaattgtctccaaaaacatataaggtatatgtgagctttatccccattagttgagaacactaatgcagggacagattagctaacctgcccaacaccacagaactataaaagtggagccagaactcaagctgggtggcttggctttcacctgcctgccatagga

SEQ ID NO: 219224 - DNA, 593 bp, Homo sapiens
gtactctggcattgctgttcctgatgtacattgataatccgaaaggagcatgccaatcaatgttttttactacagttttaccaaagaagcagggaagaaatctaaattccacatctatgaaattatagtccaattaacatattcctatacacatagatgaatggatattacaaaaagaaaatctgaagaaatttaaaaagatttccaaagagtgcacaatgggcccaaataacataatcaaataacacattctgagcacctgcatgctatggcaattcgctaagggctgcacatgttagagaaagaaaagatgcagcatctgaattagatgaatgtttaccatcggcacatatataaccattctcacacaaacaaacgtgcgttattctgagaaaaataatggtctatcttttattaatcatgcaccaagggtgggacaggtcacctagcatctcttgtcacctagcgcctcaaagcctctctgtcaaataagtgggaataagatctataagatctaccatgtgaggatattatgaaaagaagatggtataaaacatttacagggacctaacacacaacaagcattcaataac

SEQ ID NO: 219225 - DNA, 360 bp, Homo sapiens
ggaacagtggttctcaacctcgtcagaatcaaggtcccttcttcccctttgcagcaaacatgtataaagccctctttactaccctgaaatgaaattcataaacaatgtgacctccctacacacatccttgaaaagcagtatgatggtttgattgaagcgtaagggcgaaatagagaacagtatatgacagatgttgctgtaccattcacatctaggacatactcttgtgctggaagacagtatatactggggtgcttgtgccagcttctaatgagtacatttgtattggttaaaaaaaattaggaggagctatttcaaacaagagcaagcctgggcaatatagcgagatcccacctgtac

SEQ ID NO: 219226 - DNA, 391 bp, Homo sapiens
actaaacactatcttttatacaataaactttccttactttttaattgcctgttttctccagttagactgaggttccataaaggcattgatttttgtctgatttgttcactgctctttctctagtccttaacaagtttggcacatagtagatgcttaatagatatttgttgaaagaaagaatgcattaattaatggaaaactcaggaatctttataagtgacttctgaagctgagtttataacttttcatcatatgtcaatctgacttgttggtagaagactttgtttttttttttttgaggcagggttgccctcttgcccaggctgaagtgcagtgagctgagatcacgccattgctctccagtctgggcaacaagggatgctccgtctca

SEQ ID NO: 219227 - DNA, 176 bp, Homo sapiens
tcttcatcagagcatctgttccctctcacttaaagcttggaatcaaattagattctgtccagaaagggggcaacaagtattctgagagcactggagagtgtatgcgcaccccagatagcatgtgaataaaccatctgtttgctggtgcatgggtttccgagtgagaagcagcccct

SEQ ID NO: 219228 - DNA, 184 bp, Homo sapiens
agagcttactcagggtgtcacttgcttcagaatgccggcctctgcagtgcacacttgtcctcctccttgaatcacaaaattcacccaattttggaaagcagggttaaaaaacaggatttatggggaggccgaggcaggtggatcacttgagatcaggagttcgagaccagcctggccaacatgg

SEQ ID NO: 219229 - DNA, 1071 bp, Homo sapiens
  misc_feature (994)..(994): n is a, c, g, or t
tgtgggggcaacttgtgtggaaggctaagacactctctctaagagatggctacatgggttgtcagttttcacacttgttgaaggcaggtgatcagtgaagggttattaccacctgtaggaatgcgacagctcttcgacccttctggtctctcagagccgacgcctttttcatctctttgaccaacactcctccatacaatgattataatctgtattcttcctaaggcgcatcttacaggaagatgttagattaacaccttctggagggactaaaaccccaatgatatttaagcatacattgaaggtggttattcttcattttagtgataaacttggttcactttccctgtatacagctttgcaatagatagtgaaacaatgtcaacagttattgatcacctactatttgtcaggttctgtattaggagttgacaatgtagtctaacagataaatcagacaaaaatgtaatggaatgtaataaattctatgatgatgataaacacagggtgctcttggaacatacaggagggaactaactcagcctgggaagaagagtagagcatcaagtaaggcttgcaaatacggagaaaataggcaagcacaaaaggagaggaaggtaactctaggtagagggtacagcacagataaagagctgggaagggtttatatggagaagtcatacttttagggaggtaccactcccgtaccagtgtttccctttgtctgctcccagacagctttctcctgcctcccagctctgcatctctcagatcctggctctgatcccacgctgctgttgcttccactcatgtacccattgctaacggcatcatttcttggagtaattcattgcaaagttcatttcccacgataaacgcagtctgtgctcattacagtcaacagggtggcccaaaagagttcagttaagggaaaaaaaatcaaattttcccttgaaaagaagccagtgatatggcttgggtccatcttcctgangtgtgagaactctctgttagtgttagttgctttaaggctggtctgctgctatacatgtgatcttctcctccctattg

SEQ ID NO: 219230 - DNA, 1110 bp, Homo sapiens
  misc_feature (1033)..(1033): n is a, c, g, or t
gaagggctaaaaacactacctcgaagacatggctacatggggtcgtcagtgaatcacatctccgtagactgctgctaagtcaattcaggtttaataccaacgatcacgtaatgcaaaaggatgcttacgcatactctgtctgtatcttcgacaataggcgcgatcgcctctattatgcatcatcctttgtcgagcgccaatgacatccctccgagtacatagtgcactgttactgtatctagtaattgctctgccgtaacatgggcgcatcttacaggaagatgttagattaacaccttctggagggactaaaaccccaatgatatttaagcatacattgaaggtggttattcttcattttagtgataaacttggttcactttccctgtatacagctttgcaatagatagtgaaacaatgtcaacagttattgatcacctactatttgtcaggttctgtattaggagttgacaatgtagtctaacagataaatcagacaaaaatgtaatggaatgtaataaattctatgatgatgataaacacagggtgctcttggaacatacaggagggaactaactcagcctgggaagaagagtagagcatcaagtaaggcttgcaaatacggagaaaataggcaagcacaaaaggagaggaaggtaactctaggtagagggtacagcacagataaagagctgggaagggtttatatggagaagtcatacttttagggaggtaccactcccgtaccagtgtttccctttgtctgctcccagacagctttctcctgcctcccagctctgcatctctcagatcctggctctgatcccacgctgctgttgcttccactcatgtacccattgctaacggcatcatttcttggagtaattcattgcaaagttcatttcccacgataaacgcagtctgtgctcattacagtcaacagggtggcccaaaagagttcagttaagggaaaaaaaatcaaattttcccttgaaaagaagccagtgatatggcttgggtccatcttcctgangtgtgagaactctctgttagtgttagttgctttaaggctggtctgctgctatacatgtgatcttctcctccctattg

SEQ ID NO: 219231 - DNA, 908 bp, Homo sapiens
aactgtggaaagatatcctagcagtcttgccatcattatttatagtttaaaagtttgatgtccaagtagcttctgatagccttcctacaaacaccaaatataaatttcactgggctataaagacagcaaaagcagagaaaagatgatgaatatatctcagtagcactattaatattccacagagacgtatgcaagatggagtctgaacactggctgaaataactctgttttcccaggagggggccactgctcagtaagcaggaaatagcaaaattcagagaagtcctttcaaaacagatattttgtcccaaggatgtgagacagcataagggcttagtatacactaccacatattctctaacatggcattatgttagaattgaaggactgaaagcaaagatgtattctgggattcttttttaaaaaataagattttccccaattaaaaaaaagaagctcaaaatccatttctatggaaatgttgtaattctgctacttttgtttagggtctggatgttttgcttcaacaaaacagcttactggtcatttttagagtaatttttcagtgagataggggaagagcctacgattttgtgatacattttcatttgaatgaacctgaagaggtagttgacagtcttccaaaattaagcatacatgactacaaaagagattacagatactatggtggctttaagataaaacgtaaaagcaggattcctacaggaattttagggctgaggaatgaatgaatatgaagggagggaggtgagtataaatgagcatttaataattgtttttccttggtttgatgtgatggaggggaaaagacaggacaaaaattgcaatgataaatattgaagggactttaaggaaagatgatgaaatggcaattgcatgacaacaat

SEQ ID NO: 219232 - DNA, 417 bp, Homo sapiens
actcctgactactcaagtgattcgcctgcctcggcttcccgaagtgctaagattacaggtgtgagccaacacgcttgtcctgttcttcatttttaatggacatttaataacaccatatgaacacatttatagggtttttttttttttaaggatttaatactttaaattcatgttaagtaatgaacttttttttggagacaaaatctcacctagctgggagtgcagtggcacgatcacggcttaccacacccctgccctcctgggctcaaggtgattctcccaccatagcctcccaagtagctaggactacaggcatacaccaccactcctggctaatttttgtattttttgtagaggcggggttttgccatgttgctcaggctcgtctcaaattcctgagctcaagcagtctgcccg

SEQ ID NO: 219233 - DNA, 233 bp, Homo sapiens
tgggctgacctgcagcggagagtctgcccaccccggagacaccatgagggaatggaccacgtgggagcatctgtgtgcaagtctcatttgggtgtgtttatgctgcgtgttgtatgcctgttttagtcataaagtaggcctgatatttaaaaccttgtctttaagttcaaggctgcagtgagccgattgcaccactgcactccagcctgggcaatagagtaagaccctgtcta

SEQ ID NO: 219234 - DNA, 439 bp, Homo sapiens
ccctgtctctactaaaaaaatacaaaatcagccaggtgtgatggtgcatatctgtaatcccagctacttgggaggctggggcaggagaattgcttgaacccaggaagtggaagttgcagtgagccgtgatcacgccattgtactccagcctgggcaacaagagaaattctgtctcaaaaaaaaaaaaaagaaataacatatttaagatttgctttaaaataatctgaaggcagagttagtgggtgtgataattaatattagatatcaaattgattggattgacagatgcctagatgctgaatcattgtttctaggtgtgtctgtgagggtgtttccggaggagatttacttgtgagtcagtggactgagagggaaggactcaccctgaaggtggacaggcaccatgcaatcagctggcccaactaggacaaagcaggca

SEQ ID NO: 219235 - DNA, 585 bp, Homo sapiens
ttgtctgaaaacagcctatatttactttcatggttgaagaatattctgctggctataaagttctataatagtttttattttctataagaacatggagaatatattcccatttttcctttggtttttatttttgtgctttagaaacataaaatttttttttctggatgctataaagattttttcactttttcttttgttttctgcaatatctcagggtgaatcttggtgtagatttcttttttctttatcctgcatggaattcttaagttctatgagtcagtcctccaaaattctcagtcatttaaccataaaaatttaaatattgtctttgctccatttctctctcttgtaaaactgcaattaaatatatgttagactttttcaagatgtcctccctctcatcctctctgctatattttctatgttttggtctctttgtgctgtaatatggaaagtttattctgacttatttttctgttcaataattctttcttcagctatgtctaatatgcccttaaactcactcaattaattcataatttgtcattatatttccccttttcaaaattatgtcacttttccccc

SEQ ID NO: 219236 - DNA, 519 bp, Homo sapiens
tactaccagtaagatactatgccttcagagctctagagagtatcctgggagggaatacattagagccaaggacttgctttgagagcaccaaattatgtgattcaaaatcttttcaccttgacctgtgaacatggaccacgtgaatgcaaatatcatagaaggaactcattcactgaaagattttgaccacataacactttccacatgtactgtgaggttcttcctacattccctttattaactttaaagacagtggtcaccaggcagtggaatttttgagttttctataatttatgtaacacacaactcttttggggtggtgcctttggttgattagacagtcttcgatatgggagagccacagctggtgcttatgggattatattatctgagcctctgaaaacggttttgttttctttctctcagtttagataggacatatccaacttggtggatcttagcggattctgaccctctgtaggttgttgtttctttaggctcaggccgtggcactgctca

SEQ ID NO: 219237 - DNA, 464 bp, Homo sapiens
agtggttcctacaggtttttatgtttttgagatacatgcctaattttggattattaattcttactggaattttgtctgttaagttaggaagaaacgacttataaagtttcctttggttttccccaggaagatacttttataacatgaaatctttaaaaaaccctttagaaaagtggtctatataattcttagcagggtgttgagatcaagtgcttttcttcttttcattttttacactttgtcagttgaagatgtgcaaagaagtccatttgaaatttccctcgggccacttaattcagcttcattacagtggaagtgggttaaaaatgataatcatacagccccaaagtgctgggattacaggcatgagccatcgtacccggccgagatttcatttttaaaaaacatgaatccaagaagtgacttgagttccaaataaataaatttataaatttacttatgtt

SEQ ID NO: 219238 - DNA, 180 bp, Homo sapiens
ctctgtttcaaatgatgggctggacaatggagtgcttgttgacctgagcttcctattcagcaaagaagtatgggagacagctgggcagtgctggaccccgtgacttccctattaataccccagtgatgagaacagacaccaaccctgatgggggtgactaggggatctcctaatgaaatg

SEQ ID NO: 219239 - DNA, 805 bp, Homo sapiens
ctttgaaatttttctcctgagttgggctgcaagtgtgtgcacgcctccctgcaggcatgttggtcatcatcatagccatcaggccctgggtcctgcagaggagagaaaccacctcttggtgtttctctcgctctgtgtatctaccatctttccttgaccctgaatttggctacatctaattcatctgaatcaattaaaaaatatttttaagcctatgtcacttaagaaatgtctcttctgacatcctttttcttttattacctttcccttccattttccttttccgtttccctttctttctggcttgccttctttctttttttgtgttgagtgcattaagtaacatcacgatattgttatgttcagtggtgtgctgataaaccaactctctaggaagaaaaaggccctggtttgtagcatctgcccatttttgtggcatgaatattcccaccggggcttatttcaagctaaccaacatgatgtcactggatgtggaattgggaagaattgaggacagtttgttaaataacactaattaatttagccaagagggctttagtaccccaaacacccactccctcctttggcatagatgaaaaactacaaatcaatttacttgccagcattccagcaagtcatcttcttataaatctttcaagatccttcattccctcataacgcttaaaaaaattatatactgcctcacatcattttaactgaaattaggtgtttaagccaaaaagagtgaaactcagttttggactccgtcagaggtataattgtacaaagaatgcccacatgacag

SEQ ID NO: 219240 - DNA, 295 bp, Homo sapiens
aaacccgtaggacttgtgaatgaaggccatggagattctgttgcaactgcccgaccctgctgctgtagtgcagaagcagccatagacaatacagaaacaaacaggcctggctgtgttccaataaaactttatttacaaagacaggaggcaggctggaattgacccatgtgcagtttaccaccccatgattgatgtcatttgtcattcttttttttttttttttttgagactgagtctcaccctccagcctgggcaatagagtgacaccctgtctcgaaaaaataaataaatcaat

SEQ ID NO: 219241 - DNA, 409 bp, Homo sapiens
agaacattgtctgacttctacatgctacaaatagggatatttccagaactctcaagaagatggtttgaaaatagcatctaataagagaagacggagtgcctcctaacctcatgaacagcattacaagaaaaatatgtcatctgggcccggtggtacacacctgtaatcccagcactttgggaggccaaagtgggtggatcgcttaagcccagtatgggcaacatggcaaaaccctatccccacaaagaatacaaaaattaaccaggcatggtggtgcacacctgtaatcatagctactcaggaggctgaggtgggaggactgattgaactcaggaggttgaggttgcagtgagctgtgatcgtgccactgcactccaacctgggtgacaaagcaaggccctgtctcaaa

SEQ ID NO: 219242 - DNA, 527 bp, Homo sapiens
ggccattgtgggttataggagtggaatcagaggagtggaccagctccatactcttactagaatgggtgatttcaagaaatgaatggagttcttctcatagtcaacatgataaatgagccaagatcaagaactgacaggatcagattattttcctaagcatttcttgtgaagatgcttcttttattttccaggtacttgccttccaggttgtgctactttgtcttaaaagtgcacatcaacacctgataccaacattgctctaagattccttcctgtcaaggaagctaaacttatttagctctatcctgggcatccttcttgctcctaaatcatacttctctcattctgtttcctcattgacttcagcttataagactaggctttttctgtaaaccctttccttttgttcaaattgattaactctgcaatattcagtttcccatggagaatgagatccttactctgatcccagtgcagtggctgggctcccagcaaccagtttcacttatgccaagtttgttttcaga

SEQ ID NO: 219243 - DNA, 263 bp, Homo sapiens
tgtagttagcttgaaaatttgggcaaagaattcttgcatgttgtgcatgaattatccgtacatttttttcggttagttgagtgtgttgggatggggagaggagaggcgagttagtggtagctatggttattagagaagggaagcaattttcagatcagtatctaatttctcagttttagtttttgaatgtgatgatgtttctgtttaggttttccaaaacttgattctttctgtttgtcaacacctggactcatggggctatc

SEQ ID NO: 219244 - DNA, 194 bp, Homo sapiens
ccctgtctcagaaaaaaaaaagaaagaaagaaaaaagagacttaggatacagatcagcgacagccattgtgggcccttaatggatcctgattcaaaccaagtcaccccagaaaagatacatcagagatcatctgggacatctaaatatagagtgcaatgaaataaaggatgaccattaacttggccacgcggga

SEQ ID NO: 219245 - DNA, 461 bp, Homo sapiens
tcggcggtgccccagaacacggagatttccttctgcccagctgcatgaggcacacatatcctgggatggcattaggaagatggccactttcacatcaacttatgtactctggcaccaacctctcttctccctacccagcccaacttcccacccactgctattgggatgatatgtgctcttgggtaaggaatgcatatccaaatgctacctcagatcagggaggtaatacctggcctcaattctctgcccttaaagaatcttgcagccaaattgggtaaagagtcaagacccatcggtgtgctttattcaggagacccatctcacgtgcaaagacacacatgggcccaaaataaagggatggagtaatatttaccaaggaaatggaaagcacacacacacaaaaaaaagcagaggttgcaatcctagcctctgataaaacagactttaaaccaacaaagatc

SEQ ID NO: 219246 - DNA, 392 bp, Homo sapiens
ctggtatcttttagtgtttgtcaagttggtataaagaaactgctggtttattaatccgtaaggttgtgtaaactctacatgacttaacattttagtgacatagaaaagtgggatttctggttggtgtacagatctttcttcacatcgtgcaggtaacgtatgagcattgtctgatggatccttacaacattcctgtatgcttttggaaagtatgatctttgtttaacaaaatgggaaacagaggcacatgctatacccagctatcacagaaaacaatagttagaatccagaaaacatactcatctggtttagtgtgttgcccaatagatgcaattagtattctgttttatcttatttgtttgccttataattattaaacattgttttttaaa

SEQ ID NO: 219247 - DNA, 438 bp, Homo sapiens
cggcaaagagggaaagggacgtgacaggacgctctttattaaaacttgcatatgattataacttgccaggtcttcatttatttcttcccccctcattactctggtcatcagggcgagtcctaaaacgcatacctttaatgtaacatttcaggatgatagggaataggattgtatcgcaaaatgagcactattcccacaaacaggaggcacctgactccaaaaagtagaagagggcagagaagttttgtctaacaatttatgtgtaagtgttcagaagtcttgcacttgctcaagacagagccactgcacagcccaattctgtaatggcagcatggaagtgggggactcattacagatggagggaggtcatattactcgccagggacacagctggtttgtggcaggcccagattggaacctccagtgtccatccttcac

SEQ ID NO: 219248 - DNA, 489 bp, Homo sapiens
atctagaggatccctgtcttgatgactgcaaaacacccaaacacctcccattaggcccacctccaacactggaggtcacatttcaacatgagatttggaagggacacacatctaaactataccagctgtagattctagcctgtagttaaatacactaccataccttttcctaactccatcctgcagacccagctaattgatgtcatggtaaaaggggaggcaacatgatatgaggcttgatgttatggacctccttattgagctgtcttgaataagacttaatactggagggggagggaaaagtaagaatcattcagaagaaaagtaactaaaaataaaagagatgagatagcctggcgcggtggctcatgcctgtaatcccagcactttgggagggtgaggtgggcagatcacccgaggtcaggagttggagaccagcccgaacaacacggtaaaaccccatctctactaaaaatacaaaaaaattag

SEQ ID NO: 219249 - DNA, 466 bp, Homo sapiens
atactcttcaaaagtgtcaagttcatgagtaacaagggaagacagcgacgctgtcacggattggcagagactaagaagacataacagatgaatgcaacgtggtattctggattggatccttgaataggaaaagggtattattggaaaaactggcaaaaagacaaataaagtccatagtttagtcaatagtgtagcaatgttgatttcttagttttgataaatgtgtcatggttatataacacgctacaattaggggagactgggtggaaggcttactggaaccctttatactatccttacaacttttctataaatcttagtatttcaaagttaactaaaagtgaaaaattgtaaagtcccttctttcttaaaacaaatctaggatgcttgttatgtgttaacaattcttgtaaatgcaaatcactttgaagagcaataaatattacccagaaaaactgaaaaaaaa

SEQ ID NO: 219250 - DNA, 614 bp, Homo sapiens
ctcgtagtgactgtggggctggctctccaggacaagcccctccagtggagccaggaaccaggatggaaggttgggtttgggggtggactgatggcctggagttcactgccacctattttcttttcctctttttccatctcacccagagctgtgggaagaggccttgacaacaggtgagatttggggcacctgactgtgacttcaacccagcaggtggggttggcccaaagcagttccccagcttgtcctctcaggtcctctggacacccttccccaccacacataaccctggaccttcacagctcccacaccaccatccacacctaggaaaggacatcggactggaggtcaggggcctaggattcaagtcccagctctgccgacagctaccagtgtattcttgggcaagtcactgaacctctgtgggtcctgattcccttacctgtaagagagtgataatcataaggccctctgcattgctctaaggatcaagataatgcttgtgaaagtcttcactgtactctaaagtgtgattaatatatattctttatcctggaatctcctatctcctttgagtcctgttaaataaaccatgatgtgaatggttaaaaaaa

SEQ ID NO: 219251 - DNA, 554 bp, Homo sapiens
atcttctgccggccacccccaatcatagctcaaattaggggtgacatttgtgaactagggaaattaactttaagaaggcaaatgcaggccttaaagacagccatgcaagtggtccatggctgagtatgggaaaaactgcccataagcctagcaaaaccagcatactcctttagacctggggcttctgtgcacataagaaataaaatccaaccactttaggacccacatgggatgggccctatactctaaccttgtccacttccacggcagttaaagttgcagaaactgtgcgctggatcctccacagtcagttaaaactggcagccaacatgacccagatcactggagccagttaatcctgtgacaggaccaagttgccatgagaaatgatgacagccctgctctggtcactccaaaagctgaccagtctctgctcagctaaaatctgaggagtcaacagccctgctctagtcatcctggaagttgactagtctacgtacggtcaaagctggagtaaaataataataaaataatgattaaaatcttaaatcaaa

SEQ ID NO: 219252 - DNA, 610 bp, Homo sapiens
ccaccaccgtcacttcataaaagaaaggacatttcaaaatcaggccagtaacaggacatgtctcagaccacagtctgagtgcagtcctcagaccacgagactcgtgtgtcttgttcagcctactaggttttgaattccccagggaatgtgtctcattcatatttaaatgcccagctcctaggtgggtgttcttgtataaagtcagcgctcagtcaacgggcgcagtagctcacgcctgtaatcccagcactttgggaggccgaggcgggtagatcacttgaggtcaggagttcgagaccaacctgacaaacatggtgaaaccccgtctctactaaaaatacaaaaatttgctgggcatggtggcacacacctgtaattccagctactcaggaagctgaggcaggagaattgcttgaacctgggaggcagaggtttcagtgagctgaaatccgtgtactccagcctgggcaagagagcaagactccatctcaaaaaataaataagtaaataaagtcagtgctcagtcggtgctatctgaaatatgtgaactgaccaaaaaagagccagtatttgatgtggtattaacggaaacagccaaccctcatctcct

SEQ ID NO: 219253 - DNA, 452 bp, Homo sapiens
aatatcagagcagttctttgtttagaaatatttttgccatattttaaatgaattggtgcaataaaaggacttcagttaagatgctctcataataactcaagagaaaagtaatgaggacctgaactgggacataggcaatgagattggagataagaaggtgaatgaaggaaatattaaaaatgtagattcaaaagtactaagaaagtggttggatcagaatgtggggtacatggagcaagagaaataaaacaatcattgagagtgctgaagtttcaaatccaggaaaaatgttcacaccttggacagaaacagtggtgactgggtctgcatgaaaaaacagtagtttccattttggctcattggattttaggtgtaagtagaatagccaagtagttgtatttagcagacaattagaaatatgaggcaaaaatttaaaagagaagtcgaatctg

SEQ ID NO: 219254 - DNA, 301 bp, Homo sapiens
aggtaagagagagacagtagaacttactgaagaaattaattttaggtaagggaattatgtagataattggggtggtagttgcccagtaggcagctgagtaaaaatttagtcttgagtttaatgtctttccttattttgtttcttttttttttttaaacatttttttatcacacccctcaccctcacccccatgatcctttatggttagaagattgcagactttatctaagttggataatgatttatgtttagaaaacctttttaagtattaagaaccattgatactttaggattgtaattg

SEQ ID NO: 219255 - DNA, 533 bp, Homo sapiens
cgtccttcatcatacctacctaagaattaactggggcctggctcactggcttatgtctgtaatcccaacactttggggaggccaaggcaggaggatcacttaagcccaggagatcaaggttgccatgagctatgatcatgccactgcactccagcatgggcaacagagtgagaccatgtcaaaaagaaagaaagaaagaattaactgaattcccctccaattctgttctagagagtcaagtctagatgagccaagagagatgaagtatatccctttcttttccactgctgtctttgttttactgatggggaaactgatgacagactctgtcagggaaaccaatggcccaagaccacatagtgagttggtggcagatttggggctgggacccaggtctgcagactcccagtcaaccctgcagctctttcagggtgctgggaatcacatggtgtgtacctaggcatgtgctgtgctaagcccttgacatactttgcctcatttggttttcccaatggtaggtagatgaaggacgt

SEQ ID NO: 219256 - DNA, 534 bp, Homo sapiens
cgctatacatttagactagctatagaattaactggggcctggctcactggcttatgtctgtaatcccaacactttggggaggccaaggcaggaggatcacttaagcccaggagatcaaggttgccatgagctatgatcatgccactgcactccagcatgggcaacagagtgagaccatgtcaaaaagaaagaaagaaagaattaactgaattcccctccaattctgttctagagagtcaagtctagatgagccaagagagatgaagtatatccctttcttttccactgctgtctttgttttactgatggggaaactgatgacagactctgtcagggaaaccaatggcccaagaccacatagtgagttggtggcagatttggggctgggacccaggtctgcagactcccagtcaaccctgcagctctttcagggtgctgggaatcacatggtgtgtacctaggcatgtgctgtgctaagcccttgacatactttgcctcatttggttttcccaatggtaggtagatgaaggacgt

SEQ ID NO: 219257 - DNA, 387 bp, Homo sapiens
tcttttcttcagcccaaaccataaggtccatctcaccttcactgcaacaaagaagggttgttaaagctggacacagatttgcttggcttcaccctctgatgtgttccacaccacttcacgccacttttcaaaaagatgataaaacgtcaggctgagtagaacagaactgggtgcaaataaatctctctgaagctaacttgcctctctctacccctacttccctctgcacgtgcctttgctttattcccctgcatgagagaagcagtcaaatctttcccattttcatacctggattgctgctcaacagcctcaacaactgagacctgaatgtatccccattttaaagaacctaacagaacattaaaattgtttcctgagccttctgat

SEQ ID NO: 219258 - DNA, 473 bp, Homo sapiens
aggcctgccctcaggagaaactaatttaccagagcttaaattacttaggtttttctcacagcctaactgacctaagggtagggggatacccagctctagccactctagctgttccacctaaggggagggaagggatagactaagaagcacttgtgaagttcacagtccaagggcccaggctcaccaaaactactaagacttaataataacctacccaaatgagaaggaaccagaaaaccaactctggtaattaatatgacaaaacaaggctctttgacactccccaaaaaatcacactagctcaccagcaatggatccaaaccaagaaaaaaatccctgattaacctgaaaaagaattcaggaggttagttattaagctaattagggaggcaccagagaaaggtgaagcccaatgcaaggaaatccaaaaatcaatacaagaagtgaagggagaaatattcaaggaaatagat

SEQ ID NO: 219259 - DNA, 956 bp, Homo sapiens
gtaagttattgagcaagaaccattattttagattagaaaaagtaatggtcatgcaaattacggggtaaaatgttctcagatctttcagcaattgtggtattttggtatttaaaatcagtgctgtaggagtgaggaggctgagctttgctctgctctgccactttgggtgtataaatgctttctcaattaagtctgttaacctctgagcctgaattttcccacagctagaagcagtagagcaaagatttcaatctgagttgtctgactcctgatctactttttgtccagttgtcatgtggctcagatgagttccatattaataaataaaaatactgctggagatagaagtcactcaagtgctgtatcttccttctgcatttaagaaacttattatccaaatttaagacactttgaatttattttttgtccctctctgtgaaaagtaaaaatgccattctatgatatattccaacaaagaagaaatgagggtaacatttgttttaaaaggtttttaaaatttatctctacctcaatttttaaatctttcctattgtgtattactttctccctaaaataagggagttatacttaagtatttcctaatgggctttttacatacctcgtaacttttcttgtacttggttttgattttccagcagaggtggtattagatgtgaaccttgaagcagagggcattggtgggaactgggattggaaaagaaggttatagccagacattgaagggcctttataccaagctaaagtttggatgttaacttcagaatatcagagagctaatagaggctttaagtcaagagtgtaacatatttttaaagattgtaattaataaaaattttattataaaatatttccacatataaggaattccaaagagtaatataatatacccctatgtatctatcacccagcaaaaaaaaaaaaaacaaaaaaaaaca

SEQ ID NO: 219260 - DNA, 332 bp, Homo sapiens
  misc_feature (16)..(17): n is a, c, g, or t
  misc_feature (26)..(26): n is a, c, g, or t
tgcatgctgtaccccnncgatgttantggatatcgtcgtaccacgcgctccggaacttgaagcagagggcattggtgggaactgggattggaaaagaaggttatagccagacattgaagggcctttataccaagctaaagtttggatgttaacttcagaatatcagagagctaatagaggctttaagtcaagagtgtaacatatttttaaagattgtaattaataaaaattttattataaaatatttccacatataaggaattccaaagagtaatataatatacccctatgtatctatcacccagcaaaaaaaaaaaaaacaaaaaaaaaca

SEQ ID NO: 219261 - DNA, 217 bp, Homo sapiens
ggatggcgtgcttcagaactcccccataccataagcagtagattggatgatgctagccttgaatcagcagtcgtcttttttgctctccatgggtaagaagtaaaattatcgcctttgaaaataatatatgcacatagcagcgaaatcttagaaacacccgaatgtgaaattgactttctgctgaataagtagcagattgtggagagagtagtgggga

SEQ ID NO: 219262 - DNA, 700 bp, Homo sapiens
gagagaccaggagagtgtgttggatctccagttaataccctggtctgtgccacagcattgggaggtctgtcacagcgcatgaatgtgggcactggcctagccatcagcatagttcttgcagggtcaataaaacctccagagcaggttttgggtgttcttttttttttttttttttaaactgcggtattcccagctctgtgggtgggtttctgattaaacaagatacctgtttgtacttgcatctctaccagggcaggagatggtgacatgctaggggacccagcaaagggtggcattgctcactcgcccttgggtatctgtgctgtgaccatagcctttcgttgagccaagaaggtgctagacagatagcccttgcagaatggtcttcttattagagacttctcttagagattcgactggcatctgcagccccacagcaggctggaccatcagggaagtccctgctcaaagccctggcctgttccttgagagaaggctggctatgacttgataggaaccctgctgctccctatgacacctgcctgcccatggtccatattaagtaaatttggactctgatttttctgacttacagattcagctgaaccatttctctgagtggggccagatgaagatttgccactttagaagttcttctgtcacaaaagggagctataatttgttgagagtctattaggtt

SEQ ID NO: 219263 - DNA, 349 bp, Homo sapiens
gatgtgtcttctaggggcatgagagatggagaaagaaagcctcagctaccatgagactttgttcagtgctatgatctgaatgtgtttctgccaaattcctatgctgaaatcctaactcccaagaagatggtactacaagatgattggaaggtgattaggtcatgaaggctctgcccttatgggattagtgccctcataaaaggggcaccagagagctaactgccttaccctttctccatgtgaggacggaatgagagggcgccctcatccaaacactgaatctgctggtgccttgattttggactctacagccttcagaactgtgataaataaatttctgttttttata

SEQ ID NO: 219264 - DNA, 343 bp, Homo sapiens
aattttcattggctctctggcatttttaagggcccaggggaacaaagctcaaatggatgcatttcagaggtggtgacgggttgaaatggaaattattgggaaaaggggagaccaagaagtgtccctaaaattatgtcacatcaggtgctacctccttcatgtcctccctgtgctctctctcccacctttgactgtcacttgcccactctccttcttttctttctttctttccttttttttttttttgagacggagtctcgctctatcacccagggtggagttgcagtgagctgagatcgcaccactgcgttccagcctgggggacagagcaagactctctcta

SEQ ID NO: 219265 - DNA, 110 bp, Homo sapiens
tgtgtcacactggctccctagatgctcagcaatttaataccagccttttgagagaagaaaagaaacattacattaaagatgtacaaaacctctaatatgcatcccagttc

SEQ ID NO: 219266 - DNA, 352 bp, Homo sapiens
ccgtggtttgttgaatgaggatgcggaactcatggatgcagaagaccagctgtgcttagaaaacatgcctcatggccgggtgcagtggcttacacctgtaatcccagcactttgggaggccgaggtgggcggatcacaagatcaggagatcaagaccatcctggccatctggtgaaaccccgtctctactcaaaatacaaaaattagctgggcgtggtggtgcaagcctgtagtcccagctactcgggaggctgaggcaagagaatcgcttgaacccagaaggcggaggttgcagtgagccgagatcatgccactgcactccagcctggcgacaaagcgagcctccgtctca

SEQ ID NO: 219267 - DNA, 501 bp, Homo sapiens
gtaggcaaagtgctggaagctaagctgaaataaaattctagcaagtggatggtcaggaaatgcttggcaagtgattcatgaggaaaggctgtaacgtttggcaaccaagggataggttaccagtgttatctaaaaatgcaattttgtttattgggatccataatgtggtgacatgaacactgagcttgcactggatgacctaagtgggagttgggatcctgtcactttgccctgtatcctatagagcaaaccactcaccatctcagcctcaggttccttatcagaaaatcaggaaatgtacctctttgcaagtgtttttgaacatcagctaagatataatgtgtttggaatggtttatgagttctgaagcattatgcaaacattatgtaaatattagaatatattctatctaatatttaaaagatattagaatatattccatctaatatttaaaagatattagaatttatattctagttaatacttataaaagctaggttg

SEQ ID NO: 219268 - DNA, 494 bp, Homo sapiens
ttcatgtgagctataccatgtatgtttgtactttcacttattattggacatttctatcattccgcgtttgggctattatgaagaaactatcatgagcatccatacgtagcaggccaggtctcactaacacaggcctccctaacaactgtttcagtagcgactgagtggttcaattaaatattaagaggaaaaaaaaaaaagaagccagtgcccttatacaaaggctggaatgtaacaaaagcccaccaagagttttgcctaggttttccctgggccttaaagcatgacgaaataacgaaggcattcttaacaggagccatttagtattaaacgagttttacggggggtctgaagaaactccccaggcctccacaaacaagtttatgggagatctgaagggactctccaaacctctgtgatttagcaggagacaagataagggcccccagcacctagacccatttagattaactgaatttaactgaggttccaga

SEQ ID NO: 219269 - DNA, 243 bp, Homo sapiens
aaagtttgtgcatgttcctatccctaatagtaaaccttggttcttagaacccctcagctcaacttcagtcgagtgagtatttttccctttctttagtctttagttttcggtttccagttgctttactgagacaaagaccctagaagttgaagagtccagggtttactgcactttccctgtcattccccctgtactttgtattccaaattactttcatcacggaaaggtgaaagtctaagtctt

SEQ ID NO: 219270 - DNA, 291 bp, Homo sapiens
ggcacccccgcccagggcctgacagcgcccgcggcccgctttctgcctcgcgttgcgcccagagcacggatgcgagcgagcacacacgcgcgcgcggacacacacacacacacacacagggttacacgagccacgagcaggcgcgcaaggctcggcggacccactgagactcggacgcaaacggggcgctttgcctctccctggcttgtgcacaaacttacaaacacactttgcactttaaagttgttccaaacccccatcctagggtaggctaataaaaatgggtgtgca

SEQ ID NO: 219271 - DNA, 330 bp, Homo sapiens
tgtctatggcttcctcgggccagacttctgcttcttgcatgtatttatgctgtcacccaaatgtgtacacttacttttatagacagcatcatcatttccccaaagataatttagaattgcggtagccactatgaggaatttctgatatgcacaaaagtattcactttagaatgcaaagtgaacacaattccaaacatccagtggtcttcttttttttcattagcatgagcaagcatacaaaagaaacaggatcccaaatttttttttttttttttggagacagtctcagtctccaggctggagtacagagcgagatctcagtctcaaaaa

SEQ ID NO: 219272 - DNA, 460 bp, Homo sapiens
tacttcccccggccaggaggctgtgttagtgggactgggctagaatggtcagaactgggcctgggctcagaggggagcatcaggggatgaaagaccctcctctgaagtttccagtaagtggagccttggacagaaagtcctccagcatgaccctgagagggctgctggaggaaggctgtcctcgtacccagaggcatgtggacggtggtgatcacatctggtctgatttctaaacagagtacagctcatttctcttgagacccccacttgagcgctccctcctcactcccaccccagccaggactggtccagggatcagcatgggaggccacgccagcactgcgagatgatggggtaggcctttgaagggccagacacggcaataagaaacctgaaccaggagggcagcaggggtgttggggttggaaaaacattttcaggcgtatttctgctataagag

SEQ ID NO: 219273 - DNA, 455 bp, Homo sapiens
agaccttaaaaaggagactgatggatatgttgactggctttgctgttttcaccaggaaaacagatctgaccaccagagtccagagcagatcaccgtgcctgtcctgccttcattctggttgtctggtgggccaaccagtcttatctaaaagagtgatgaagagattgtagcccacactttgcagatttgctcttgtgcttttaactttcataaggagattttagtagagtggggagagtatgacataactggtgaagccatgggctttggcttcacagaaactgagatttgaatcctagttgtgacttgaccaagtgacttactctctctaagcctcaattatttctaaaatggggatgttagtatctatttcaagggtattttcctgactatatgagataatgtatatatataagccctgtgtctggcacaaaacagtagtccagtgaattgtt

SEQ ID NO: 219274 - DNA, 374 bp, Homo sapiens
gaagcttcagactagcagagctgtgggatcttcccattcgtttcctatcaaatttgctcattttactggcaacactgctgagtgtgggcttttgcccgctgcctcaaatcaggtctgtcccctctggaagtgaaactgctggcttttgcagccttcaccctgtaccaactgagctatgtgaagggacattcgaacagtcccagacagtgaagctgctatctcctactttcttagctaacatatagcagctgttcatagatcagtacttctcactttgtttgcctttggttcatttccagatttccaccaaaatgattgtttttgacaatgttgttcagttttatagtagctttttgagagaggattttctgacc

SEQ ID NO: 219275 - DNA, 453 bp, Homo sapiens
cttcagcgatcctcttgttgacgctttaacagaggaggagtacagcctcctgagtagccgagtaggtctgggctaacttgcctggctcgaaacccaaatcttaagtaggactagggaaatagaaccagagagggatggagacctcttttgggtgtcagaagcgctaagttttacttttagctcctctgatgacttgctatctaaacttgggaaaaaccactgccatttacagggtctcaatattttcatctgtaaaataccctcccctttactctgccacagaaaccttgtcatgatttgtgcctagctggatttagatgtttaagagatacggatcacaaggttccttcagtcttcggactaagcaatgctcccaggggcctagaaggccctatccacagtgttcaacatcctcttccctatatcccatcccctatccttgaaagaaaaaaa

SEQ ID NO: 219276 - DNA, 377 bp, Homo sapiens
agtattttgaaaatgcgaggaatggcggtagcttggggtcatacattgactcatggcctctacccgctgagtacaggaccattttgtagatgaactaaagtggtggtgtagctggcactgccatggttctcaccttctgctgcagagcaggcacacctacagctgcagggtcaggacagtcctcattcacgcggtcatctcatagcttctttgggtgggtcaacctcttttgttcagtatgtgtcagtggtagagaccttgttgcattggacctccgaccgtagccccaaatgagggatccgtagtgtttttactatacctcagcatggaatgtgcattcgaccttaataattcccccgtgaattatgaattaaaaa

SEQ ID NO: 219277 - DNA, 476 bp, Homo sapiens
ctacaaaaggaattaatccctgaaaagcaagatggtatcacattgatttttaggaattctcataatccagtggttctgcaaatatttcttataattcttcatcctttctctcttccactctctcatagatttttctcccttctctgatatgcatgtgccttctagttgacttttgtaaagtagaaagaaataataaattcttggatcacgcctgaaatcccaacactttgggaggccaaggcaggtggatcacctgaggtcaggaggtcaagatcagcctggccaacgtggtgaaaccgcatctctactaaaaatacaaaaaaaaaaaaaaattagccaggcgtggtggcacacacctgtagtcccagctactcatgaggctgaagcaagagaatcgcttaaaccctggaggcagaggttgcagtaagccaagattgcaccactgcactccagcctaggtgacagagtgagactcc

SEQ ID NO: 219278 - DNA, 447 bp, Homo sapiens
ggctggcgtgcgctccggccaggctgcctctcaggtccacgctggagaaggagtggtgaggtgcgctcgccccggctgcgtgcggtgattcgggaaatccccgcacttcgctggagaaatagcgacgctctcggaagtgtgagtcggtcactgcttggggtccgtaccctttgggcagacgtggaccgcgccccggcgacctgggttgagtggacagacgggacccggcttacccatgggccaagccctgccacttaccgaggcctgccctgctgtgctttccagggcggcaaccttgagcttgggggtggggagaacggggcctgacttctagaattgcccctggggaggtgggaagcggaggtttggcccggtggcgcaggaagcccctgttcctctcccaaacaccatttcattaaagatggatctttgtggatgtgttcccaa

SEQ ID NO: 219279 - DNA, 424 bp, Homo sapiens
actgttttatgatcctcagcagactgttatattattttatagccataccttttatttgctgagtaattgtactcaataattgtttgtaattgaatgaaacaattcatcagatgttgggcactgaatggctttggattatttccaaaaatttaaaggataaagatttgctgccttcaaagctatgtacaaaaatatgatagaatgctagcgggatatttgtttaaaatacaacctttattacattggggcctgctcataatatatatgtggcacattttatttaaaatattaaagttcctggtgggacatgtccccataatcccagcactttgggaggccgaggtgggggtgggaggatcactagaggccaagagtttgagaccagcctgggcaacatagtgagataccatttctacaaaacata

SEQ ID NO: 219280 - DNA, 733 bp, Homo sapiens
tatttttattgcttcggtgaagatcttcttggccatgtgtacagaccaagagttgtagtaataggtattgtttgttgcaatatttattatcatctgtttttatcaacctccatttttctctatgattttttttttccaaaatagtttctaaaacttgctttgtatgttttacagaattaatacacctttaaaagctggagctctacaaagtgcttgtatcttaatttagtgttgattcctcccaaatacttttaatctccctatgtttgtatcagtgtagcacataatttgtttacataaaactttgtgtttacaaaacactttcacgtttgttgcagtatttggtccttacaacagctgtaaagaggatatgagtgggttttattgtcctcaattttcagaggaggcagctggaagctgaggaagctctgtgactgggcccaggccacagaactaccacatgcacgagctgggtagaatccatgcctttcaagtcccagcccagaactctctgtgctctgcaacactgtctcatacacagtgaggggcacgcactttgggaagagaccttgtcgatgctgcccacgtgtgcccagcccctctcactgtccctccctggggaagactataccaagacctctgcccagcagagagaatctcagcttctgatggaatcaatctagctctctagctctgtctctctctctctccccttttttttttttttccagat

SEQ ID NO: 219281 - DNA, 385 bp, Homo sapiens
ctgaggcaggagaatggcttgaacccgggaggcagaggttgccgtgagccaagataatgccattgcactccagcctgggcaacaagagcgaaactccgtctcaaaaaaaaaaaaaaaaaagaagaagaatgctgcctccatgacacaaacacagaagaagacataccgatgcatacatcaagaatacaaagaagaaaatcatcagatccaggaaaatgcaattcaggaagcagaaaatagaaaattgatgctgtgaatttttatccaggagagttttacctccttgcttgaaacatttgtccgtgcatccactttgccctaaaatgatagtcatgtaataatgtgtgtgttatcttttgaacaaataaaatcagtgcaatttgga

SEQ ID NO: 219282 - DNA, 434 bp, Homo sapiens
ctaagtaacaaaatccagcagctaccctaatgtcagagtagatacccgtaagaggaggcagcatcttacagggcaggccctggacaaatgagtttgttaccaagcacttaagagagaatgtgcatcaaagaagcatgcattgcatcagaacagaccatggtgtatttcacctttcagtatcttttgactcatgagttatttagaatattttaaaacacttcaacactaaggagttttttctctttcatgaggtgatctttgtcatcaatttatagttttgcttctgcttgagaagataatgaaagctgcagagttctttttctatcagtaggttgagaagaaaggtaacttttctcagggacattatgagtgtgatgtgttggtgcagcccctgaagggaaatggtgtggaggatgtttggaccacagcctggg

SEQ ID NO: 219283 - DNA, 501 bp, Homo sapiens
accaaaattacactaaggctatggagcagaggatgggctgcaatgaaggattatagtatttatattttctatgctatacaatctattactatgtttttaaactaacaggcactactttttaaaatttaagtttaaatataattccaacaaaaacagatgtatatattattgcctattatgggaaattacccttactatagtaacttaccacacacaaaaaaaatttattctgaaccaaaaaagacatcacatacagaaaccccaactccaccccttttccccaagctcctagaaccatcaactgttcatggtaagagactttgctgtttcagcaggttcctttaaaagcatatgatgtttagcctgggcaacaaactgaggccctgcctgtataaaaaaaaattagccagctacattggaggctgaggcaggaggagcacttgagcccaggaggtcaaggctgcagtgacccgaaatcgtagcactgtactccagcgtgag

SEQ ID NO: 219284 - DNA, 136 bp, Homo sapiens
  misc_feature (10)..(10): n is a, c, g, or t
  misc_feature (12)..(12): n is a, c, g, or t
gagcggccgncngggcaggtacgcgggcatgcccagtcacaagtataattctattctagaaatgaactatttaatgtcaggaaatctagcaacataacccattaaataacaattaaatagaaaaatattttggtta

SEQ ID NO: 219285 - DNA, 115 bp, Homo sapiens
tctcggggagtgacatccctcccatccaaacagcatcatgttacatccagcttgctgtcagcatttgttgagcttctcaagggccaagatccttccagattatacaagtatatat

SEQ ID NO: 219286 - DNA, 516 bp, Homo sapiens
ggaggccaaggtgggtggatcacttgaggtcaggagttagagaccagcctggctaacatggtgaaacccctgtctctattaaaaatacaaaaattagccaggtatggtggcacatgtctgtaatacaagccactcaggaggctgaggcatgaaaatcacttgaattgaggaggcaaaggttgtagtgagctgagatcatgccactgtactccagcctcggtgacagagcgagactccatctcaaaaaaaattacaaattcttgggctccacccctgtgtctactgtatcagaatctgtattagtgaaatctccaggtgattttatatacatattgaggtttgaaaaacactgctgtaaaaccttaaatgccaggctaagatgttaagcctttattctgtggtccatgtgtgttatagatctggtttctagaaagtaaatctaatagcagcaccaaccaacagattggaaagtggaaagcagaaagcagggggctagataatagatgctttccacaa

SEQ ID NO: 219287 - DNA, 319 bp, Homo sapiens
tatgaaagcctgcttctacaaattcatctcttgttctcctttaaaatattaaagccaaagcaaccttttcagcaagcagatctcctgccaattccaaaggctctacttctaactttcaaactagcaaggttggcagcctcatcctctacttccaattccctgaacccaccaacaacagaacagcatctagtcctggctggagtgcagtggcacaatcatggtttactgcagtctcaacctcctgggctcaagtgatcctcctgcctcagcctcccgagtagctgggactacaggcatgcaccaccatgcccagctaatt

SEQ ID NO: 219288 - DNA, 475 bp, Homo sapiens
tgagagctggccatagagtgcattagctgagagatcctggctcctcggagtgtggcccacagagcagcagcctcacagcacctgggcaccagcccacatctactgagtcagaatctgaactttaacaagaccctgactccaggggcacatgttagagtccaagatgcccttttgaggcccacgtttgaactccagcttcaaatcctggcttggccatttagtggctgtgatttcggctgttacttaattactctgtcaagaatcgattcaggttttgtgggcctaaatcttatacaatctggagtattttccttaagaaaagaaggatataaaattacaaatacaaaattaggtacaaaagtgatgtttagaatgtaaatacttcacggcaaattacaaatattgaagagctggaaagtaccgcaaaaacagtaaacaataaagaaaaatcatttcatgtttttatcaaccaata

SEQ ID NO: 219289 - DNA, 544 bp, Homo sapiens
tgagatggagttttacttttgtcgcccaggctggattgcaatggcatgatctcagctcactgcaacctctgcctcctgggttcaagcgattctcctgcctcagctgcctgagtagctgggactacaggcttgcaccaccaccccttgataatttttatatttttagtagagaaaggattttgtcatgttggccaggctggtctcgaactcctgacctcaggtgatctgcccaactcggcctcccaaagtgccaggattacaagcatgagccacagtgcccggcctgtgcacttcttttcacatttcacttttgggcaaactcaatgaagaagtagctcatgggctattttcttcttgtaggagttgtgcatatttccagcattttcctggctttgcagagaagccagaagcagcggtgcacacaggatgagttgctcctcaagccgcccttgcctgggctgatttgtgttccctctcgcatacaccaaggctagtgaggcggaggatggcaattgctggctgtgctgcttggggaagcatccca

SEQ ID NO: 219290 - DNA, 582 bp, Homo sapiens
gtccagagtcacataattcatatatagaaaaaccttaagactccacccaaaacttttagtactgataaatatattcagataaagttgcagaatacaaaatcaacaaacacaaatccatagcatttctatgcaacaataacaaactacctaaaaaagaaattaagaaagcattcccattcacaatagctacaaacctccacccctaggaatacagctaaaaaaggacatgaaagacctcttcgatgagaactaaaaaccacacagggtggggaaagacaaacaccgtggcctttcagggggtggaggctaaggggagggagagcattgggacaaatacctaaagcatgcaggatttaaaacctagatgatgggttgataggtgcagcaaaccaccatggcacatgtatacctatgtaacaaacctgaacgctctgcacatgcatcccggaatttaaagtcaaataaaattaaaaaacaaacaaacaaaaacaagctgccatgtatttcaaccaacaaaaagtcattatgcttaactgggaaaaatatatttcttccaaaattttaaagcaaatttatcaagct

SEQ ID NO: 219291 - DNA, 189 bp, Homo sapiens
gggtggtcttgaactcctaagctcaggcgatccgcccactttagcctcccaaagtgctaggattacaggcataagccaccacacccggcccaggaaatatttacaaaattcgtggtagtaatcttcataatcttcccagttgggtttgagtaagaattcattacctaggtgttgcaacagatactctaa

SEQ ID NO: 219292 - DNA, 307 bp, Homo sapiens
ggtcaaaaaactaacatctactgcattaattatattagaacatgaatttaaactttattaatcataatggtatctacatagaagtgaaaaatagaggtacatatatagtcagaagtagtgttatctggtccatgtttggcaagggttaggaaacgtttttggaaaagggccacataggcaatattttaggcttttcaagccatatgctctgttgtaactattcaactctgcccttgtagcacaaaagcagctgatagtctgtaaacaaataagcatgattgcactccaagaaaactttatggacaca

SEQ ID NO: 219293 - DNA, 834 bp, Homo sapiens
ctcgaggccttttctccaggggcacctgttcagtgccacctttctcagaacattcgtttctcagcccgttcatggctagtattcttttcaaacctgagaaaccaaaccccagatctagagggagccaatttttaaatccatagctttctaacttttctgggctatatcttcacagcaagaaacacatgcatataaatatttatatgaaaggaaataaatttggggaccagaatttattcttaaacatgatgaagttgggtttgtcttctattctttaagaaagttgctagtcagaacctgctaaatgtttttcactttgcagtttgaaagccactgccttaaatgatccttggcccagtttgattctagatgagcatttcctttcttgctggcacgaaatatgtagtttcaggacagtgtggggtgagaggtgagaatcagaattataggttcaaatgggtttgaattcaagctgtgtgcttcagagcgatttatgatgtgatcctctatttcctcatttgtgaaaaggggaaacttcagggggatcggttttctgagaattaagggagaatcagatatgtgactttctcacatgtgttacaaacactcctgcagccacaaaccaccactgcaaaaggcactctcattgccaaatttactaagaaaaggtgtgtaagactcccaggttttaattttggaagattggcatcaagggagcaggtgtgagggttcatccccatcaccaggggccctgcattttggagtgaagaccaggccccagctcttataccagctccaattatctaattgtaatcaaagtcctattagaaaatg

SEQ ID NO: 219294 - DNA, 318 bp, Homo sapiens
gtatcttttacccattttcccttagtgttaacatcttgcaaaaactataatacagtatcacaaccgggatattgagatttttaaggtcaagatgtgcagcatttccatcaccacacttatgcactttatttctattattgttacattgtaatatataatgaaataattgtacaactcaccataatgtagaatcagtgggagccctgagcttgttttcctgcaactagatggtcccagctgggggtgacgggagacggtgacagatcatcaggcattagattctcatgaggagcatgcaacctagatccctcacatgcg

SEQ ID NO: 219295 - DNA, 421 bp, Homo sapiens
ggtgacataattctccgagcaaagagggctgctctccttaaccccacagaggcgttcttttagcctaaacaaatacgactgctgaaattgtaaataaaccaagaccattacgggaaattatatagacttttgccgatgaatacacaaaggcagaatatcaaacagacatcccttcttaaaaaatgtgaataaaacctgcccgattgtcatgcacttaaagaagaagtactgtggtaattgggagggttgatgtttgaagcagaaaattaaatgacccttttagtttgagatcaaaatggtgggtgcaagatgaagaaaagggggggcttattttgaaaactgctctgtatcaacagtgagaaacatgaatggataaaaaaaattacacagatttaaataaacttcagtatggcttaggtta

SEQ ID NO: 219296 - DNA, 311 bp, Homo sapiens
taagcccaaagctagctttgctcacctgattgctaattagggtaaaggccttgtttcataaaccaaatttcccattgtgactattatgagctataataatgattgataacaggatgtgacgtaaacctacactcttaaacacaggaacaaagaaacacacctaagtaatcacagggagataattagtgcaacgaaggctcccttggaagcttctgacccaataagaatgagtttgagatgacttttctgtctaacccagtggtttatgcactttcattctcccttcctcaggctttcaatcagactacttt

SEQ ID NO: 219297 - DNA, 445 bp, Homo sapiens
agtgagactgtctccaaaaaaaaaaaaaaaatgatggaacacaggttcttgtcctggaaaatctgcctttcctctgctcgggatggctgggttcagacgcgagggtgcctgtggtccctggcagcctgctgagtgcctgccgtgtacgggccccacaccctgcggctcacgcgcatcccaggtcccctctcatccactctgagacgcaggcggaggacaccgacaaggtgttcagatgagggagcagcggggctggggctgggacagggggtggggggctggcctccaggtggcagctactgatggggcagctaccggagtcaagccctttgaaatgaggtctttgtgtgggggagctgcagctgggacccccggaccccgccgccccccggggcgccccgacgaggacgagcaactctgcgcctgggtgtgacccggcggccgc

SEQ ID NO: 219298 - DNA, 406 bp, Homo sapiens
gacagtcggtagggcctgctgagggccaggcacagtgcaggggcgagcgcccaaaggtagggatcagccgctggtctctgtgcccaggggttcaaggcctgggaggagacaggctttgaagacttataaaacagttgtgggtgctaatttagacatattccagacatagtcacagggcagtcccgaccagaggagtttaagtcagtgttgttacaatgctttatttaattaatattatttttggaaggctgtgtgcacctggaggaggccagcggctgtgtctgttttgttcactgctctatcactcccacctgggataactcttggcaaatatgatgacagcacccattgacgaggtgcttaagatatataaggttggtgcaaagtatttatacggtgcaccata

SEQ ID NO: 219299 - DNA, 365 bp, Homo sapiens
tcagctgagatgccctctcccagagccaaactggcttccctcattctcacagggcctgaaaatcctcctgcagcaggacagaagggtccgcaagtgggagccctgagcttgagtctcacagtaaagggaagagggttgctgaggcccaagacagttctgggtcctgaggtctgctaagacatggcagggagctttgccccaggtaccggacttgctaagaaaaaatggggcaggcttctttgttgctaagcaggaaagctaagaaagcttataaagacctacacataaaatcaactttggtaaatgctttcagaaattgtcctatttagtgagaccctatctgataaagaaaggaaggaaagaaa

SEQ ID NO: 219300 - DNA, 548 bp, Homo sapiens
agtaggatagagtcatccagtacccctgggccacttagaaagcttaagaaatggttttggaaaggaacttcagtattttacaagaagtagagggattgggtgccggatggaccaaaatagcagtgcccactgcacatggcctaagtgtgtagcccacatatggttctgttattccaatgaataatagagtcattctttacttcacttatgcttctggcttgagtggcagtggcagaagctgtggtgtggcagggaaggggttatctcaccttcagattggaggagatatggattgtttgaatttgaaccttcagtgaagagttgactaaaatggtcctttttatgtggctttggatcctacagagtgagacacttggttctctggttttcacttgaatgacatttgacatttgtaggacagaaaactttatttcattagtataaatgagaaattatgatccactcagagtgatccaggctatttttatctatagtctccagaatggaaacttggcttattcagcactggctatctctgatggttaatg

SEQ ID NO: 219301 - DNA, 357 bp, Homo sapiens
ctcctcctggagtggcaggaatgactagtgacctccaccgacttcctccctgtcgcttgcatgattcctctgcttctacaccttcccctgtctactcaaactccggtttatctagaagattatgagtgcttttaaaaagatccaagataaaacttcaaaagaagtggcccataaaatctatacttttctcttccaaaaggtgatggcatctctcctacaaaagaggatgtaattcactcagatgtacaagatgaactggttcattctgcttgttacgtatgcatctaattagtttgaatctatgcagtaccaccaccttaagatgtttccaaaggacaactctaaactcttactatt

SEQ ID NO: 219302 - DNA, 384 bp, Homo sapiens
gggggaaaataaaacagaagatagaaagtggatgggacgagggttagggtcataactttagctctgagaaggtggcttttgggagacatggatggtgatctagggggacagctttgtggacagagaggactgcaagaatgatcaacccagaggggctggagtgtggttagtgatgaatcagcaggggccaaatttgtggctgtggttaggagtttggattttacttttgaattctgaacagtgggaagtcactgcatgggaacttttcctggggtctaggagaatatttgagtccacactaaaagacagaacaggacattacgaagagcggctggaataggctctccttgtcctgggaggtttttgaggccagccagagtattg

SEQ ID NO: 219303 - DNA, 461 bp, Homo sapiens
cactattttggtggtaaatgtgtctctgaattactctcccttgattcctgagggaataactctccatggttctcttgttgggtttgagaaaaaatgattgttctagaaggatgtgttctttttagcagacattgaagttgggtaagctatagagaggatatcctatagtcatagaacaaagaaagatatattcttgatagggaaatgtgcactggattgaaatttgaaaggcgttcattaagctggcattgattttacagctgtttttcaaccagtgttagttagccaccacttatatactgagtcattgagagaggtgctgtgtattcagagtgaattatacatggcccctcctttcaagagggttacagtataagaccagaggtaagatatgcccatagcaatgatacaaaataaaaagtcttagattctaagaaaagcaaaattactaaaggaatttg

SEQ ID NO: 219304 - DNA, 230 bp, Homo sapiens
actggtcatgtaggcttttttatagttctaaactaaatactacatagaactttgtgactgccctgtttatttagctttagaacttcatgtgctagttcagtctgtgaagattcattattgatcagatatatacaatctgtaatttggaatattcattcatatttagttgaactttaacaagtcacaagttgttctccatagcaaaccgtaaaagaataaaattaaagtta

SEQ ID NO: 219305 - DNA, 398 bp, Homo sapiens
aacagaaagatgactatttttagcttttctttctgctggtgaggtggaatagcaaatatttttagagcaattgaaagtacagcctcttagattagctcagtgtttctgtcatcagaatctcaattattttatgtatctagattttttttttacttccaatgttttgagtttatgtaaattgcaacatgattcgtctttttatttttgatctagttcgtttctctgtggaacaatataaaagatgaaatttctaaaaccttaacttttctttctgcactttttatgtattttgagttgtaattatattctgcttattgtgggcagttctcttctttcttggagatgaaactttgataattaatacttacggggagatggtgttacaaatcttctctcat

SEQ ID NO: 219306 - DNA, 341 bp, Homo sapiens
atttgtaaggctgcagtgcatgccgagtgtggtgcgtatgtaagtgttgtgtgtggtgtgtatgtatgtgttgtgtgtggtgtgttgtgtcttgtgtatgtatgtgttgtgtgtgtatgtgactactataattgaacctctactgtctcaggcacagcgctaggagttacatgtggcttcattccacttccacctccaccctccgaggcaggcaatgtttattttttacagatgggaaaactgaggctcagggaggatgaaaactatctcaacctaagtcgcaagtgtcgatcactgaaagaacttgggtgcactgcagcctgcctggctgaaagctcgtg

SEQ ID NO: 219307 - DNA, 548 bp, Homo sapiens
cagtccagcccccatcacgtgctccgttagcaccctgtacacctctttcctgcacaaatcccaggaatagataaataattatctgctagaacacacgtttcacaggacagggatgtatggggtgcctggtcagcacttgcagcagagtgggtgctgtatgttgctggaatgaatgaatggaatgaattgagtaaaattttgtcatggctggtcctgtggggtcaggagatcgctgtttccattttatagttaagaaacttcatttccacctctttacccatttctacttgcctttcaggctactgccaaaatgttattcccttaggaaggcaaggactaaagctttagattgggtcagctactccccacctccaccatggttaaacccccatgtttccaagatttgctctgattcccttgtagatatattcatctgctgggcactgttaatttggatttatgacctcttaactcctaacaccaccacttacataatgtgcagggcccagtgcaaaatggaaataaaataaaattttgtttaaaaagta

SEQ ID NO: 219308 - DNA, 473 bp, Homo sapiens
ttccacaccaattttttcaacaaaagaaactacggttggtgagaatgtggagaaattggaactgttgcgcactgttggtgggaatgtgaaatgatgcagccatgtggaaaacagtatggagagtcctccaaaaattaaaactagaactaccatttgatcaagtatgctaaagagttgtaagcagggtctcaaaaagatagtagcacattactcacaatagccaagtagtaaaaggagcccaaatgttcacccacaaacaggtaaacagaatgtggtgtgtatactcacaatggaatatttttggttttttccttttttaaaaatcaatggaagtgctaaccaaacaatggaatattatatagtgtttaaaaagaaggaagttctaacacttggtacacatgaatggatgtcaaggacattatgcttagtgaaatgaaccagccataaaaggacatatactgtatgatcccatt

SEQ ID NO: 219309 - DNA, 468 bp, Homo sapiens
ttgggtagaggaattattcagtttaggatctggtctagagatatacagatttacatttactgtttggccttttttacatggttgaataccatatgaattttaaatattagtaaaatatccaaaattacttttgatagaggaaaatgtattgcactatatattcttctttgaatagagaactttgtcaagtaagagaataaaaaatacaggatgatttctattaaacatacagtattcaaaagctatgtgagggaatccagctagtgtgattatgtcaaaagggaagatagctggtctgaaggtaatgagttatctcaactgattggtcatggccaattacagacagaactccttattttacttccccaccccccgactactgcacttgactagtcaaaaaataaaacaaacaccaaaaccaaactaaagggaagacagtcttttcctagcttggcattagttggatgg

SEQ ID NO: 219310 - DNA, 316 bp, Homo sapiens
tgacatgtgtctgtagtttcagctactcaggaggctgagattggaggattttttgagcttgggaggcatgggttgcagtgagctaagatcatgccactgcactccagcctgggtgacaagagtgagaccctgtctcaaaaaaactccaaaaattatctgggcatggtggcacatgccgggagtcctagctacttgattggctgaagtggaaggttggcttgagcccaggagttggaggctgcagtgagctatgactgtgtcattgcattccagcccaggtgacagagcaagactctgcctgtctctaaaaaaaaaa

SEQ ID NO: 219311 - DNA, 376 bp, Homo sapiens
accaccccctccctgctgtaacagctttacccgcagaaactgttcttccctgcgctcttctaattagctaattacatttagcttagactgtgcggccgaccccaaccaataggggaatgaaacagcaactaaggccaacagggttagggattaaaaaccctctccattaaaaatgctctccattgtgtgatgtgctctcgccattgctccacccacaagatacactcttctatacaagtaaatttgcctagctgagaaaacttatattcaaatgctatttcttttgtggcactaaaaatttgttccaacaatagatttctgtggttttaacctcacttatttaaaattaaatggatttgtaagccatttggtctgt

SEQ ID NO: 219312 - DNA, 527 bp, Homo sapiens
taaaatgactaccttcggtccagaaaaattgatagaaagaaaatgcaaaaatcaattacaatctgaaagtactaaataaaaaagtaaaagaacaaattgaaaaacacaaaagaaaaaaactgaaactgataccaattatgttaaaaataatgtaaagcagtgaaaataaaaaatgaaaaacaaaaaaaaagacaaaagaatcagactgagaagaagcaatgacaatgaacgggagtggcaaagagacaccagtgacatccccgtgaaaaaacacacaaccaagaagctttgtgatgatgggatcctttccgagtgtaagtttttaagcagtttgaccaagaaagctccagtttcacaccaactgctggggcctatctgataacagacttcctgcattcattctcaaaggaacgcccaagttacccaatcaatggcatgatgacccaggcctggagacaaaaaagcatgcccatcgcaagtggtgattcagagcctgtatgggagagtttgtgggcagtgttatgcct

SEQ ID NO: 219313 - DNA, 790 bp, Homo sapiens
ctccttgctcgcctgatatagctgagcacacagagaaccagatggccctcaggcccggacagtgaggctggggtacctcttaggcacttttgcctcctcagcctgtggctgatgaacattagagggactgtcagccctttgaataccaggtcaaagcagaaattttattatcctaaactcctcccatgttattttggggctagactttttcaatttaatgaagcatagcttatatctcttgtgtcaaggtcagtcatctcaaagtgaattttccaagtgagctgtatctgtactgatgtcaatgtgacaaaggcagtgctttctgacaggaacttactaacttgctaataagtactaacttgctagctaatcaggaccagaagtcagctcactggtttctcatccataaagagtcagcattcccattccataaaaagtcagcatttcttttgaaggtcaggacctcctcccttaccagaggtgctttctgagcatggggctgagaaccagcagtctagcctgagatgctttccaatgtcaaaagaggcagaaagctccctaatggtacctgggcccacgaactggtgactccacctaccgcctctttgctactgctgctcacagagcctgccatgccatctgtggtctctcattcccacattttctcaaacctgtcactttccattttgggacttggactttgaggagatgtacatgctagggcacatcttctcattgaatgataagatttgggcgcaagtggcttcctttaagcatgctcaccctggct

SEQ ID NO: 219314 - DNA, 302 bp, Homo sapiens
caaggagacttattcccccgcccctttttttctcacagatttcttgtatgtctccctcgccccgcccgcaccccgtccccccgcccccggacaattaattgtaggaggaaacaagaactaagatgtctattcgagtgattttttatatctttcttaaggagaaaaagactgacatttgacactgtgctcttgttttgtcttgctgataataactgacagcaatgtttacttttcttacaaatgaaactatcagggtacgtacttttaagctctttaatacaatgggtttcatccttccaaaa

SEQ ID NO: 219315 - DNA, 430 bp, Homo sapiens
aacatgagacaggaaggtaggaggagaggggagtgccctgggtgactggggtggctgctgtgtgctgctgtgatacctgtttgctagggagacatgtatgcaatgcctggccgtgaggccctgagggtgccgggagcctgggcttgctacttgagggaatcttgtagtgaaaagaagtttttatctctaactcctttatccaggcttcttcttggatgtctaggaactttctttatatctccagtttagtgcttggcatgtggtgggcacttaaagttggctgaaagaaccattgatttaaagtaaacttgggttagtgcaatggctcacacctgtaatcccagtgctttgggaggctgaggtgggaggatcacttgagcccaggagtttgagaccagactaggcaacatattgagacccccatttctgg

SEQ ID NO: 219316 - DNA, 634 bp, Homo sapiens
aattggtggctgaatacgggatttgaggggaggggcaacgactcaggttttgcattgtggtgacttgaggatcacgtcccttaacattgctttattctttcagtgatttatttacaaaatactttgagtgcttacaagggcagggcactgtataggtgctgagattgctaaaaacaaaaatgctgttaaactagactcataaattaaagtaacaatgaggaaaactttgagttaatgtagagttagagtgtagacaatgaatgccctaatgtagacatgaaaaaaatgaatgaggctgggctgggaaggcctgttggaggaggtagcatttgagcagcgtcttgcctatggttagggattccacagggaatgagaaagtgtcactttagaaagaaagaaggcaagaaattaagttggtggaggttgaggaggacatgaattctattttagatggactaagtacaaagtgagaatggcacaccatggtggaaatgtccagcacatggctggaagatggaactgggattttgcaggacagtcagtgctggaggtcaagatttgagaatcatcggctttggggagaatttctgaacctggaagagcagatgcgactttgaagggagatgactgagtc

SEQ ID NO: 219317 - DNA, 446 bp, Homo sapiens
gctgcaaaacccgtttctctagagataagctgcatgtcctgggcaggtggctccttctctccctgccttgctcccgccctccccccggatccgcgtcaaaccgttgccgctaatctagttgcaattcccgcagaggactagttttatgttggggctgccgtgagttagattatgaaaatgtgcaatatctaaaattttacaagaatggcaatccaggagaaattcaggatagtttattttgtatttgaatgtattccttcttgtctcaaaactcccacgaaatatctttgttttcatcttaactcccaaagctcttgtatacattttcgaatttaattttttattgaagagggtgtctcaagaattccctttgagatacattataagtaattgtttcaaaaatgaggatatttagtttcgttttgtattttaattagaacccactc

SEQ ID NO: 219318 - DNA, 324 bp, Homo sapiens
cttgtgaaataccccagtctctttctgcttgtggaccagtggatttatcatacgcacaatttgttactaaatttgaattgttgagttaggagtgcttgagaaatatgtgactgcagaccaggactgtgtcacctacttggcctcggtgtcattttcccgtaagaatcaggaaaagattattttttctgtttctatgaagaatgtcactcgtatacgaatggtcaataggtacatgaaaaaatgcccaatgtcatcaatcttcagggaaatgcaaatcaaaaccagatgggataccacttcacacccgctagaagggctattatg

SEQ ID NO: 219319 - DNA, 417 bp, Homo sapiens
aataaatacctccatacctcttgttttacacacatgtgcactcacacatttttaaaaaatcaaactttagtcttctgaggtaccatgtagtggctgattaaaggaagttcttataagcacctcaccagtcttcctctctccaatatgtacttgaaaatgacaattcctggagtcatggtgagagcacagactttggagtctggtactaatctcagctctgccaatttgttaactgtgtcagtctgggcaagttatttatcagttgcgattcttagtttctttacccataatatgagcattataacagctagctcaagagtttttagaattgaagtgtaatcaaaatgtattaagacatatgtaaagcacctagcatgatactcggaaaataatcttcaataaagggtcattataata

SEQ ID NO: 219320 - DNA, 660 bp, Homo sapiens
tagactagggatataccataactcaagagttgttataaagttcctacctcagtgggaacatggaggaggggatcaacccccatcctactccctgtttctatggttacaggagggctgttctaggaagtgaagagtcccctctacacagatggcgggctgagggaatgcaaataattcagtgctgtgtgatttttacagtatgctggtataaaacacagttgaaagctctgagaaagaacaggagagcatgtgctctgagtgtatatgcaggtgtatgtgtgtgcgggggtgtgtgagatgtaggggtgagtgtgtgggacgaatgtctgttttgcctctttgcccaccatggtggctctaaatcatctcttccaaaccctacagctccggagaacatcatgtgagggccactggtctattcctgcctgtcttttgtctcatacggggcaaatctccagaaggtgtgatggtactagaaaataagtcagtggggccgggcgctgtggctcacacctgtgatcccagcactttggaaggccaaagcaggtggatcacctgaggtcaggagttcaagaacagcctggccaacacggtaaaaccccatctctgctaaaaatacaaaaattaggtgggtgtggtggcaggcgcctgttatcccag

SEQ ID NO: 219321 - DNA, 473 bp, Homo sapiens
aagttgggggaagtgcactgagcgagtggcggccgggggacagtacctgcttgccttattgggcaaatacagccttccaaggtggagtctaacgccgtggtgtgaactggccacccgaacagggagtaaatagtgctttgtatctttaaggaagcccttttttaaatttaaaaaaaaagtcttaattataagactctttaaatgcccaactgcatacttggagctttgggactgaatttggaactttcctgtcaagcgacctcccacgactttactgctgagcctgtgcacgtgtgtgtaaggggagaaatccaggcatctagatgcagacttgtacccagttacttggggtcgcgtgcgctcagctgggacctgggctcgtgcgcttagtccggagccctgatctgcgaacaggatattaaaacttttagtacaattgattggactacttgaaccatcgggatttggggagg

SEQ ID NO: 219322 - DNA, 234 bp, Homo sapiens
gctcattaccaaggggagggcactaagccattcataagggatctgccctcatgacacaagcacctctcactaggcttcactaccaacattggggatcacattttaatacaaaattttgaggggacaaatatccaaactatatcaccttcatttagtccatttcttgcactctttgtttctttgcatagattcaattttctacctggtatcatattccatgtttctgaaaaattt

SEQ ID NO: 219323 - DNA, 337 bp, Homo sapiens
ctgggctagtctggcaggggcctgcgggaaatggcgtggaacaacctcagagttgtctccctgaactccgtgatcatttgcaaagagctgctgagctatggggcatcagctccctcttatctctagcctgccccgtgcaggacccaagagacagccatgggaccgacagctgcaggtgacaaggagggacctcaggtgtgattaggaacagcaagcatctagaggctgaaggccagcaccaaagcatcggcaccctgcagttcatgcattttatagcaagtagaaaggttaagctgtggaaaccataagcatgatttttttttttaatagaggggag

SEQ ID NO: 219324 - DNA, 233 bp, Homo sapiens
atgatgttaaagaagtttactctgagaaattaactcttttcagaataatgccaaaataatgctataaaacttaagactaaagaagcatgccgctacagtgatgtccggaggcttttcatagcatttgattttaaaatagtaaagtaactgttaacagggaatggctgaagaaatcacagtataaaaacatcagttataatttatgaaaaacatgttagtatacacacatgctg

SEQ ID NO: 219325 - DNA, 584 bp, Homo sapiens
cataccagtaaaatgtattacttggttctgtcttctgaaaaggcctacaaacaataaacgacccaatagctatgaatattcttagcagccaaattgtggtatttaaatgccattttccactaaaaggaaccaggactccctaaagaaatgttaatttccaggtgtaaaactaaaaatatacaagatgaacctacaacatcttgtaacaccagaaagcaagacagcttctggggtcatgtcaaaggggcttgagccaacaagaagactcccaatgaccaaaactggaatcaatttgagcatcaataaggataatatatttaaaaactaagtacatttaagtctgtgtctttttttttttttttttttgagacgagtctcactgtgtcgcccacgctggggtgcagcggcacgatcttggagacaaaaagaccacaaaattttattcttcgtattattggtgatcttactgtattgttattctgaggctgtgtatttcaacaaattagtagttgtgttagggttcctgggaattgagttctccagtacagggaaagacaaaagatagaagatagaaataaaaaaaa

SEQ ID NO: 219326 - DNA, 747 bp, Homo sapiens
  misc_feature (733)..(733): n is a, c, g, or t
cacaaggtaacactatcaagtaggtatatcataacttatcttatcctaaccattatgatagaatgtttatttcttgtaacactatttcttaataagggtagtgagataaaaatttgactttttcattaaatccagacatcactgctcctaaagcaactaaagagttagaaaaaagaaaattctgacactagaaattttcatggggccaatatcacccaaggactgagcagttatcaatattgccagggggactgtttcttctgaaagtccacaggtagaagcatctttagtggaactatatcatgttatatactctattttgacaatgtacacaatatttcgagtaaaacatcaagatggtggaaatctgtatgtttaataattaaatttcaaaattttcaagatgacaacacttgataaaaaatgtgtttttaaagcaatgatcactgataggaccaatacattttagccacttttaaaattatttaaattattattttaacatattttagggagaaaagcatgtgtgcatttgtgtatgtgtcagtaaacgtattttacaaaaaacaatggaagaatatatattaatctgttaagccaagttatttctggggagggaaatgaagcagaaagtaaagggatactttatttgttgtaatttttatggtttcatctttcccaataagtatgtattcatgtactatttggtattttaaataataaattaataaanatattttttcatca

SEQ ID NO: 219327 - DNA, 427 bp, Homo sapiens
cagtttgtcttgaaattgtgggaaaaaattctaagttgaattcactggtaagtaattttttaaaatttcataatgcagattacatccaaaatttgatttaaaaattaaaacataagactgcagagaaattctgcatttcaactccaatactatccagacttcagaaataacttatcagttatttctgtaagcttcttgcttacctggatacctgacaggtgagatggctgtagcagacactggcagttccctgcccacacacctgtccctgtccacagctgcacaaggcagctctgtgtgcaattgccagcatctgctcctctgttctcagggaatctttgttagaaaaatgctgccatatttgtttctcacctattagtcttgtctcccagtcaagagaataaatttatgcaagcagagattgtac

SEQ ID NO: 219328 - DNA, 335 bp, Homo sapiens
ttcttttttcttttttttttttaaagagaacaagaaaagtacaacattgcttaagtcctacctcatctttatttttttacagatgaatgtacttatcttttctgcagggattgagcctgtgaagtgataatttctatctacctcataaatctttacatttccttctgcaacaggccctcttcccctcctcagtggagtttgcatttccctcttcccctgcgtggggcatgatatgcacaagcctggcatctgtatggctgggagggcactggatgtgtgtggtggggtgtattctgtagattgagccaaggaaacacaaaaaaaactactaagta

SEQ ID NO: 219329 - DNA, 396 bp, Homo sapiens
agaaaatttcctctccttgccccgtttctccttaaatggatcaccagtacagtctcttacttctagagccatgttaagctttcttccccaaagttgtaatgtccttcttttggttgtgtcgtgtcctaaaatcctactctttggtacaagatgaaggtatatgaagagataatgaaggaaacaaattcaatgtgtttgccaagaacacagtcttttaaataactcttaaagggttcgtttaaaacagtgtaataaattgtggtaatctagtacacaaagctagtaggaacctcgtttattaataatatttcaacattgagcagtagagggcagcactatccttcttttgcaaaatgttgagcactcttgagaaggaaaataaaggcaaagctcctg

SEQ ID NO: 219330 - DNA, 374 bp, Homo sapiens
ctaggaagggtagcgggaaggagggatcaggagatgttagttaacagatacaaaattacagctggataggtggaataagttctggtgttcttaagcaccatagggtggctatagttggcaataatttgttgtatattttcaaatagataaaaggtaggattttgaatgtcctcaatgcaaagaaatgataaatgcttgaggtaaggaatgtgctaattaccctaatttgatcattatacattgtatacaggtgtcaaaatatcacatgtaccccataaatatattcaattattttgtgtcaattaaaaatactttttagaaattactgtcaaaaaatgtatgccatcatttttactttagaagttctcttacta

SEQ ID NO: 219331 - DNA, 875 bp, Homo sapiens
agcgacattgttctccaatgtcatcagactccagtgcagaaagggatgttttcagattttccctttttattcccgctggtttcttttctcatggaataaaatagtcattgtataaaggccaaacaatttaagtcatcatagattaggatcctgtgaagtttccatctgaacaaccaagagccagaaaataaccaaattcctggggaaattatataataattcttacttattcattttttccaagtgttttgtcttcagcaccttgccaccttgcaattttggctgagctctcacctaaaacacttctggtgtttctagcagaatatatacatacaagtaaactgtatatatgtatacatatatatacacacacacatacaaatatataaatgcatataaattacttagtactataattatattttaaataatctttgacaggatttgaagacattatttgtaattttagagagatttactctcaaactgattttaaatccagggcagtcactaaaataagaattcatgtaaagcatagcctcttattttacccttgtctgtcatctccttagaaaatgccatcccaggctgggcacggtggctcacacctataatcccagcactttgggagggcgaggcaggtggatcatgagatcaggagttcgagaccagtctgaccaacatggtgaaaccctgtcgctactaaaaatacaaaaagtagccgggcatggtggcatgcacttgtaatcccagcaactcaggaggttgaggcaggagaatcgcttgaacctgggaggtagaggttgcaatgagccgagatcgtgccaccgcactccagcctgggagacagcgtgagacttcctctccaaaaaaaa

SEQ ID NO: 219332 - DNA, 434 bp, Homo sapiens
gagtgttttctagctgagtgcggctgtgctatgaaataccatgtgctatcttagccttagaggtggacagcgccgggctcccgtgtgatcctcaccaccctctagctgtgagcccttgaggatgtcatggtgtctttagcctcagtctcctcctctgtaacgggggtggataaaaccacctcacaaggttgtcatgcggcttaaatgagcaatgtgaagtgccaccaagtgtctggcacacagcaggccccaggggtgggcagaggcagatagaaacatgtggctctaacagcatctgtcttctggggaagacagaacacagctttgggagtgagcaggtggagaggaattgcctgtctcccatatccctcttcagggttcagaccccagcgaggaggtgtctggtcctcccagggctgggatggcctaggatg

SEQ ID NO: 219333 - DNA, 318 bp, Homo sapiens
cacatcgtgggtaacatttaataagataaacactggaaaagaactggggttgggaaaagaaagaggagggaaaggtgagcaggttcaaccacgttaaatattggataaacatgaaatatctaagaaaagctgtcaagtaggcaactggttcttttcctcatttcccacattcaatccattaccaaatcctatcaaatctacctttaaaatatagccgaaatctatccacctctcttcatctcaggaatactgttaccaccctaatgcaaggcatcattatctccctccatgtgctccatactgtagccagacagatct

SEQ ID NO: 219334 - DNA, 558 bp, Homo sapiens
tatatatatatagtgtacacacacacacataataggcagtgagagagcagtaatctaagtgttctgtagttttcctagccttttatagatagctatcaattttaaagctttatttccatcacaaagtaactggcagttacaagaataaagctaaagctaagttaaacattaaacaaaattaactgcccttagggatgttctagagttcagaatctctcaaccattactcctccctgcaacacaggtggtccttactcctctctaactgatttaatgtgtcacaaagctgagcgttttgtttgatcttacctttatgaattatatatgaataacaatattttagtttctagagttgagcaaacttgatgaaagaggtaaacctatacattccttagacaacagatccctttgcctacaatagaggctcctcaaaatggtatgaagagcaagctgatgttaatattcaaaagcctaaatgattctaaaatgacattgaaagtatacaaccacttttctaaatttttccatccaaaattaaaataaaggaaattcctttga

SEQ ID NO: 219335 - DNA, 389 bp, Homo sapiens
tgcatgttcccaagaacttaattatagaagtttttctgtaatgaatatgacagagaacccaactctacacaactgatctatatttatgttcctactgaggcatggtagtcctccttccccacacttgcctgcccatgaaatcgaaatatttggcaggattaattctcaaaagataaaaacactctaattgaagaaaagtatcaattcaaatcatatcttttaagaagaaatatattctttactttcctgcttaaatttgaaatagtagcagttgaaaattgtggattggaactaattactgattaaaacaaagtacacctatgagttttaatagaagcagtaagagtaatgtgtaaatgacttttctttgttcatggaaaccattgtgg

SEQ ID NO: 219336 - DNA, 464 bp, Homo sapiens
aactagatgaacacaatgctatgaatgcctataactgacttatttgaccaatatacagaggtcagtaaaggcttttgatgaagtagtcctggagccgagatctgatggatgagcaggactcctggttttggaggatgcagaacgagtaacataactgaagaaaggtcactgtgcctgggtagaggagtaggtatgggctggcctgaggggtctttttccttagaggtgtacgggaacccactgaagggttttaagcaggtagatgatgtgtggctttttattttattttatttatttattttttgagatggaatctcgctcagtcgcccaggctagagtgcagtggcactatctcggctcactggaacctctacctcccaggttcaagtgattctcctgcctcagcctcccaagtagctgggattacaggcatgtgctgccatgctcggctaattttatatttt

SEQ ID NO: 219337 - DNA, 436 bp, Homo sapiens
gactggctacaaacctcaccaaatgcgaggggactggcttccaccttgggctctgtgtgtatcatttccacccgaaacagaattgacttcatcgcagcagcaaaacaaagacagctctgagttatactgtaattcacagcgggagatttatgaatattattttcctgtaaaatctagcatttttctcgttgctacttgcaacctgtaagtggtataaagctgtgcacctagcaggacgccgcactgcctgtgcgcggggtgcccacgtgggtacacagcccccataaatggtgcctttgtgtttaacttgtctaatcagctcgccatatcaaaacttcataagtggttgcttctcatttaaaggtctagtaaaactgcaattactatggctgtaagacgccttgttctgaaaagtgcattaaatagttttatagat

SEQ ID NO: 219338 - DNA, 933 bp, Homo sapiens
cagtaatgttcttctgatttgctgctgtaaacagcaccaagaacagtgtctggcgcattgtgtgcgtgtagtaaatctgttccctagacaagaggacatgtgccagctactgtggcaggtactcaacttacacagccgcactcagtcactgtgaggaggggttctcccaaatcacaggtaagctgactgtggcaccagagaggttaagtcccattcttaaggtcctacagccggtacccaggttgactgactccagaaccagcactctttcctgacgctgcctgtgtagacagagggagtggattcatagagccctagaatcctagaatatggggaaaatagggccagctttttttttttttttttttttttgagacagagtcttgctctgtcacccaggcggaggttgcagtgagctgagatcacgccattgcactccagcctgggcaacaagagcgaaactccaaactccatctgaaaaaaaaaaaaacaaaaaaacacttaacatatagtatgtggcacacagtaagcactcaataaatgtaagatgctattgttaatattgcgactcttagtaacattgtttattgtctctccctgtattacaattcaagctcctgacagcaaacgctttgttttgtttaatgtattcctggtgggaagctcattttttggcacatagtaggtacataataaatatttgttgaatgaatgaatgagcaaatgaatacacagacaatgacattgacatccccagcgtccaggaggccccatatggctggatgtggagaaggatggatgctgggaagacaaacccaggccagctgcttgctcagggcccagccagccctctttgttcctagcagcccttggggcaggccctgtatcagtctgccctgatggggggtccattccactcagaacagagggttc

SEQ ID NO: 219339 - DNA, 657 bp, Homo sapiens
cagctccccaccagacatctgtgaattttgaaccaggaatgttcccagtgttatatggaatcatccaagccaagttattttgactccggtttattttaattatttaaggtaattatttattattattatattttttgagatggagttttgctcttgttgggggccagctccccaccagggcgaaactccaaactccatctgaaaaaaaaaaaaacaaaaaaacacttaacatatagtatgtggcacacagtaagcactcaataaatgtaagatgctattgttaatattgcgactcttagtaacattgtttattgtctctccctgtattacaattcaagctcctgacagcaaacgctttgttttgtttaatgtattcctggtgggaagctcattttttggcacatagtaggtacataataaatatttgttgaatgaatgaatgagcaaatgaatacacagacaatgacattgacatccccagcgtccaggaggccccatatggctggatgtggagaaggatggatgctgggaagacaaacccaggccagctgcttgctcagggcccagccagccctctttgttcctagcagcccttggggcaggccctgtatcagtctgccctgatggggggtccattccactcagaacagagggttc

SEQ ID NO: 219340 - DNA, 494 bp, Homo sapiens
atccaattacctctacctggtcccgcccttgacatgtgggattaatacaattcaaggtgaggtttgggtggggacacagagccaaaccatatcagggaacaacccaggtgtttatcagtcgacgagtggataaacaaaatgtggtctgttcatgcagtggaatattattctaccataaaaaggaatgaagtactgatacaagctacagcatggatgaaccttgtaaacactatgctaagtgaaagaagccagtcacaaaaggccatatattatatgattccatttatattaaatgttcagataggcacattcattgagatctgtggttgtcaggggctagaagtagggagtaatgagaaatgactgcacacaggcacaggttctggaattggatagtagtgattgttgaaccgccttgtgaatctgctaaaaaacactgagtcatacatttgtaaatggtgaattttatagtatatgaattatagctcaataaa

SEQ ID NO: 219341 - DNA, 356 bp, Homo sapiens
aaaacttcatgctaaaattcatatagaattttaagggacctggaaatagccaaaataacattgaaaaagaagaataaagttagtggcgtcactggggtttttatgttgttgttctttttttttttttaatttcaaaacttactacaaagtcacagtagtcaaaactgtgtggtactgacataaagatagacatacgaaccaaagaaatagaatagacagtcccaaaataaaccctcacatgtatggtcaaataattttcaacaacgttgccaagaccatcgagtgaggaaaagacagtcttttcaacaaatgatgttgggaaaactgaacagtcacatgcaagaaaaacaaaccaa

SEQ ID NO: 219342 - DNA, 489 bp, Homo sapiens
tgggcttccttctgccactaaagcaaacactgtcaatagaaggaaaggagaacaaggtgatggctgaaatttgcaatcctgtgttttcagatggaggatcaagagccctttaccttgccaaacattatttgaattttgtagaacaaacactggagtttaagttacatcctcaaattcaatatttggcataggtgatttctcccacttagtgtacctgttaattgctttgagataatgcaataggcactatcagaggattttaggagtttgtatgcattactccacctcttttttaactagtgaagaaactgagccccagagacgtgaagtgattcacctaggattatatagctacttgaaaaatggactctagagaaccccaggctcctaactcatattacagtgccctttcaactgtatgaggtttaattctgtttgttttggaatctgtatccattaaaataaagctatttgacttggatcaacttg

SEQ ID NO: 219343 - DNA, 445 bp, Homo sapiens
cccgagtagctgggattacaggtgcgtgccactatgcctggctaatttttgtatttttagtagagacagggtttcgccatgttggccaggctggtctcaaactcctgacctcaggtgatctgcccgccttggcctcccaaagtgctggaatggcataagccactgtgcccggccaagaaggttgttttttccgagctgttttttctgctctaaggaaagaggcaggattcaggggatgctttgtatcttttcctgcttcccaacccgagtccttcctcttgttttggatttcttgctgcatcatctctgtccttctttagggctggaggtgacctctgcgagccttcccttcctctaactctggcctctttcctgctgcaacatagttctcttctagtccgttcaaaactttttattgccacgtgaacaatctcattgggaaaca

SEQ ID NO: 219344 - DNA, 612 bp, Homo sapiens
  misc_feature (609)..(609): n is a, c, g, or t
gattacaggcatgagccaccatgaccagcctgcatttcaaaaatccttaatttatgtatttttttttgtgctgagatgaaattcatataacagactattttaaagtatacagttcagtggcacttattacattcatgatgttgtacaactctagttccaaaacattatcacctcaaaagaaaaccttctgttcattagcagtcacttcccttgtgctaccccccgccactggcaaccgctaatctgctgtctctggatttactttttctggagatttcatacaaatggagttatatagcatgcaaccttttgtgtctggcttttttcatttagcataatgctttggaggttcattcatgttgtagcatgaattcagagagctttattcttttttgtggcagaataatattccattgtatggatatatatcacattttgtttatccattttaacagttgatggacatttgggctgtttgcatcttttggccgttgtgaatagtgttgctctgaacattcacatacaaaattttttttgaaaggctctttgcaattaaccattaacctttttaaagacaccccctttttttcccctttggttgggacccanccc

SEQ ID NO: 219345 - DNA, 555 bp, Homo sapiens
atcatcccctgtgaaaattcatctctccttcacctactccaaaatgaccaatgatctcttagaaggtgccttagaggaaggtgccttatttggaattctcatagccccttacattccagggcgcactctcaattactttcgaatagcagcagttttaaaggccaacctaacattaggcaagagcctgggttgaggcttggtttcatctcccagacaggcactgtgctgggctttctctgccttatctcgctgtaacactcctagctctgttttccatgagatcaggcagctgaggctcagagagatggagtcacctacctaaggtcacacggccagtacggaagctgggagtgcaagcaaaggtgtttgaatccaaagcccacatcctcaccacactagcagattgccttagggttgccactgggagagcacctcacatcagaagcctgtgtgcaagagtcagtgtcccccatgaagctgtgaggtcccaaaagacagccatcgttttttattcaatttggttctcccctaagttggtcaggattttttttttgg

SEQ ID NO: 219346 - DNA, 553 bp, Homo sapiens
aaggtggtactattttttattaatcagactggtaaaatttacaaacacctataatgtctagttttgacacagccgtggagagtagagtctctagcatttggtgagtcatccctcattgcaagctactgcactcaatactttacatatgttatttcctttaatctctaccatctcccctccaccccaaacctaaatttataaattctaaaacacccttgttagatactattgtgtcctctggatctcacagatgagaaaactaaagcttcctgggtaaatcattggggctccaaggtaagttacttgccttgcattgcaattagtaagaagtagagctaatgttttaagttcaaatatgctaacgggtgtatcctataaggagcaggaagatgggggagaaagatgtatagagacataggctgattttttatattgccagagtaatgtagatcctgatacgtttgttaacatttgagggttatcactagtagaacaaaatactgatccagaactttatagatgatagttggggaaaaaggaaaaggggaacctg

SEQ ID NO: 219347 - DNA, 774 bp, Homo sapiens
  misc_feature (709)..(709): n is a, c, g, or t
taaagatttaaaagttcttactttttgttgtattttaaaatgtttaggtgtttgtgtcacagtgaaatttatattatgacatagaaagctttttggccccaaaacattattaagaccctgcattcagtgggtctggaagaataatgttaccaataaattcattttagtctaactctttctcctctgtgagcacctcttatcttgtaggcatacatagttttgactttgaactcttctgtgtatttcatgtttgcctaactcatgatactagtaatgctaaatctcctttattccaattggacattgcagttagggcaatcccataagaagatgtaaggggggagttctgctcagtgaaatttattaaaaagattaggatatgcctgtgccacgatttaactatgcattagcaaaaaaggccaaaacattcattttgtttatacttcttgtaatgtgtgcatcaaactgcctgatcatttaatgatacttgattcttagataaaggtgactttttaatgccatcaaatgagttctctttttccattagcattggagagaaagttttcttatagcagcgggaaaaaaatattccaggcaagcgtaaagctcagggtaggccagtttgaaattgtcttttatttatacccctgacaagtgcaaggagagaattttctgtgacaactcagtaggccaccttaaaaagaggccnaattgctggggaaggaagggcttgcctggttatggaagggtgggaagaatttggcccactggggg

SEQ ID NO: 219348 - DNA, 365 bp, Homo sapiens
atgttgctgctcaggcaccgtgaagagatagcgtcgtcagcagactagaggcttgtgctccagagcatggaagaaaaagcctacaaagacacaggaatctgccacttcagtacatttattgtggtccagtggtcaggggcatgctgtgatgtcctgtccaaaataaaggacaaatttctgtatcttgtctgtcctattacaaagaaggaagcacaatttctgctaggcttcttcaagttctgtagttaacacattttacacctagaaacattgctctggccctgatattagctgacatggaaggatatccactttgagtggaacacatgagatccaacagaccttatgatattggacctgtcagg

SEQ ID NO: 219349 - DNA, 466 bp, Homo sapiens
gtatcaaaaatatgtagatggattttagtagttgtaatttaaatgtggaaggtgaagagaatttcaaactccaaagagaaatgaatgatattcagatgtttcattaatttctagtctgtgaaaatatgcattttatagtaatatgtatagacttattttatttagaaataatagtgttttagaatttattaaaaactcagtgatagcctttataccaaaatgtttaactttaccaacagcaagtcataaaagtatttattttaaagctttttaatattatcgtgtaactttcatctgtcttcagatgtaaataattatctgcctaaatgttatatttttatgtatgcattttctgaaaatgtattgttttgtaaagtgggaaagataataaatcaagcacttcttgcacttgtttctgtgaagcatatagaactctattttaaataaaggaagatgtgtcgtattt

SEQ ID NO: 219350 - DNA, 476 bp, Homo sapiens
gcacgaattggcagtggtggggtgagcaggaaggaggttccgcctggttcatgaagacatagatgcaccccctaattcgggctgagccgtgtgactggcaggggccccagctgttgggcctgggcaggactgtttttagaaaagccccaactccctgcccctacccgggcccgtggctatttatagtccgggcctggagaagtcagtgagtcactagcgttcgcctctgcagggtcagtccaagcccccttagtgaggtggtctagcatgtcccccagtcccccaagcctctatctgacatctgctagcccagagccccaggggtccccaggaagggctcagagctggtggccccccccaggccttggcagcacctccttgtctgatgggactttgtggttcctggtggacatttaacattgtcggtttctctcatctggaaacaaacctccatgacgctcttggtttctcctgtt

SEQ ID NO: 219351 - DNA, 414 bp, Homo sapiens
gtgggggaaagttctggtcatcagccctagcattccatggttcatttcctcatcagtgatggaaaatcaccaagcaagagaacaggatggagaataaccggatgggtgcaatcggaggtgctatttcaggagctggccattcttcaagtcagaaggcctgagagaggagctgcccaggtggtcttcatggggctgtgcggccagtcatcccccacaggttgacaatccttgtgtacttcatcctcgttggatcctctgtatccctgacgatgagcaactgtgaggcccgtttcagcactgagttccagtcaggaaaacatccacccacccaccacacgctcacacttacacacacattcacacatgcacacacgttctggctccgaaaaagaaaaaaaaaagcaatttaaaata

SEQ ID NO: 219352 - DNA, 445 bp, Homo sapiens
tttcttgccctgatgtatttatctggtactcttttgccagtctccttctcaaagacattttcttgctaaatttcttactaacttgtcaaatggagggaaaataagattgaattagtaaaacattcttatcacaatatactctaaaagaggctgggcgcggtggctcacgcctgtaatcccaacactttgggaggctggggcgggtagatcatttgagctcacaagctcgagaccagcctgggcaacatagtgaaaccctgtctctataaaaatatacaaaaattacccgggtatggtggcacgcgcctgtggtcccagctactccagaggttgaggcaagaaaatcgcttgagcccaggaggtcaaggctgcagtgagctgagattgcaccactgcactccagcctgggtgatgggagtgaaaccctgtctcaaagaaaaaaaaa

SEQ ID NO: 219353 - DNA, 879 bp, Homo sapiens
taggtcgactgaaactgcctttgtaagaccaatggaaggccacaagattacaaatatagaaggggcctgaattctgcttaaatgtagggcggggccgggcacgttggctcatgcctgtaatcccatcactttgggaggctgaggcagcagtttacgaggtaaggagtttgagaccagcctggccagcggggtgaaaccctgtctgtactaaaaatacaaaaaaaaaaaaattagccgggcatggtggctcatgcctgtagtcccagctacttgggaggctgaggcaggagaatcacttgaacctgggaggtggaggttgcagtgagctgagattgcaccactgtactccagcctgggtgacagagtgagactccgtctcaaaaaaaacaaaaaaaaatgtagggcatagtttccatcatctcttattgctaaggaattgttgtggctagaggtcacaagttttgtgacttccccattgctcctacagataccaccattaccgatcccagaatctaagattagtcttctgagatgtatctcagacttctgcattctggcaaccaactgagcccacctggacttaatgattcacgactcaaccagtcctgtgccctcaccccaaccagaggcagacacagtggatgaggacagtttcccactgtgattgcatccctggccaatcagcagcacccattccttagttccctgcccaccaaactatccttgaacaattctaacctccaagccttcaaggagattgatttgagcaatctccagttctcccatgtggctggcctatcattaattaaattctttactataataccacagtatcagtgaatgggttttgtctgtgcagcaggcagaaagaacccactg

SEQ ID NO: 219354 - DNA, 445 bp, Homo sapiens
ttcagttatgcctcgacaaattggaacatatataagagaatgagacttttgacctggaaaaaatcaagtatgagattggaaatttaacctcacatgagaagaaggaattctctgtaatgatagatggatgtggtagaatgataaatagaaaggatgtaaatgtaaatattgcttctcctttcaaaatagcaatttcagtttgtcgtacatttgctacctgccagggaaggttcagaatgctttctatgacctcatctaccctaagtggcagtactttttttttttaactgagtcagaaatagagccaatacattcaaaatctccagagagtgatattcagactcttgaaacctgggctgtttattctttccaaccacacaaattgtatctcgttaaaagtatttgcagacagataacaggctcactggaggggagagttggggaa

SEQ ID NO: 219355 - DNA, 785 bp, Homo sapiens
tcatggacaaggaaaaatgctgtaggtaggctgaggctgttaagtaaaatgtcttgctattctttctcttctcttcttcagttatgttacagaagcaagggtattgcttctacatgggcaaatttgtctatgccctgaaagaaaccaagagtgaaactcaactgggaaagcatcagtttcactttattgtcactagcttcccaattttgccgggaaatttcttaatttaaaggtaataaccaagctgacattttactgtagccaaatcctacagagggtttcaaaatgagtgggtgaaaaaatatacaagcttaacatgcttatacttatttaacatgaagtgaaaatcattagcatagttcaggtatgtgcatggtatgtgcacgcacatggggcagtgctgtcatctaacagaagcccacctttttacttgactaatggtttactgttaatacctcgataatagtgtaatctttgatagacttttataaatgattatttcaaatgctttttgatcaccttcaagaatatgacctgagacaggtaatgtaatttagcagtttgcatctatgaactgtggaggatacctacagacactgaagtgttactaacagtaggatgcaggcattatgtgaatgcgtgggtattttatttccatttatgggctactatagcaaaaataattggggagttgccctatgatgaaagaagactgcatgttttttaaaaccatacctttgtccaaaagcaaatggtaaataaaaatagactgttgacataaagct

SEQ ID NO: 219356 - DNA, 404 bp, Homo sapiens
aggaaacaccagctacctataataacgcgtgacacgcaccttcttcaacactcagcacagctctgcaataatggcccagcctgatcttcacgttggaggtgaggacacaggccctggaggattcaagtggcaaggtcacagaagtggtcacaggggaccacagccccccctgcctggactgccctaggctctggatctgtaacccctggcttgctccccattcgcctgcctgaccacagctccgaggcctctgaaaagcctggcaagcccggtcacctggtcaccctatgaccccacaccctgcagctgcactgagcttcactgaccttgggtggggatgcctcctgagggctctttctgttgttctcgcatctctccagccacatattaaagtgactcagacc

SEQ ID NO: 219357 - DNA, 1068 bp, Homo sapiens
acgtgacatgggttggaagatggcgtctcccacagacggtaagagccggcttagagatctttgcctgcagcctccttctttgctctactgggaacatccactctgtctctgcccctcgaacatacatttctttcttgggctcttctcctttcccttttattttttttcttgagatccatcgccgtcttcagctcaccggttcttcacagcagctccggaggtgcccagtttccccgctctgtaccaggcgtgtggaggagggcactagggagggactcattctgggtaaaaggacaggggggtcgccctgtgccttccttatctctatttgggcgaggctgagggtcgaggaggagatgtttctggaggacgtggcttactgtagttttctccttggggtacccattgaaaggatcagttctcttctgattgagcgcacggatggaatgattctcacaaaccctcgcagggctgctggctgacctcatctcgatactgaaccgcaagagaaacatgatctctctcctgtctcctcagtttgggaccattgccgtggcagcaagagaagcgggggacgttctcggcccctcgccctgagagtcgcgaggagaatcagtattgagcttttaagtgtcgtcttgcacaggtcgcaacctgtcttccatctgctttacgtgttgtttcttaaggctgagtgaattaacgatttctgtttatatattgtgtaaaatgcaagtcatttcaagtaacaattaagttgttttggtatactcccatgcttttcctcttggttctgctttagagagttagggtcttgcagtcatttttaaactcatttttagttctaccatcctcatcccaactatatatcgattttattgatatataggtttccttcccttagacaaaaacattttatatttggaaggaatcttggaagttcattgcaggaatgaagaaattgaagccaaggtgagctatattaagtacctgctacatgaaaggcataatgctaggtgctttgggagaccaaaagatgactcaaacatataaacatttttttttttc

SEQ ID NO: 219358 - DNA, 548 bp, Homo sapiens
cacccatctcatactgcagagaagtgaggtaagaaccttaagacatctctttggaaagtctgctcatctactcaccctatcagtgactcacttccaatctcaaactttcttccagatgggtctgtgtgcaaatcagtatgcccaatggtaacctctggggctttttttctgagaacaaaggctgagggttcccctacctgcagaagctagagtgtgaggggtatgtatgtgtgtatgtgtgtttataggcatttgagtcaatgacccagactaaatgtcaaataaatatagtcacgcactgcataatgatgttttggtcaatgactgactgcatataatgatggcggtcctgtaagattataaggaagctgaaaaattactattgcctagtaacatagtggcagtcataacattgtagtgcaacacagtactcatgtttgtggtgatactgtgctgcaagttttataaaagtatagcgcacacaaccatgtacagtgcctaatactttatatagttgatgataaatacttgataacaaattactatgt

SEQ ID NO: 219359 - DNA, 464 bp, Homo sapiens
caggagcagggttagcatatctggattttagtctgagctctttgtcaaaaaagtcctgggcctcagtttctttattactgaaggagagaatcaactctgtgattctaagttataaaccaccgttattaaagttctactggagccaaaactccaaattgttctgtatattaaaacttttcggcagggcatggtggcttacacctgtaatcccaatactttgggaggctgaggagggcagatcacatgagcccaggagtttgagaccagcctgtgcaacataggaagaccctgtctctacaaaaaataaaaataaagttagccaggtgtggtggcacgtttctgtggtcccagctcctcaggaggccgaggcaggaggatcacttgagcccaggaggtcaaggctgtagtgaactgtgatcacaccactgcattcctgcttgggcaatggaacaagaccctgtctc

SEQ ID NO: 219360 - DNA, 704 bp, Homo sapiens
cgcaagcttcgcctcttgggttcatgccattctcctgcctcagcctcccgggtagctgggactacaggcgcctgccaccagcctggctaatttttttgtatttttagtagagacggggtttcaccgtgttgaccaggatggtctccatctccagacctcgtgatccgcccgcctcggactcccaaagtgctgggattacaggcatgagccaccgcgcccggtggcttgcatgttttcttaaaaagctacagaaatttccaaatatcttctttcagataatagttggtggagtggcaagtacatcacaagatatgcatacttatgctgcctgcacatttttggctgcaagtatgaaagaagggaagcaaggaattcagagaaatcaagagtctgttcagcttggagcgattgaggcctgtgtgatgtggctactagaaaatgaattcatccagagtacagaagccagtgatggaacagaaggaaaggtgtatcatccaacacatcttggttcggccactctttcttcttcactttctccagctgatactttagatatttttgctgacctgcaaagagcaatgaagggctttgttttagagaatgatcttcatattctctatctggttacacctatgtttgaggattggactgctattgattggtatcgattatctgtttatgggggagaagttgccactcatgag

SEQ ID NO: 219361 - DNA, 2522 bp, Homo sapiens
  misc_feature (2499)..(2501): n is a, c, g, or t
cgcaagcttcgcctcttgggttcatgccattctcctgcctcagcctcccgggtagctgggactacaggcgcctgccaccagcctggctaatttttttgtatttttagtagagacggggtttcaccgtgttgaccaggatggtctccatctccagacctcgtgatccgcccgcctcggactcccaaagtgctgggattacaggcatgagccaccgcgcccggtggcttgcatgttttcttaaaaagctacagaaatttccaaatatcttctttcagataatagttggtggagtggcaagtacatcacaagatatgcatacttatgctgcctgcacatttttggctgcaagtatgaaagaagggaagcaaggaattcagagaaatcaagagtctgttcagcttggagcgattgaggcctgtgtgatgtggctactagaaaatgaattcatccagagtacagaagccagtgatggaacagaaggtaagtgtgacttctcagttgcaatttactcactttttcttctttagtgagggtgtatgactgctcagtgaatggaaattgtcttttcatgtagtataaaaggaatttgattttttgagcagtgtatcaactcatttttagtaaatcagtattgtatttagcaacttcagaccattatgatagagcctgctcatacattttcatgctctggataaggtactatttgtaaaatttatcagccgggagggttagcatggaaaacagaaagatagtattttgttttattttattttgaatgtttgttcctctgtttcctcaccctaaccctaaaccaggaaaggtgtatcatccaacacatcttggttcggccactctttcttcttcactttctccagctgatactttagatatttttgctgacctgcaaagagcaatgaagggctttgttttagagaatgatcttcatattctctatctggtaagttctgttttaacaattatgtttgtgaaaatagggagaaaaaaatagatatataatcctgaacatcaaagataccctaacagaacatctcgtctgttttccatgcctaggttagtactggtgggaatagagaagaggtaagaagataattgttttaaagtaataatctaaatgttctagttacctttaaatttattttctccaacctcctttcaaaaaagatttgagttgttttataaaaaatatatatttttacaacgtataaaagaacagcaaagaaaaatgggatatcagaaaattaaagatcggatcatgatgtaaaactcaagcaaaggtcagtacacaaacatgcgtgccattaagtcatgtccaatgctgttgtcaactttgattctgggttttctagcaactaaaagaaagaggaaagcttgattagtgttaatattcataagataaaaaacaaaacaagtttaggaaaaacattgcatttccctgcctaagagaaatttagtcctaaaaggatactttggaacttaacattgtttgataaaaatctctataataaatgcaataaggaattttaaaagtttgtttatattagacaatgctctgtgaatattattttgtataacaaagatattaataagaattggatagtgtttaaggtcatgttctctggcaagaacctgatcagaaataattaattttgtcagttaagagcagatgcatgcattttgataagcaagtgataaggggaggtgagtaaaattgaaattctcattagaatgaagggggcttatcaggaaatgtgtttcaataaaaatcgctatgtagtgagcagaggggaaatgtctagacagtaccaattttcttttattacaaactcgcataatacatgggtgataataggctcaaaggtctgtgcccaagaatgtggctgggaggaatctcaaagcaggtttcaccggtcatctatcatggccttaaaaataagtcatttattatacagtggctaagattgtgggctctaggatcagactgccttagttcaacttttggcctcatcacttagtaatcatataaccttgggtaagtatttaacctctcttacgattccatttcctcatttgtaaaatggagataataatacccacctcagggctgatagtctttgatgaatgtttggtatctgaataaatgtttaataacatctattatttctagtaaattctcccataaacattatgtaagtcatttgccaaattacctaactactcctactcctgttccctctctaaaacgtgaagactgttggcagtgttagtatgctgaatgcttgtggttagtggtcttgtatacttctctcaccattcgagttgtatgcccttcaagagttagttgtgttcccaaacttgttcatgtcagtttgcttctgagaaaattaggctgaggcagaaggatcacctgagtccaggaatttgagaccagcatgggaaacagagcaagaatctgtcgtgaacttcgccagtttgtcaaannnattttaaacaaaattaaaaaa

SEQ ID NO: 219362 - DNA, 1563 bp, Homo sapiens
  misc_feature (1540)..(1542): n is a, c, g, or t
cgcaagcttcgcctcttgggttcatgccattctcctgcctcagcctcccgggtagctgggactacaggcgcctgccaccagcctggctaatttttttgtatttttagtagagacggggtttcaccgtgttgaccaggatggtctccatctccagacctcgtgatccgcccgcctcggactcccaaagtgctgggattacaggcatgagccaccgcgcccggtggcttgcatgttttcttaaaaagctacagaaatttccaaatatcttctttcagataatagttggtggagtggcaagtacatcacaagatatgcatacttatgctgcctgcacatttttggctgcaagtatgaaagaagggaagcaaggaattcagagaaatcaagagtctgttcagcttggagcgattgaggcctgtgtgatgtggctactagaaaatgaattcatccagagtacagaagccagtgatggaacagaaggtaagtgtgacttctcagttgcaatttactcactttttcttctttagtgagggtgtatgactgctcagtgaatggaaattgtcttttcatgtagtataaaaggaatttgattttttgagcagtgtatcaactcatttttagtaaatcagtattgtatttagcaacttcagaccattatgatagagcctgctcatacattttcatgctctggataaggtactatttgtaaaatttatcagccgggagggttagcatggaaaacagaaagatagtattttgttttattttattttgaatgtttgttcctctgtttcctcaccctaaccctaaaccaggaaaggtgtatcatccaacacatcttggttcggccactctttcttcttcactttctccagctgatactttagatatttttgctgacctgcaaagagcaatgaagggctttgttttagagaatgatcttcatattctctatctggtaagttctgttttaacaattatgtttgtgaaaatagggagaaaaaaatagatatataatcctgaacatcaaagataccctaacagaacatctcgtctgttttccatgcctaggttagtactggtgggaatagagaagaggtaagaagataattgttttaaagtaataatctaaatgttctagttacctttaaatttattttctccaacctcctttcaaaaaagatttgagttgttttataaaaaatatatatttttacaacgtataaaagaacagcaaagaaaaatgggatatcagaaaattaaagatcggatcatgatgtaaaactcaagcaaaggtcagtacacaaacatgcgtgccattaagtcatgtccaatgctgttgtcaactttgattctgggttttctagcaacattcgagttgtatgcccttcaagagttagttgtgttcccaaacttgttcatgtcagtttgcttctgagaaaattaggctgaggcagaaggatcacctgagtccaggaatttgagaccagcatgggaaacagagcaagaatctgtcgtgaacttcgccagtttgtcaaannnattttaaacaaaattaaaaaa

SEQ ID NO: 219363 - DNA, 2325 bp, Homo sapiens
cgcaagcttcgcctcttgggttcatgccattctcctgcctcagcctcccgggtagctgggactacaggcgcctgccaccagcctggctaatttttttgtatttttagtagagacggggtttcaccgtgttgaccaggatggtctccatctccagacctcgtgatccgcccgcctcggactcccaaagtgctgggattacaggcatgagccaccgcgcccggtggcttgcatgttttcttaaaaagctacagaaatttccaaatatcttctttcagataatagttggtggagtggcaagtacatcacaagatatgcatacttatgctgcctgcacatttttggctgcaagtatgaaagaagggaagcaaggaattcagagaaatcaagagtctgttcagcttggagcgattgaggcctgtgtgatgtggctactagaaaatgaattcatccagagtacagaagccagtgatggaacagaaggtaagtgtgacttctcagttgcaatttactcactttttcttctttagtgagggtgtatgactgctcagtgaatggaaattgtcttttcatgtagtataaaaggaatttgattttttgagcagtgtatcaactcatttttagtaaatcagtattgtatttagcaacttcagaccattatgatagagcctgctcatacattttcatgctctggataaggtactatttgtaaaatttatcagccgggagggttagcatggaaaacagaaagatagtattttgttttattttattttgaatgtttgttcctctgtttcctcaccctaaccctaaaccaggaaaggtgtatcatccaacacatcttggttcggccactctttcttcttcactttctccagctgatactttagatatttttgctgacctgcaaagagcaatgaagggctttgttttagagaatgatcttcatattctctatctggtaagttctgttttaacaattatgtttgtgaaaatagggagaaaaaaatagatatataatcctgaacatcaaagataccctaacagaacatctcgtctgttttccatgcctaggttagtactggtgggaatagagaagaggtaagaagataattgttttaaagtaataatctaaatgttctagttacctttaaatttattttctccaacctcctttcaaaaaagatttgagttgttttataaaaaatatatatttttacaacgtataaaagaacagcaaagaaaaatgggatatcagaaaattaaagatcggatcatgatgtaaaactcaagcaaaggtcagtacacaaacatgcgtgccattaagtcatgtccaatgctgttgtcaactttgattctgggttttctagcaactaaaagaaagaggaaagcttgattagtgttaatattcataagataaaaaacaaaacaagtttaggaaaaacattgcatttccctgcctaagagaaatttagtcctaaaaggatactttggaacttaacattgtttgataaaaatctctataataaatgcaataaggaattttaaaagtttgtttatattagacaatgctctgtgaatattattttgtataacaaagatattaataagaattggatagtgtttaaggtcatgttctctggcaagaacctgatcagaaataattaattttgtcagttaagagcagatgcatgcattttgataagcaagtgataaggggaggtgagtaaaattgaaattctcattagaatgaagggggcttatcaggaaatgtgtttcaataaaaatcgctatgtagtgagcagaggggaaatgtctagacagtaccaattttcttttattacaaactcgcataatacatgggtgataataggctcaaaggtctgtgcccaagaatgtggctgggaggaatctcaaagcaggtttcaccggtcatctatcatggccttaaaaataagtcatttattatacagtggctaagattgtgggctctaggatcagactgccttagttcaacttttggcctcatcacttagtaatcatataaccttgggtaagtatttaacctctcttacgattccatttcctcatttgtaaaatggagataataatacccacctcagggctgatagtctttgatgaatgtttggtatctgaataaatgtttaataacatctattatttctagtaaattctcccataaacattatgtaagtcatttgccaaattacctaactactcctactcctgttccctctctaaaacgtgaagactgttggcagtgttagtatgctgaatggtgagagaagtatacaagaccactaacca

SEQ ID NO: 219364 - DNA, 181 bp, Homo sapiens
tactttgtcacccaggctggagtgcagtgacatgatcatggctcagtgcagcctcaacttccctgggctcaggtgattttcccacttctgccttccaagtgcataccaccatgcccagctaagagtgtgtgtgtgtgtgtgtgtgtgtgtgtgtgtgtgtggcttttctttttttttcttt

SEQ ID NO: 219365 - DNA, 526 bp, Homo sapiens
cagagtcacagatagatatttgtacatccatgttcatagtgacattatttatggtagctgcaatgtggaggtaccccgagtgtccattgatgggtgtatggataaacaatatctagaggaatattattcatccataaaaaggaaggaaattctgacatatgcttaaaaaggaaggaagttctgaaatatgacagggatgaaccttgaagacattattctaagtgaaacaagcccatccccaaaagacaaatactatataattccacttatgtgaggcatctcaggtagttaaattcatagagacagaatgctgattcccaggggctagcaggaggggagaatggagagttttaaaaaatgggtatagagtttcagtgttacttgatgggaagttctggagatggatggtgctgatgacattatgaatatacggtagttaattccactgaattacatacttgaaaatggttaagatggtcatttctatgtcacgtgtatattaccacgataaaaaaattgggaaatc

SEQ ID NO: 219366 - DNA, 542 bp, Homo sapiens
caaattacatcggcaggtactctaattacaaatgagatcacattctgagttgccagggattaggacttacacatgtcttttctggggggacactgttcaatcccacactaggcaacatgaacgaagccctggatccagaaaagccagtaaagaaaacagagaaagaacaaccatagggatcagaggagaatttgggcaaaatgaagtgatcaaagtcctggggagagagagaagtcaacactcaggaaagtcaggagcacatagtcctagaaagggtattggacttggcagtcaagcctatcattggccaccctcctaagagcctggtcacaggagaccagcggttactggtggtaaagaagggaagcagccaagcaggctgttctttctaaggtgtttgacaatgaagtgaagtggggtgggtgacgatgtggggagtaggccaggtgcgggaaaggagatggagctttttaggggggcccttgagcacttatatgagaccagaagaagaagttgaaaatgccggagctgtggaagagcct

SEQ ID NO: 219367 - DNA, 281 bp, Homo sapiens
cctgcacaatgtgcacatgtaccctaaaacttaaagtataataataataaaaaaagaaatatatgttttttcacctactgtttattcttacaccagttacttaacctttctaattctcggtaatttctcttgcagaatgagagtgataatacatgtctcacagagttgctgtgtgcaaccatattttgtaaagcatcttacacatataaacagtcttaaatcttatttagaataatagtgttacaaatatatttaactataagtttattaataaatacatc

SEQ ID NO: 219368 - DNA, 425 bp, Homo sapiens
gccacagtgaggacagctgcctggaagaaacagacccaagtatccttggatgtgaactccctttggagctttgcaacaagcagtttcttaaagatggagtctccttctgtcaccaaggctgtagtgcagtggcacgatctcagctcactgcaacctctgcctcccgggttcaagtgattcttctgactcagcttcctgagtagcttggactacagacacttgccaccacacccagttaattttttgtatttttagtagggatggggtttcaccatgttagccaggatggtctcgatctcctgacctcgtgataaacccaccctagcctcccaaagtgctgggattaggcgtgagccaccccactgggtcctcattcttgtatcttaaaagtcagtgatgttgagtaatttctcatgccaccacct

SEQ ID NO: 219369 - DNA, 259 bp, Homo sapiens
tcttatacagaagtagaataatataacaaacacccaagtatctgtcatctagtttcattaattatcaactcagggccaatctggtttcctctatacttccattcacttccttccatgccaccttcctttttcctccacttctagattattttgaagtgagttctggaaattacatttcatttataaatagtggtatatgtgtctaaaagataatcacttaaaaaaatttcactcacatgtaaaaaaaatatgcttcttc

SEQ ID NO: 219370 - DNA, 199 bp, Homo sapiens
acgaagttggggaagagactaatggataagagagataataaaaagtaatgtctaaggcagcctgtttcagcatgtttattgtagtgagatactaggcaggtggaaggttattgctgtgatgaaataagttttctaaattgtgtgctgtagttctctctctctctctctctttttttttctttgttttttttggagacag

SEQ ID NO: 219371 - DNA, 221 bp, Homo sapiens
gattttaaattagactgaaattctcgtatgattttttttccccagggttgatatttaaagtacgaatggattgaataacttcttctctttggtcaaggtggttatttttgaggcaagtgctaattctggttcccaaggttttatcagaatatcttgttgttcaggtcatcttgttagtggatgtgtacctcttctttggcatgtagagaatcttagaactt

SEQ ID NO: 219372 - DNA, 390 bp, Homo sapiens
ataactctttggtaaatttattttcagtgtttcctgacaccccaagcatttatagatatatatgtttaaaaagagtcgtgttatatataggagtttatgttcctcccttgggtattttgagaaactataaaattaaatcattcttatgattaagaaaaacagtgttacagcaacagcctgtttcaatcccacctccacttacatttccattccaacacttcagtgctgactaacacccactgtttgaaaaactttctagaatttacatgtatattttatatacactttgaatatatcttcccttccttctttacccccatacatatcaaaatatgctttaactttgactatcttgttattaacaaaagacttaaataaatatgttaactt

SEQ ID NO: 219373 - DNA, 294 bp, Homo sapiens
gagacagggtctcactctgtcacccaggctggagcatggtggtataatctcagctcactgcagcctcgacctcctgggctcaagtgatcctcctgcctcatcctcccaagtacctgggaccacaggcatgcaccaccatacctggctaatttttgtatttcttgtagagacagggtttcaccatgttgcccaggctggtctcgaactcctgggctcaagctatcctctggcctcacccaaaatgctgggacccagatagagctggtcctctcaaccaacatattgtatcaggaa

SEQ ID NO: 219374 - DNA, 311 bp, Homo sapiens
cttcccgggcgagggggaatcttaccgtatatttgttcacctacgttgattatttttcccagatacgtacacaagtttgttttctccctggtagcgaagaaaggggaaacgggggaggggacgccccaccaaagcccaggttttctcgggtgggggagatcctttcactctcttgtaagggggcggggacggccccagagatgctctggagatcctgactctgggctctggttgattcacagagtctgcacccttatttagataaccaagttaggaggaagacttaagagtaagttggggggagggggcga

SEQ ID NO: 219375 - DNA, 1387 bp, Homo sapiens
gcatagctgttcctagagtacactcgtatccagaaagtattctcacccactctttgtcctcttttatcacttaaaatcacggaaggctgtctgaaagcggctgggctcctgtaacattaaaaaattattaaactcagaaactaattctgttttttaatcataaatatgaaaactaggaagcaaactgagaagaatgaaagaccaaatcagcggatctgaagcaggccactctcaggaagactcctgaggaataattaaggctaattttaaatatcacctcctgggtatcatcatcaccatcgttcccaggtacctgtctgagatagtccattttgaaatagatataccttaaattatgttaaaatgtactaagcacttattgagctcagtgatcctgaaatatgcctaataataagctgcctagttgccacttattagctaggtttatgtctaggaggtctaggagggactatgaagaatatgagctgtttaattaggggtacttgtcatcactaatgaacaacaagaaatagtttgaaaacttctttgagatattcacttgcaaatgtcacccgaatttcagaaaagtacagtctctggagtaaagctattatacactcagagagactgttgtgctttgcatgcgttatatcatttagtcctcaaaacatgttgtcaagattggcattattatctccattttaaagatgagaaaattaggtgcaaagagcttcagtaacacactcaaactcattcaacaataaataactaaaaattgtgctatacacactttaagagtcacatgttcctcccccaaaattatgaaaggccatagaaggaattcaagaagtaggcttcatgacttatcgtttcttctcatctcagatgaattcactttaatctctcatgcccaaattgtaaaatatcattttgatcaccgtcaatattacacagacctgtttgaatgtgctcagctttttcagtaaaattagaagaaaccacaatttacaaacaggtatatgtgcattaaggaaaaaacaaaaaactaccatgtgattttagatatggatgccaattcttaaacattgtttattatttctgagctcaagtgcttagaatgtttaaaatgcaatatatttatgtggatttttttccaggatattggaacatatataaaatatgcttgtgcatatctaagctttgtatttatttcaggttatatgtatactgagaagaatatataaacagtgtatgatatttacatgttatttcattttttgagggaaattaacctccacaattattaactatgcataaaatgtaatggcagatatgacttatattgtataggactgactacaattcctctttagaaatagctgttctt

SEQ ID NO: 219376 - DNA, 335 bp, Homo sapiens
ccttttctcctcctcttctctacacccccttgcctccccatactgacatcctggacttaatgatttaagccaagggaaacaaggaaaagctcggctcagcattttagcagagcaggctgggaatgaaataatgaagaaaaaagtcattcccggcaggagaaagaatttatacgggacttaatctttctttttaaggagagggcatctgcttgttcatccctccctcattcttggtcactggtttctcgtttaattcttccttctccactccacctcctttatggccccattgccaagcttattgtcagggctccattaaatatatgtgaaatctg

SEQ ID NO: 219377 - DNA, 708 bp, Homo sapiens
cctcttagcgcctcccagcctcagacgtgtagcaagtgaaagctgtttgaattggcaaatgaggtaattattgagtagctggttggaatgtttgctactagctatccagcagaattgttagttcttagtactggtgtaattacagtaattagaataagtaaacttcttttaagataattgcagggccaggttatatagagcttgtttagcttgccttttagtattagcatgtacatcagtgtgtatgttaaaggataccctaatagattttgtggaaatggaattgtcttatagtaaattccagatcaacatatgtatggaatgtatctaatgtagtctagaccagtggctcccagtttttttggcaccagggactggtttcgtggaagacaatttttctgccagggtgtgtgtgtgtgggaggggagcaggatggtttcgggatgaaactgatcatcaggcattatattcttataaggaggacgcaacctagatccctcacatgtgcagtgtgcaatagggcttgcattcctttgagaatctgatgctgccgctggtctgacaggaggcggagctctggcagtagtgttcactaccactcacctcctgctgtgtggcctggttcctaacaggccacggactgtgggttggggatgcctggtctagattgttcttcacagattaaatctttaccagattaagtttatt

SEQ ID NO: 219378 - DNA, 232 bp, Homo sapiens
tatattaaataacaatagccagaagtgggtctaaacaatgccataaatcagaaacaataatgaacatcgatgatacttcaagatatccaccccaactgcaacataatatgaaaacatctgtgatttctcttggtgaatgtcagaggtacttatatcacttacatttataattaaaggagatgctaaatttctgtcagaattcaatgaaaataaaggtataatttttttctca

SEQ ID NO: 219379 - DNA, 208 bp, Homo sapiens
gctttttcaatctttttgaccactctatgtcttttgtttggagaagttaatccatttatgtttagggttattatcggtgggtaaggaacttactgctgccattttgtagtttgttttccagttgatttgtatatactgtgtttctttcttcctatgttgctgtcttccattgtggtttgatggttttctgtagtggtttgcattgatt

SEQ ID NO: 219380 - DNA, 563 bp, Homo sapiens
caacccaaaaaagtgaaaaaaggtgcagacatcgccatgaaagttcactacacaagagagtgggactggcaaaggacacaaagttacatgcaaagaataagaagtcaaaatgaaatcaggcttctcaagagcaactctagaagctaaaaggttcagcaagcaatatctccaaaatgccaataaaaaatattcccaacatacaggtatttgcctgtataccaaggcaaactacactcaagtttgacagtattataaatacatttttcatacaatctagaacacaaaaagtttacctctgttgatatattaagaaataatttgtatgaccatactaggacaatggcagggagtagggaacagagcatatgggaacaaaagtttgtacactattgaaattaacttaatgctaatcccaactagattgttttaaaataaaatataattgtaattctaagggaaaccacgaagaaaataactcaaaaaatacagtaaaataaacagcaaaggaattaaaatggtacactagacaataccattttaatacaaagaaggcagtaatggag

SEQ ID NO: 219381 - DNA, 724 bp, Homo sapiens
ccatggggaccttcccatgctattccctcaaaatggaatgttcttccagtgctttttccactttaatcccaactcaaagatcaattcctcagagaagtcttcctgtatttcccagtgaaggtactgttcctttttaatatattttttctattagaagcatgtttctttcctttacagtacttactagtagctggcacgaattcagaaaagcacaagcactggaaaaagcactgcgaaggagaaatcatacatataggtaacttagtatataatttagtaatatatgtttgaggcttgtcaatccctgcttaccattattacatcagcaagtagcatggtctctggcacatagtaagtgaatatttaatgaattatatacatagattactacaaattaagctgcaaggtatataaatcaacatcagatgcaattcaagatcacagcataattgctgaatcccaagtaacactgatccagataacttaagatcatactgaaacctacagcaaccattcgaaagtattaaactccaaacacgtaattcaggccttatgtttttccaaacagcatggcaattttaattctcaggcagtatcacacacttaattcatggtactattctcacaactattcatgttacccactgttcctttaaacaactaaagaaaatattcagctgaagactattctggaactagcaaaatttagactaattttctgtat

SEQ ID NO: 219382 - DNA, 676 bp, Homo sapiens
ccatggggaccttcccatgctattccctcaaaatggaatgttcttccagtgctttttccactttaatcccaactcaaagatcaattcctcagagaagtcttcctgtatttcccagtgaaggtactgttcctttttaatatattttttctattagaagcatgtttctttcctttacagtacttactagtttatatttatgcatttgtctgtttaacctaaacttcaggctccttgagagcaagaaccttgtcaatccctgcttaccattattacatcagcaagtagcatggtctctggcacatagtaagtgaatatttaatgaattatatacatagattactacaaattaagctgcaaggtatataaatcaacatcagatgcaattcaagatcacagcataattgctgaatcccaagtaacactgatccagataacttaagatcatactgaaacctacagcaaccattcgaaagtattaaactccaaacacgtaattcaggccttatgtttttccaaacagcatggcaattttaattctcaggcagtatcacacacttaattcatggtactattctcacaactattcatgttacccactgttcctttaaacaactaaagaaaatattcagctgaagactattctggaactagcaaaatttagactaattttctgtat

SEQ ID NO: 219383 - DNA, 485 bp, Homo sapiens
agaaaaaaatatgtaacgtagattagattaagcaaaaattctacagtcttaaatttgattttgaagtattagtatgacctcatgataatttcttcttttaaaaaaacctatttactacctctgcccactgaaacatgtctaaaaacaaaggtcaacccaggatcgatgtgtattccctaaatgccactaagaaatgactaacatcatgtctgggaaggaaatgtacaaaatgagcctggatcttcatgtaccatagagaaaacataacatcaaagaccactgaaagtgtgtagaaaggactcaggagccatcctgaggagcctcttactggccagagatgggtcaatttaaatatcagtaaagataatggcaatagattgaaagacatcagatatatttaaatttcttagttaataatggctatagaaataaaaacaattggccacttttgaccagtgagttatttaactatgttgaaaactggt

SEQ ID NO: 219384 - DNA, 609 bp, Homo sapiens
atgatacttagtggtgaaaagcttaacatttttgtcttgagatgaaaaacaagacaaaaatgtatgctcccacctcttctattgaacattatactggaggttgtagccaagaccattaggcaagaaaactaaatacaaaatatctggataagaaggagagaaataaaagtatccttattgcagatggcatgatcttgtatataggatatcctaaagaatccactgaaaatctactataaccaataaataagttcagcaagtttgcaggatagaagatcaatatataaaactcagttcttttaatgcacttccaagaaacaattagaaaatgaaattcagaaaacaatttcctttatcgtagtatcaaaaggaatattatacttacgaataaatttaactagcaattcttcttctggaaatatatataatacagatttacctgcactcgcagaaaatgctatagttcatagtaatttgtaaaaaaaaaaagtttagaaagcttcgtagagtatattagctgggtactggtgaaatagaccgtggttcggccacagaatgaaacactatgcagccaccaaaaggtaagaatgagggaaaggaaggaaggaa

SEQ ID NO: 219385 - DNA, 467 bp, Homo sapiens
cagggggtcttccagataatagggtgaattcaaaagttttctaattggcaattggttgagagagttactttattgtcaaaagacaacagaagggaatgtctaagttaatataagggcttgtggagaccaagtttcccattatgcagatagaatcaatagaagggaatgtttcttatcaatttaaagagtatgtgctattaatcttaaggcctcagttttaatgttaatgctgttcagctgtgcttgaattccaaggaaggagggcataaggaggcatgtccaacccccacttcccattataacctaaactaatttttaagtttaattttggaatgcccttggccaaggggagggtccatcagtgagttgaaaggcatagagttttatttttggtttacagtactctggctttgttgttaaaaattagttctctttagagatattcaaggtctaatatttcttatttt

SEQ ID NO: 219386 - DNA, 357 bp, Homo sapiens
cccctcttgtgctcagtcgcgctgttcttgaggtctcttttctctacaccatggttttcaacttatttggggggaaatgccttgagcataatacaatgggaaaatattctctacccctttctcttcagaattcattcttatctcttcctgtctgaacaaaaactgtatggaatcaacaccaccaagttctgtgggagaaaagaaaaaccttctccctttgctctgctggaagctggagagtgccagacccctgtgtagcagtgcatagaattctagcttcttttctcctttctctgtatattgggttcagagagtaccgtgtgtctctgtgtgaatatggaccatcatttatcaaca

SEQ ID NO: 219387 - DNA, 322 bp, Homo sapiens
cgtccttatcatacctaccaggacaggattggcatgggttgatggttactgaggctgagcgatggcatgtgaggttttattattttattgtttactttcatctattttcaaaaagttaaaaaatcagccctccctttgctgaaaaaagaaaaaaagaaaagaaaaactacaggttttgtccctgcctcctggagctttcagttgtagagagaaagcaacacttactgagaaactaaaagatgatgtgtgttgtaaaatgagagtgcagggtgacattgcaattgagcaagctatcttgaggtaggtatgatgaaggacgagt

SEQ ID NO: 219388 - DNA, 379 bp, Homo sapiens
tttccttccttcctttctttcttttcttcctctcctttctttctctttcactctttctctctttcttctctctctttctctctctctcttttctgtcttctcttctcttcttcttttcttttcttttcttttttcttacaggatcttaccctgtcacccaggctagagtacagtggcacattcacagctcactgcagcctcaacctcctgggctcaagcaatcctccttgtctcagcctcccatgtagctgggaccacaggggcgtgccaccatctccagctaatttttaaaattttttgtaaaaacaggcctcactttgttgcctaggctgctacactcttttaaacaatcagatcttgcatgagcaagaggggcacc

SEQ ID NO: 219389 - DNA, 254 bp, Homo sapiens
agatcctctttccaatccttcaacattcttattagcacagtcatggttagcttagaggttacaatcaattgggggcaaaatcagggagtttacactatggcaacagagaacatctcattttcatgtgtacgtgggagatctttttggaaaaaaaatgtatttcaactcattctcataaaaaattggggccagggttttgtgacttttccaaagctttaattaataaatcctgatttggttgctttcaaaagata

SEQ ID NO: 219390 - DNA, 461 bp, Homo sapiens
catcacctgttagcttgttagaaaagcagaatctcaggcccactgcagacctattattattattattatttagagtctcgctctgtcacccaggctggagtgcagtggcactataatggctgactgcaaccttgacctcctgagctgaagcgactctctcttctcagcctcctaactagctaggactacaggcatgcatctccgcacccagctaattttaaaattttttgtagagatgggatctcactaggatgcccaggctcatcttgagatcctggcctcaagcaatcctcccacctcagcctcccaaagtgctggtattacaggtgtgagccaccacatctggctttatcatgtgtgtgtgtgtgtgtgtgtgtgtgtatgtatatatatatttattattattattattattattattatttttttttttagatagagtcttgctctgctgcccaggc

SEQ ID NO: 219391 - DNA, 508 bp, Homo sapiens
gcaccgcgagctgtagacagagccgcggtctttctcgattgagtggctttggtggccatgccaccgcgctcttggggcagccgccttgccgctagtggccgtggccaccctgtgtctgcccgattgatgctgccgtagccagctttcctgatgcacagtgatacaaataatgccactaagggaaagagaacagaaacgtaatgggcgctgagctgggaaaaccagggagaagactgatttattagagatttcagaaataaaattcacattcattatgatatctcattagtgaaaatttccattaggggattgtaaataatttaaagctttttttttttcagtgctatttaattatttcaatatcctctcatcaaatgtatttaaataacaaaagctcaaccaaaaagaaagaaatatgtaattctttcagagtaaaaatcacacccatgacctggccactgagggcttgatcaattcactttgaatttggcattaaataccattaagg

SEQ ID NO: 219392 - DNA, 525 bp, Homo sapiens
atggaataattagcaataacaattttcttgaattgctctttactttaaagactattagcaatttcaaaaagaataaaattcagttttaaagacaaattccataaaatttcatttctaaactgaaatttgcacttaaccagaaaaaattctatagcattcagattgtatagttttacaaattgaaactctaagtggtcagattgaataacagaagtaaagtaacatgctctgtttttttggtctttataaatactgtgctctcattgctaattctgaatcttccacttaaacataaagatatgtagttccatgggggctgcagacatgaactgctcctaaggcaagcttgagtgattttaagctatcatgaacttactactattgaaacacatacatatagccagctatatgtatgtgtgtgggggggtgactatgaaatagttctccaaattaactttcatgtacaatacaatgttcattaaaagtaattaaaatgtgcaaatttgaagtttacacaaatattat

SEQ ID NO: 219393 - DNA, 353 bp, Homo sapiens
gtaatagctgagactgcaacacatgcaccaccatgcctggctaatttttttgattttttttttagtggagacgaggtgtgactatgttgcccaggctggtctcaaactcctggcctcaagcattcctcccaccttggcctctcaaagtgctgggattacaggtgagagcctctacacatagtgggaagttagtttttaatggtagttccagtttgggaagaaaacattctgcggatggatgatgatgatgattgcagaatggtgtgagcgtagctaatgctgtagaactgagtacactccagcctgggcaacaagagtgaaactccccccactgcccaaaaaaaaaaaagaac

SEQ ID NO: 219394 - DNA, 150 bp, Homo sapiens
atggagagggagtgaaatggagaggacaaggagagaaagagaaaggggagtgcgtagaggagtgatcactcagaatcaaagtcaaaaattcatttttctgacttcaacttgccacaacacacactttttggaaaccaaactttccatttg

SEQ ID NO: 219395 - DNA, 311 bp, Homo sapiens
gactatgagcattgggatgttggggatgactggatcacaagtgagcatggtgatcgccaagaggtgataaaattttctataaatacctaaggagattagtgtggaatgtgaccattatcaaaatccaggagaataaaggaggaaagattatccaaagacttcttcagctctcaagtgggatgctttactattccactaagactactgacaaagggaatgagataactatcccaaagaaatccaagagctatcagagaagaaatagacccatgataaaaaaattgtaaaaataaaattacaaatgtcagcta

SEQ ID NO: 219396 - DNA, 290 bp, Homo sapiens
gacaatcagcatttactgagcacttactgtattccagggaccattttaaagctttacaagtattcactcatctaaacaaccccattcttacatgtacctaattagacagatttgttggtgttcagcctaagggattgacacagcttatcaaacaataactgtaagaacttgctgcgcactctggcacatgcctgtgatcccagcactttgagaggtcaaggcaggcggattgcttgagttcaggagttttgagaccagcctggacaacatggtgaaaccccatctctatt

SEQ ID NO: 219397 - DNA, 493 bp, Homo sapiens
gacaacatctacacaatgattaatctggtgccacctggaggcagccggtccaacttcctgatgggtcccagcttggacggtccaatgggcagcatgggtggcatggagccacaccacatgaacggattgttagggtcaggcgacataaatgacttccaaaaaattctcctaacaacgtgaatagtattagcaatcttccaggcacccctcgagatgacggcgagctaggagggaacttcctccactcctttcagaatgacaattactctccaagcacgacgatgagtgtgtgatccccccttctccaagatgctgagagagctggcattgcaggcaggaagatgccagaaattatgcaagaagtgaggtgtcattacccaggagctggtggagagggcatctcctgctcccctcaaccccctcccaccccatccacgcccaccttttccaattttagtttcatgcagtaaaaaggccgaactttttattccat

SEQ ID NO: 219398 - DNA, 866 bp, Homo sapiens
aaaggaaaaaatagagaattacctctgtgataatttttataaaaagcagcaataattcgaatggctatgcaagttaatgtttttagagtcttttcttcagtctaaaatgagccagagttattctttaataatctgctgtttatgcctttggggagtatggtacccatgagccaagcctccctgaaattgtacagagggattttataattgaattaaaatttaggaatgcaatagcttgtaaagagcctgctctccaacatagggtggtctcattcttctggagacttttttagataaagtaaaataattgtttaaatattttgtttaaaatatgactgtttttcctccctttttcctagcagaaataaagctgtaagtcttaaaaaaaaaaaaaaaaaaaaaaaaaaaaaaaaaaaaaaaaaaaaaaacctcgtgccgaattcggcacgagctggtgaagacatctgattttctttatagccaagttaggataacaaaatgcaaacaagtcattaatatttactatatgcaagatccagaaagatgaaggaaggagtaagaagttatccttcggggaactattcaaagcaaaaatgcaaaataccagggaaagctttgaagaaccaagatttgagcaggttcttagaatacagattggattggatttgatttcaagaaagatgaacgtgtaaagcaaaagtgggaagccaaaaacttttttccaaattagaattaagcattctttcaatgaacatttggaaatcaaggtagaaaaatatccctagggcctaactgaggagtctgaatgttgttgggttttgatagtaaccattccaagatttggttattagaactgggtttctgaa

SEQ ID NO: 219399 - DNA, 417 bp, Homo sapiens
aaatcagggaatagatagaagattcattcaaataatgaaagatagactgatggatttttatgtaacagaataggaaaagtttatgacatgttttcagattccaccttgcaactaatttttaagaagctaccacttgtcagccaggcacagtggctcacgcctataatcccaacactttgggagtccaaggtgggcagatcacttgaggtcaggagttcaagcctggccaacatggtgaaagacttctctactaaaactacaaaaattagctgggcatggtggtgggtacctgtaatcccagctactctggaggctgaggcaggagaattgcctgagcctgggaggcagaggttgcagtgagccaagatcgcgccactgcacaccagcctgggcaacaagtgcgaaactctgtctcaa

SEQ ID NO: 219400 - DNA, 430 bp, Homo sapiens
gcaaaatgaacccactgggtagttacaattgtaatagtgttatgaagtggggtctttaagaggcgattaggtcaagagggcagagcccttatgaatagatcaaagccattatgatgggagtgggttagttatcactggagtgggttcctaataaaaggatgagtttggccagatttcctctctgtctggagtatcacaatttaaacatcatgcttgtaaacagtacagcattgactttgtcacttaatgaagtattttcttcttttacatttaatgtagttattgatatgtttgtatttaaatctaccattttatgaagtgctttctgtttatattgtcttcctttcttgttttctttttggatgcaattttaattgcattttgccctctgaattatcttgaggttatataaaaatcacttaggaagata

SEQ ID NO: 219401 - DNA, 929 bp, Homo sapiens
atttcttagcctatgtataacttctaaatagcctacactaaatggtaactattacctatgttgtgtttgttattttaaactttaatgttatttattttatttcattttccttccacattacctctgctgttagcagctttgagaaatgctgctataggatgtgggaagtcattaaaggatttaagcagggagaggcaagatcagattaacatttcagaaaaatatttactgttttccagctgaaactagtagagtacaatttactttctggtcacagcacacagcagtcacatcctggaggaactgtacttctctaagatctagtctgtcctgtggtttaaatgacctttagcaaattgtctttattactttgtacactgctttcaccagtctgctcttccatggctaacggggcagaactgttatttttagggttttccacatccagtatgttcataagatttctaccctgtgtgaacttccagatgtcgaataaaggctggatgctgaccaaagacctttccacattttttacatgtgtgtagggttgctcaccagtagtattcccctgatgcttcataatggttgatcccagagagaatgccctttcacactcattacattcatagggtttctgtccagtgtgagttctgtgatgggaaattaggttagaactttaaacaaaggcctttccacgtttgttacactgataaggcttatttccaatgtggattctttggtgttacacaagattagagctgtagttgaaggttttcccacactctgccttcatagaacttgtctttatagtgaaatctctggtgttttttaaattgtgttagtcctttttaaggcttaccatgttcactacactacacaattcctctccatggtaactatttgggtgctcattaaaggctgtactctga

SEQ ID NO: 219402 - DNA, 654 bp, Homo sapiens
attaataagaataaaataatgatcatcatgtagcctaaagaaagaagttgactttccagctgtttttttgagaagacagagttgcattgactgcaaagttaatatgaactttataaagtgtggttgttgactgggcatggtggctcaggaatgtaatcctagcactttggggggctgaggtgggtggatcgcttgaggccaggggttcaagaccagcctggccaacatggggaaagcccgtctctactaaaaatacaaaaattagctgggtgtggtggtgcatgcctgtaatcccagccacttggaaggctgagacaggagaatcgcttgaactggaaaggtggaggttgcagtgagctgagatcacgccagtgcactacagcctgggtgacagagagagactccttctcaaaaaaaaaaaaagaaaagaaaaaaaaagaaaaagtatggttgctaaaagaagttgccatcacctgaagctacattccttggatgatgacacctctactttctgtgctggagagaaggtataggtggagttccagaagccatcttcccagagagaccagggctgactagaattctgaagagaaggctgttctcctcctctccctgacagttccccagccctgccctcttctttctcttatcaac

SEQ ID NO: 219403 - DNA, 442 bp, Homo sapiens
agtgctggacaactgtggaattgcagcgtgatacctttcacatctgggtcatctccatatgatatcttcttcctggtacaaggccagaagttcaccccacgcacaacacctatggaagccacttacgattcaaaggacagtttttctgaaaaagggtgcatgatgtatacttcccttcaacactaaaattctgctgcttaaactttgtaagtgaaggaaaggactggttctcttctactttggctgtcttccttgtttcctatttattgggtgcttgctttgggcaacccattgtattggatgtgctctaaaccacaatctttgctcctaaggagtccgtagtatttatcgggggatacgacctggataattcatataagatatgaatttctttctttttcttttttttcttttttttgagacagattctcactctgtcgcc

SEQ ID NO: 219404 - DNA, 389 bp, Homo sapiens
tgctccaaaatctaaaatgttttgagtgccgatatgatgccagaagtagaaaattctacacctgatctcaagtgactcagtaaaaacaaagaacctgacaggaagccagctggcaatgaagtctgggaaatatcgtgccccagcatcacaaggcagagaattgaagagtgatatggaatcaagagacaataaatgaataactggcatatacactgtgaatgttagggcatgaataaaattttgagacctcattctattgaaataattagtaatgtaaaacactcactacattttaagccattgtattttggttatttgttaatgataaatggaagataatatttggtgttgaagaggataagaactgattaaagaatgacttggtttac

SEQ ID NO: 219405 - DNA, 452 bp, Homo sapiens
gtttgtttttgtgttttcacatgaaagtgtttagtttattaatattcttgtgaaaaatccacaatggccacagattacaccattgcagcacctttactccttcagctttttgccagcaccaacattggcctttgcagtccccctgactttcctcattctgttcttgcgttcctctcattgctttcttgaggtctttttcttctcatacaggccatgtcttgcaagtctatgtttgggttcatttttctttgcataatccaggggatcataaatcatgccaaagccggttgtcttgccaccaccaaaatgagttttgaatgcaaatacaaagatgacatccagtgtggtcttgtacattttggctagtttttcccaaatttctgtcttaggcactgttgccttcccagggtgaaggatatcaatgactgtttgtttcctctgaagtcgtcggt

SEQ ID NO: 219406 - DNA, 548 bp, Homo sapiens
catcttgagagtttgttagctgacaatatgttgtaagggcatcacaactgagcagcatgtttcttggtggaatggtcttgagaagcatggaaggcactgctccatgagatgagaagccatgaccagacagccacagttccactttaagctgtcatgtgctgtcagtgtagtcccactcatccccttctctggaaactatactctttcacccacctggccaccaggacattcgagggtcacatgacttgccacccttgccacagtgggctggcacagaggtgggcaatcagctcaagctaggactgttaggagtagcaaatccatatgggtctacagcaacctccatttttgccttgtcagaagaaagcattcaaccaaggggcataaggcagagtgagaaactgaggcaagttttacagcaggaatgaaagtttattgaaaagttttaggtcaggaatgaaaggaagtaaagtacaattggaagagggcgaagtgagctgcttaagagattcaagtacctggtttgactgttgacttgggatttgata

SEQ ID NO: 219407 - DNA, 2102 bp, Homo sapiens
  misc_feature (439)..(439): n is a, c, g, or t
tttaaagagatcaaactagataaaagtttactttattcttcatgatgtctgataggttgtttgctgatataggtgctgtgtctggttttcctttcatgacttgtacctagtgtagctatttatagtgtatttgacaaacttttccacttgtagactcaggtaggcctgcttgacctcctctggggatatttgttaatgtcttgtcagagttgataaaattttccatgttcatgctttcttttgattctcataataatcttctaaggtaactaaaaaagaatccttattttcacatttgattaaggaagctggtcctaagagattaagtcacttggtcagggtctcttggtgaggtacttaagtgaaattggttttccaggtgctggccttccttttccaaactaatcctactttgcgtgtgacctgaaaaacatttttntgttacctgtttttgtttgtttaaacatgtacttgtttattagacgaaacagggagcccaaataaaaccagatgtgagctgcttttaaccatccctgaatcgtaatgatccatgtgtgaattatccctttgtagctagtttttaatcccagactgggctcttccagtttttcagcctgctgttcaagtctccccagcccctgacttggttttgtcagagcagattagagagaaattctacagtgcgagaacacgatgtgtatgatttaggaagcagaactcttttttttttttttttttttgagatcagagttttctttgttttccatttacctgaagtaatgcattgtttcatttaaacttaaatagctttcaagattgggttcatgaacatgtcagtgggcagagtttcatatctagactcgagagatgacaaaataaatatgtctaagatagaattattttcacacctgccttttccctttcaagttctatcatcagtgattgagaatttaggctttcaagggcacacttggatttaaatctcagtttgtccatttagtagctgtgaatgcccttgggcaagttaatctctttgccttggactggttatcctccaaatgggataaccctacctataatgaggaatgaaatgcagtaacgaacaggaagccactaagcacagtgccttacacagaaactttaataatagataaaaatatttgtatcaccttctgggtgccaagtttgatgctaggaaataatccaatgggctataaaagtatgatttggtaatttgtttggagcatgggtaaatgaaaacagtaagaatacataataggcttatataaaagttttgaagagagagcggttatgctgttggggtgtggctttgaagggcttaaaaataatcaggggtgttgagttttgatcccaaggtttaagaatgactttaataagcatgcaagttaggatatagtttggtcctaagtgcaaaaaaaatctaccctgaatccaccctaagcagaaaataaatttgttgtgaacaaacaatagatacatggagcagtttacaggatctgagaaacacctgaaaaatgggatcagaaaggtggacgctgggcagctctggggctgctggtggagggagctgaagccacatctctgtagagcgtcccccggtggatgagccaactccaacccttttctgtctttttctgcttgagattcaaattccatggacaaacgttcaaatgtcccagtttgagtaaaatgtctaaaccagcctatggagataagttattttcatttgacaaaactgggttgcttctatcagaaatggggaaaatagatgttggatagcaaaagtccaccatgtccaggccaggcgctgtggctcactcttgtaatcctatcactttgggaggccgaggcaggcggatcgcctgaggtcaggagttcgacaccagcctgaccaatatggtgaaaccccgtctctattcagaatacaaaaattagccgggtgtgctggcgtgcacctgtagtcccagccactcaggaggctgaggcaggagaatcgcttgaacccaggaggcagaggttgcattgagccaagatcatgccactgcactccagcctgggctacagagcgagtctccatctca

SEQ ID NO: 219408 - DNA, 294 bp, Homo sapiens
caggctaagtaccatgctatggggcaactgacatttaggcatcagtgaagtattagaagctgctgctagcattggatactctggttggggaggggcactagaagtcagtgacccaacaagcagtcaagggtgtgggatagcagctagtctagacctacaacgaggcccaggcatcccagacagagtagacacatgaacagctgggtggatgtggggacttcagcccaggtggttgatttctcaagaaaaagaaatcatcttcactagcagacaaggttggcttgatcccgtgtg

SEQ ID NO: 219409 - DNA, 493 bp, Homo sapiens
atttaaaatagaatagaaggatacacacccaattattgatagcattgtctctggagattgaatttgaggctgttgattaaaaggagactttagctttgcttgtagtttttatacctgaaaaagactggtagcatataaaataaatcttaaaagctaatgatacacaatgacaatatgaatgtttacttgtaatagtgtttttcttgttctttctcacaacaggccaagggaagcctgtgcccatagaaggaaatgttataatggattcatatgccctatcagatgctcaactattttatgaaaaatctctctagaaaattagtaattagaatattcttgtttattatataatgtgaaattagcacattttagcaacttgatgatgctgtgtttttatattttaacatttctgaaattggactcctttcaactgatgatatcttagattcaagtaaatatttaattattaaaaatttgaaaatcagatgccagt

SEQ ID NO: 219410 - DNA, 746 bp, Homo sapiens
attcaagtgatcctccctcagccgtccaaagtgctgggattacaggcctgagccgccacacccggcctaacacacttagcccctttatggcgtatcctcccacagcaaccagcaaaattcgaaatgtcagtgggagcatgttggcaccctgcttagagtcctctagagtcttctcccacctgcctcctatgacctgtgagaccttctgtgcgcctctcccacctgcctcctgtgacctgtgaggccttctgtgcgcctctccccctctcagacctgcgcccaggcacaccccatggatatgttcacacacagacataatgctgggattacaggggtgagccaccgtgcctggccactccatcattttttaattgattcctgttgaaatgcgagtattttggatatattggattaagtcaaatatattgttaaaattaatctcaataatttactttaggactttacaatgtggctactagaaaatttacaattacatttgtggctctcatcatctctcttgggcagtgctggactagagagtggcaagaatagaagcaaggaggccggctggagcccatcacagaagcaggggcacaagatgatggagtcgagcatcaagggtaggaacagtgtaggtgtaagaaggggtcagattcaggagacgctattgtgataaaatacacataacaacatttaccattaagtacattgacattgctatgccatcaccaccatccatccacaga

SEQ ID NO: 219411 - DNA, 517 bp, Homo sapiens
gctgtagcttatgctaaatgttggttggaacagacaataagttatggagaacttcagaggacactaaggttggatgggattttggaagttgtgcaggtcaatgccactccagctattggctgagtttcactaggttaatacatgaacaacaacaaaaataacctagatcagaagttaaagatcattttattgactatctgccgtgtctgtgccattgcagtgtactaggtgcacttacgagtcctctacttacaaactgcttttcacaaaatatgaaactccaggcaaaggttcagacatacgacgtttgtttttaaaatctttctacagtcttgtatcctttttcctttccttccttttaccctttttaaaatgtgttatgagttttatcttagactaacatcatctgtaatgttgatatacgccagtattcagttgctgtgtttgatgaatcataaaatggtgtaaaacttcaattagtgtactttttaaataaagtatctatgaatgcatccag

SEQ ID NO: 219412 - DNA, 368 bp, Homo sapiens
ttccctaaacaaaacttaattaaggctggtgggggtgaggtgaagaggatggggaggaatgttctatggaagccagtaaacttagagccaattgtgttcctccctccagccaataaatatgacactggcacttgcatgctggtgagttttaacctttggcttcttgaggttatgttgctcttcttcttgcccttgtctctaactgccctcactttgaaaggaatctttgtgtacttgttgctttttctttaaagaatttttttcagaattctttttgaaatcagaaagagtaaaaaaatacacatatgggatgtaacttatttttcttttatgtttaatatagaaaaagttggaagctgtagacaagc

SEQ ID NO: 219413 - DNA, 782 bp, Homo sapiens
ttgcagcagtttttcaacaggtgcaagtgttaaagggtatgatccttcagtggaacaaagcctccgtgtcacctgagggatagcaacatgcctacaagcactgcaagagttgtttgatgcttcaagaaaaaaggagaaacagcttcctagaacaatgttcccaactaaagccgtctgtattatgaagcctcgaccttaaacgcttgaagattcttccagcataaatgatctttccgatgtcctgttagaaggttcaagttagccttgtgtttcaccacttacctacagtgctgcgcatctcaccacctcaccatatgggcaccatgggcaccaaatagaaattataatcgtcatcatcgtcaaatgagggttatcaagagagaaaagcgacagtttatgcttctttttttttaatttttaaattttttgtaaagacaggattcactattttgcccaggctcgtctcgaactcgcagcctcaagcagtcctcttatcttggcctcccaaagtattgggatcataggtgtgagccactgtgctcagccagaagagccagagttttgatgcgtcttaatgtactctttcaggtcattaaatgaaagtcatctgcaagtgttgatagaaaatgtggctgggcgtggtggctcatgcctgtaattccaacactgtgggaggctgaggcaggaggatttcttgaggtcaggagcttgaaatcagcctggacaacatagaccccatttctatttttaaaataaaaataaaacaaaaagtgttacattgt

SEQ ID NO: 219414 - DNA, 560 bp, Homo sapiens
gacaggggagcaagccaggtatgctcccacagtaggggctaggaagtgagcaaggcctgagtggcagtggctgggtctgggaagtgagcactgctgtgatctgagacagggatgtaagtggggcttgagttgcttctgggacttggttgtgagctgggcatgggctgatgcagtcagggtggcaggggtgagacccagtgatgctggagcatgaaggagacatgcattttccaccactggtccaggctgtggccaccaaagttggccccaccctctccagtagcagagcctcagtgtggatactaccatctctcacctgagcactccacctgcctgaagatcactccatgcccactcacaacagctggtgcctactttcaccagtggggggcctgagcacaagcccacccagcctggcttcaagacagagcactcctcctgggggcctgaggttggacctaacctccctgctaccaccacctcagctggcacctacctgccagcaccacttgcaggcctggagactgatccacccaactcatcacagccgccaacatcag

SEQ ID NO: 219415 - DNA, 443 bp, Homo sapiens
caattcccaattttaaagtttgctacaaagcagcagtaatcaagacagtgtggtactggcataaagatagacagatcaatggaacagaattggaagtcctgaaacaaacccatgtgtcaactgatttccaacaagatgccaagactactcaatggagaaagactagccttttcaacaaatgatgctgtgacgactggatatctacatgccaaagaatgaagttggacccctataccatcccatatactcaaatgaattcaaaacggattaaagacctagatgtaagagctagcactatgaaactcttagaagaaatacagaggtaaatcttcatggcctcaggcattggcttcttaaatataacatggaaagcacaaccaacaaaagaaaaatagataaattcaatttcatcaaaattgaaaacttcatcaaaagacaacatc

SEQ ID NO: 219416 - DNA, 583 bp, Homo sapiens
gtgaaaatgaaaataaacatccagagatttgcacaaaatcttaagtgaaaggaatgttcttcttagtacgtgggcttagtctgaaggtgacttcaattcttgacagctttcatattctcctcacatagagagagtgtaggtgagttttacagacaaggccaggacacagcttaagtctccttacttcaagtccagggctttttctactctgatgtcatctggttcaaccttagtttttcatgttggagatctaagtaccagaaaaattcggttgatttgcctgatattacatagctggatatgtgatgccttgctagtcagactaatgtaattcctactgtcacctccccacccattactctctgtcatcctgtttatttcctcaatggtatttattacagtttgaacttgccttctttatttgttttcttttgtttattgttgtcttcctctctagaatgtaattgccatatcttcctggttctctgctctgcacagcaaagtgcctgacacatagttggtacttaaatatttttgaaggaaggagtgaatggttggatgggtgagtggctagttggaatag

SEQ ID NO: 219417 - DNA, 567 bp, Homo sapiens
aacatgatcttagggctgaatcttaaaaaataaaagataaacctgagaaaagccgtagaactgtaaaacagctcagcatgttttgaaaccagcaggtagataggtatgacgggtatgaagagtgtacaaggatggaatagaagaaaacaattcctagagctagaaagtaaccataagtcaggtgacaggagacctttggggccttactgaggagtttggattttatcctggaagtaatgggacatgaattgacaggactctgcaatgttagggattgtgctgcagaaggaagatgtctggaatgactcttggctttattgatggtttgaatggctaggtagggtggtcgtccctgaaaaaagggatatattttgcatcttttatgtgtttacatcttcacaacaattttgtgaggtagtaaacattaacattttataaggaagaaaagtgaagacttgtataggttaaagattttgtttgatttcttgcagctagtacttgatgaaatcatgtggaacacaggagttgtctgatcccaggatctgagcttgtagccactattgtagg

SEQ ID NO: 219418 - DNA, 662 bp, Homo sapiens
gccccgcccccgcctcggcgctctgagcaattggactctgccagctctaactccggcgggactctgaaactcaggcaagagccgaggtgactgggtcctttgaaatgggtaggggacacgtatccggtagaactaaaactagcgtggggatttgaagccaaaactctcaagtttttactgaatcttaaaaccatcaacttccaaatgtctgcatttgtctttacaccacacaggtctcccctctatcatggcatttgtcgaaaaggagggtagatgtttgtttttcgcacctttactttggggaattgtaaaatcaggaagataataagaaacaattgttagaaatcagtaactaaaaatgcttatgaatatttccaccaaaataatgaccagtgtttgtgaggtcaatagattcaggattaccaaataaattctttcattatattttaagaagtacacagttaaaatagaccaatagcactttaacattaatcagcttaagattatgcaatattatatataattctcaaatcccttaagggagatcagaaactactgaaatataagagatttttgtcacctctgaaattgtgaagaatatgtttttttttctttcagcttttctaccaagtaaataaagcttccctttaggcattttaaaa

SEQ ID NO: 219419 - DNA, 378 bp, Homo sapiens
gccccgcccccgcctcggcgctctgagcaattggactctgccagctctaactccggcgggactctgaaactcaggcaagagccgagctgctgtgtgtgaaaacctgactccagtcctcccagcctctaggaccctgcccagacctggcctaccttcttcctcaccgccactggaaaaaaacagacgtcaaaagccttaacaaaatactgtctgatatagcaaaatggaacatgtttcctactagaagtatatgacccgaagggggaaaaatctgactcattttaaaaacaattgttaggggtgtgtgtgttttgagagaaagaaatagaaaagggccaatgtatttgctattaaaaaaatcttcaaaataacagaaaa

SEQ ID NO: 219420 - DNA, 399 bp, Homo sapiens
tgggggcagcttgggccgtcgcctctcccgtgtatgtgaccagaatccccaagcaccccagggctggagtgcggatctccacaccttaccatgacaacagcacctcagctttgttgtcaacctacccctttttaaaaataacttcgttgagatacaattcacagaacatatagttcacccatttaaactgaacaaatcactacttttgggatattcacacagttgggcaactgtcaccacaatcacttctggattattttcatcacccccaaaagaatccccacacccattggcagccactccctattgcccctctctcccctgacaaccactaatcaacattctgtctggatggatttgccgattctgaaattgcacagttgtccttttgtgtctgcc

SEQ ID NO: 219421 - DNA, 273 bp, Homo sapiens
gaatcagctgggcgcagtggctcacgcctgtaatcccagcactttgtattgtcacatttgatgcttagaaataaggggctcatcttactaatcctattgatgccaaagcaggggcatgatgatggtgatgatggtggtgatggtgatgatgatattgatctttggaccacaccccagatgcaacctctaccacctgcctctctcctcaatactgctggcctccctttttccaatcccgcctcattacagtcgtccctagatagtcagtgagat

SEQ ID NO: 219422 - DNA, 648 bp, Homo sapiens
tgcccggccgcccctactgggaagtgaggagcccctctgcccggccaccaccccgtctgggaggtgtacccaacagctcattgagagcgggcgatgatgacagtggcggctttgtggagtggaggtggggggaaggtggggaaaagattgagaaatcggatggttgccgtgtctgtgtagaaagaagtagacatgggagacttttcattttgttctgtactaagaaaaattcttaccctaaaacttaaagtataataaaaaaaaaaaaacttcagttttctaaaaattatatttaaaattgtaatcaaaatgtacctagtttataaatgtttattttgtacttaatacctgtaaagtcttagttttcagacattaagtgactgtatcatgttcggtttaataaagaatttatgcagcaccatttaacgttttgaaagtattatttaaaagaaaaagactattcttacggaataatcaaaattctgctttcttaattgtaaaaatctggtttaaatatcccatggctcctggccaggcatggtggctcgtgcctataatctcaacactttgggaggccgaggcaggcagatcacttgaggtcagaagtttgagactagcctggccaacatggtgagacccgtctctact

SEQ ID NO: 219423 - DNA, 514 bp, Homo sapiens
tgattttcttgctttcatgcagttaagccatggtgctcctcttgttatatcacccttttaaacccagagattgatagtattagccatcatttgctgagtgtcatgcactattctaagtgctttacatgtatttgcctaatcagcgccctgtgaagtacatcctgtctccattttgcatataaggataccaaagcacagagttggagggaagatagttatattcccttactttatttatttatttttttgagacagggtctcgcactgtcgcccaggcttgagtgctataagaccttaagtttcccctttcaaagtagtttatagtgtctaaatatcttacataaaagtatatatcaaatagggtggcagtctggaaagatttaaaatccagaatgactggaaggttgggcaactaagatttcttaaattgcagctgttttcaacatagatgtgttgtagagtcttttcggtttcaaaattaaattgactataaatggagtgtgcttaattcaga

SEQ ID NO: 219424 - DNA, 386 bp, Homo sapiens
tcccatgtatttaacattgtctctaaattacttataatgcctaatacaatgtaaatgctatgtatatagttgttatactgtttgtttagggaataatgagaaggaaaaagtctgtacttgttcagtacagatacaaccattcttttttttccccaaacatttttgatcttttgttggttgagtgcacggatgcagaacctgtggatatagaggactaactgtgtgttattttagagtggtagatgaactttggtaggtgctgtgtttggtatgtttgtccatccattttccctactacttgccagttatataagacagcatgagtaataagacttctgacattttaaatgcagaaatattacataaatactattacataaagattt

SEQ ID NO: 219425 - DNA, 364 bp, Homo sapiens
tcaaagctttgttttaaagccttttttttctaactgcttgacttactatatctacagttacatccactagtacactctgttctggagaagtttgtccctaagcttgactagttcacctgttctctccttctagaccatacataaaagccgtgcctttgagttccccagacctcttcctcctccccacccacgcacacatatacaccctgggtcaggtagctcacctgtaacctgtaatgtacttctttgtgctatacctagtgcaggtcgcttattcatttactagactgggccctgggaataaaagattcattaaacacaattcttgtcccccaagtccttacaggagacatgattacggtac

SEQ ID NO: 219426 - DNA, 818 bp, Homo sapiens
aggaatgggattttgccatgttgcttaggctggtctcaaactcttgggtttaagcaatctgcctgccttggcctcccaaaatgctgggattacaggagtgagccgatgtgcttggccaacactttttaagaatgtatttactcctttttatttttttttggatcctccttttactctctgctccatcctttctctataacatatattaacatagtaagtttttgtatatggtctccatttacacatatttacacacacatttctaaagatctgttagtttgacttatgaaaatcaaatactacacatgcttttgtgcatcttagctttcattgattttttttctgttaatgactgcataatattctgtggtgtggacttattaaaacatccttcagagaagggcattcatcgtctctgtctccagtcctctgtgactacaaaaaaagcagtactgtactgaacacactgtatacacacttactggtacttgtatttctatgagataaattcctaggtgaggtaaagctttaacacgttactagactgttttccctaaatgctgtagcaatttattgttaagcatgtattcccagtctttgcatctcttcaagatattttatcactctaacttcatgtatattgaccagctagattttctgttatgatctgtcttttcatatcctttgtccattttctattttattgtttgttccctacttgataatctgtaagtacagtttctgatacattattaaattgaatatgttgagacattaaggaagaatttcttaaacaagtcataaaacatacaaattat

SEQ ID NO: 219427 - DNA, 707 bp, Homo sapiens
gtagggaggctgcagtgcagggaaaagaggtcgcagcagctgatgcatcacagcagcagttcatagccgatgcatcatccccatttctgatgtttctctccatatggaaatgtgattcttctgatttctttctcacttactcctcgccaggagtgacataatctcattggttaaattaaaaacaaaacaaaactgggaatttttagtttagtttctgccttttttccttttgaaagttaactgctcacagcaagcatacattgatcactgtccttcaaggtaaagtgaccaggctcatctctcttgtaggaaggtctgctctggtccagcatcacctgtacctctgactagctgtttcagaccacccaattctgggataacttatgcagcccttcttggtaagctatattctccaacttagccattaacggtaataaagatgatactgtttgtcttgttttacattttgttcagaaaccaagtgtggaaaagatgatgttattatttggatcccctcaggaaacctaatagttgtcaacagacctaaatcaaatcatggtggttcagatttttatttactggaactcaatttcttcctctgtaaagggagatggttggatggttcccaaacctgaatgagctttggaattactcatggttttgaaagtgcttttttttttttttttttttgagatggagtcttgctc

SEQ ID NO: 219428 - DNA, 292 bp, Homo sapiens
gtagggaggctgcagtgcagggaaaagaggtcgcagcagctgatgcatcacagcagcagttcatagccgatgcatcatccccatttctgatgtttctctccatatggaaatgtgattcttctgatttctttctttcttcttcccatgccagatgcttgcttccactcccccttccactggacatcagactccaggttatttggcctttgaattctgggacttgcaacagtgacttcatgcggtctctctgaccttcagccacagattgaaggctgcactgcagcctcaccag

SEQ ID NO: 219429 - DNA, 492 bp, Homo sapiens
gacgaggcgggctcggcaggacgctgctgtgccgtcccgtgtggatttggctccaggtcgtcctgaggatgccgcgcagaagccgtgtgggcctcgggacgcaggcctgcgtggctgcagcgcaccaggggaggctccggggatcccgagctggcgcggactcgcgagaccccctggccgctctgcggggagcgctggggaggcgtcccgagcgggcgccagagacccgcgggctccccgtgcaggggctgcctgggctggggcccgggtgggtctgcgcaggtgtgggaagtgccggctcccggtagatgctgaaggcggagttgccaggatttgctgcggacttttggagaaatgaggcggggaaggacgagcttgagaaccgacgccggagagacggggaagacgggggaggcctgagcgcgggctggcatggctggggaggttgtgcactgcccaagaatgctcactgaggagcgtgttcacgtctca

SEQ ID NO: 219430 - DNA, 463 bp, Homo sapiens
  misc_feature (444)..(444): n is a, c, g, or t
cctctcccccacagtgagttaccttcatcaccatctcaaagcactgtcatcacctcctgaccttaatgaagacagtatcatctcaggataacccccactaccatgatggctttttctctctgaacttacatacaaggagaggaagtagggtttgtggccactcacttctcatttgcgatgctcttccatcagcctctcaagaagctaggaccacaggcatgcaccaccgtgcccggctaatttttttttaacgttctgtagagatggggtcttgctgtgttgcccaggctgactactcagttccttaatcacctcatctccagtgatgttatcctccactcgaacctcaaccatccacttgccactgacacaggtcttcaaaatctgtattttggtcataccaccgaaaccaccataccacccttcttattcttccacctcctntgggggacgggggggatcc

SEQ ID NO: 219431 - DNA, 529 bp, Homo sapiens
tgttgcccaggctggagtgcagtggcatgatcatagctcactgcagccttgaactcttggcctcaaggtaccctctcgccttggcctcccaaagtgctgggagtacaggcatgagccagcacagctggccaaaagtttattttgtaaaaatcaggtaatcattgcatatattaagaaaatccagaaggtttaaataggtcttcaataagtttttccttcctcctgtgtgatccactgttagtagtagggctgagcaccagatacctttgctcattttacctgtactacaatttttcttacggtaaagagtaaaatttcttgaactcatgtctctattaaaagtttgaaagaaaaagaaagaaaaaagaaaaattaggcatggtggcacgcaccagtagtcccagtctcccgagtagccaggattacaggcatgcgccacacccagctaattttcgtattttagtggaaatgaggtttcacccttttggccaggatggtctagaacttctgacctcaggtgatccacctg

SEQ ID NO: 219432 - DNA, 427 bp, Homo sapiens
  misc_feature (157)..(157): n is a, c, g, or t
agatttcattctgcaagtaatgaggagcccgtgaagggttttaaaggggtaaagaaacaattaggcttatcttttaggaaaatcagctggggagtcatattagaaggggtgagccctggggcaggaagaccagtcaggctagtggatggaagaggtnatgagggtctaaactgggaagagtagtgtgggcctggagaggtgagaaaaagaattgtatttcctttttaattctcattatatccccagcaatttagcagcatctgctatgtagaaggttacatatgaaaacacacagaaagcattgggtgtcttttttttccttcaaataggaaagaaaaagaagaagaaaacatggttataaccatatgaagctactgccaggacgatatgttaataaaataaatttaagaaaagatttgttaaaatc

SEQ ID NO: 219433 - DNA, 617 bp, Homo sapiens
gacctactgtgttaactcttctctgtgccatgcaactttttaaatgatgttggctcatcttcattttcatacattcaacgatcactttgcatatgctcatcatgaaatgctggagaaagcaaatgaagaaaatctatgctttatgtactttattgccttgtacccaagtatttcaagccttaagaaaggtctcatcccaaattattttaaggtctgaaaacacattgactcatactcttcccttgctccacctaagtgtaaatggagttcattttatattctgccattaaggatcttctgctttctctctctccccgtgatgtttggttctttctagacatgggaaacagatggccagctaagtcaatcagatgtaatttggacacaagcatattctctggtctgttgttcatctaagagttttcatttcaggaaaattcaagagaataacaggatcatttaggaaagaatattgtgtagtgataaccataatgctgttagattattattattatcgacaagctaaaatagatgtcacaaatcaagatttgcttagacaatgtgccacagtataagaaaacaggatttgagattgagaaatataatttttgactcag

SEQ ID NO: 219434 - DNA, 222 bp, Homo sapiens
ttgaatgtatctgcaaaactaaagtgataggattgttgcccacccaggacgttatggattcactcagcattcattcatgaaatattcgttgataatttactatgtgccgtgtactgcctatataaagcagagagtacttgcccttatggattttattttctagtgagtgagacaaagaatgaaatatttaagtataatatagtgtcagatagaaactattgc

SEQ ID NO: 219435 - DNA, 298 bp, Homo sapiens
  misc_feature (8)..(8): n is a, c, g, or t
gtgctganggtgaggagtcacaagaggaatttggagcccaggtcggcctctcatcctgcccaaatgttggcagaatctgggtcttagactagcataagtgaagtctggggagggccgaactccaaggcagaagaagtggaagaggaacagaggtggagaggtaaagctctaagtcttccttctccacctctgttccttttccacttcttcttcctcctcctcctcctccttcctgtggatattctattgtttcagcaccatctattggaaaaactcttctttttccatttaattgtct

SEQ ID NO: 219436 - DNA, 554 bp, Homo sapiens
ctcaccaaaaagtatgaacagagtgtgtatgaattttagacatcatgcctgaggcccactcctttggcccaatagatggtggatcagttctcatttcaaggggactgtttgtcagctgagatgtttccaaaggtattcatttgcttgtgtaactttatttcctcaaaagtaaaatctgacctcccttcccttgtgtggttataagtcttaaaggagaccatgtacaagaaaaaaaattgtgaaattcaaagggctttatatatatcaggcactagctgtaaactgaagtcaccctgtgaatcagatgtagagttaccatatttaggctcacaccctctaaatccccaaggtgtagtcctctttccatggacagttggaaggtcaatgtcattgaaagaaaaaaggtaaagcttacctaatgtgaatattgtgggcttagagttcaccagcaggcaagaactctctccagggttgtaattaattaccttatttgcattatgtaaatgctaccttttaaaatttcataattgttattaaactcagttatttctcta

SEQ ID NO: 219437 - DNA, 197 bp, Homo sapiens
ggttttagagtttaaaatattatatttttaaggagtttagggaggagaaagaatgattttcttggttttacttctaactgtggtaggtgctggcagaggctgcctgtccgctggggtagtgaggagactatgcagcgtgtttttgctccagagttgcaccctgtagtgacagctttggtttcacctgtgattgaagt

SEQ ID NO: 219438 - DNA, 711 bp, Homo sapiens
tgagtggctctgtggtattgcgggagtggttaacttctctaagcctcagttttcctggtcttggagttggtcaagacaatttctaagtttcatttcaactcgaaaagtctatgattttgccatgttgctcagtttaaaaatcttttattcagatacacacatacacacagacacacaacatactctgagttcaatatataagtaaaattcccagcattcttaattgttccaaaaccaaataaaagaaaaatccaagatgtaaacacctttagcctctgcaaattttacctgccactgatcaccaaatacacaacagcactgtgagagctctgtatttataactgttgactccctcctacaggattacaatgccaggcactggagataacagaacatgcagaaataaaagcttagaaaataaaccttcatacagctaatgaaggattatctagtgtgcaatttttctaaaatgtcacagctattagcaagttatttttttgtttgggacaaacaaaatttctcctgtttctcccctgtttctactttgttgccctgaaaagtttcccttaagtattatcagatttagagactcaaaaacttcaaaattataatgtatatacttaaatttataaacttatatttacttctccgggaaaaggtctgctcaggttctgctatggactcaattgtatctccctccactcccgccaa

SEQ ID NO: 219439 - DNA, 297 bp, Homo sapiens
cggaccagaaatggtttgtcccaaacaaaaaagatagcttgctatagctgtgacattttagaaaaattgcacactagataatccttcattagctgtatgaaggtttattttctaagcttttatttctactttgttgccctgaaaagtttcccttaagtattatcagatttagagactcaaaaacttcaaaattataatgtatatacttaaatttataaacttatatttacttctccgggaaaaggtctgctcaggttctgctatggactcaattgtatctccctccactcccgccaa

SEQ ID NO: 219440 - DNA, 377 bp, Homo sapiens
caccactcttaaaatggtttcttggattcttatattcaaaccagaagtgaattatatgtattctttatttatttatgtatttattttaagaacttgaaggccaggctcatgcctgtaatcccagcactttgggaggccgaggcaggtgaatcatcttaggtcaggagttagagaccagcctgaccaacatggtgaaaccccgtctctattaaaaatacaaaaattagctgagtgtggtggtgggcacctgtaatcccagctactcagaaggctgaggcaggaaaattgcttgaactcgggaggcagaggttgaagtgagccaaaatggtgccattgcactccagcctgtgtgacagagcgagactccctctcaaaaa

SEQ ID NO: 219441 - DNA, 466 bp, Homo sapiens
tggagcatgaggccgggccttcggaggaagcactgctctgtgctgtgcccagcagtaaggagtattcacaggtgctgagttgtagaggactcttactcggtacactccagatactggcagtagtctctcttgggaggtggcaggaggctgtatgtagatcagaaatggctttatgaaagatagaccacattcttggagtgagaatatgagaattaatgactggtctgttaaatctctttgaagccagggggtgctaccagttctgctgatcaatgtatttaggagtgagatggttacaaaggcctgagaatgtatctctaaagttctggattctaacttacaaggtttgagacaaactgtcttcatctgtttttcaagctttcaggactgggaagaatgaccttcatgggtggcttgttgttaggaccaagagggctttaaattgaaatttggggctagtaaagag

SEQ ID NO: 219442 - DNA, 806 bp, Homo sapiens
atatagagatttcccacctacaccaagtcagtttcctttatctttaacatcttatataaatgtgctttgtcaaattaatgaaccagtattgatacattattattaactgaagtgcatactttattcgtatttcctcagtttttacataatgttctttttctgatttagaattccatccaggataccaaattatatttacgtgttatgtcttctgaggcttctcttggctgtggcagtttgtccaacttaccctgtttttgatgaccttgacagttttgaggagtattggtcaagtattttgtagaatgtgccttacttagaattcgtctgatgttttcctcatgattagagtgggattactggttttgggaggacaagaactaagatgaagtgtcattctcttattttcatgaaattttatgggcgttttgatgtgattgaggcttagtttcatcatctgtaaagtggagataatgataatggcatgcagtaaacactaagtgagaaaactatgtgtgtaaagtatttagcattaagaagatctgatgcagactaaagagctcagtagcggccaggcgcggtggctcacgcctgtaatcccagcagtttgggaggctgaggtggacagatcacctgaggtcaatagttcaagatcggcctgaccaacatggtgaaaccccgtctctactaaaaaatataaaaattagctgggtgtgttggctgcctggaagcagagagaattgcttgaacctggggggtggaggttgcagtgagccaagcttgcaccactgcactccagcctgggc

SEQ ID NO: 219443 - DNA, 433 bp, Homo sapiens
ctctgcctccctggctcaagtcatcctcccacatcagactcttgagtagctggagccacaggtgcacaccatacacctggagagtttttgtgtttttttctagagatgaggtcttgccatgtcgcccaggctggtctggaactcctgagctcaagcgatccccctgcctcagcctccccaagaccaccgcagcatcagccactgtgtcaggctcccttctgcttcctatcccacaccttacttttgcctgcaagactttattgtctgaatgtgtctgaatgagcttttccagtacagtattttaaccgtatctccagatccactgtctatctggctcctcccacctatctgcctgacagtagacttcttgcttccagcccagtgactcccttcttccctcagggcccctgtcctactttgccccacacctcct

SEQ ID NO: 219444 - DNA, 451 bp, Homo sapiens
cttttatttcggttaaaagaaagcagcatttgctttgtttaaaaaagaaaatggggggaggggaatgtatgtgggtttgtttaaatgctgaagaaaactgttctaagcagctggatgaataaaagggaggagcactaaagaaagaatgcgctaaatctaaagatacaagaacaacacccaggaattgattgaaaatgctttggtgacaagtgaggcatgtaatgacaagaaagcagcatgtgtgcatattgaggagtgcatgtggaaaacaggtttctccttttaattagctttgccgctgggaggaccttctctctccactttctgtccagctcttccatcccagaattccactctgggttcttgtgatgtgctaacgaggctgcagggcagctctgattgagtgggccaataatactggctcaaggccacctagagaagtgttctcccc

SEQ ID NO: 219445 - DNA, 450 bp, Homo sapiens
ggggtgggggcagtccccagcgcccagggcttctagccaggagaaggcctgagggaggctttcctcgccctagaggctccgctggaaagtgctgagcacccgcagacgcccagccagagcagggcagggcgggcacgctttctctggaaaaggccagacggcatttaggccccgccgcggcgcaggctccgttccaggtactcagcacagccatccaagcacgagaacagccacagacaacgcctgccggatcgcctggccatgtgccaagaaaaccttatttatggactcctcatttgaatttcatataattttcacatctcacaaattattcttgtgattttttttcaactgattaaaactgtggaagctgttcttagcttgcagaggttgcagcgagccaagatagcaccactgcacctccagcctgggcaacagagactctgtctc

SEQ ID NO: 219446 - DNA, 298 bp, Homo sapiens
cccatgaggcccttccctgatgactcatttattagaaaacttttccttataaacgatacaaaaataaacttcagctcacctggtagaatcacagaaaatttgaattagtaaagtaaaacttgaagacccataggtaacaaatacttcatgttacccacagagtccccatgtcagaactgtctgatgtcactgtcagagacacagaaaccagggacctagacagagaaagaagttccatggtcctaaccgccgggatgcaactgtggtttgggagtggcaaatgagggctctcaactaa

SEQ ID NO: 219447 - DNA, 594 bp, Homo sapiens
tctctgcatcaaacgtgaatactgccccgtgcctccaaagcgcggactgcatcacattggaaagacctaagcgtgaatgaagccgggtatggcctgaagagctgctgctgactgacagcggtgcttccacttgtgggaggagggcaggggcacgtggccctgcttgggaaattaatgggcttgcgagccggaagccctgagctgagttgtcagctctgcctaaatcatacctttatgacctttggcaagtttctcagcctcaatttactcatctgtaaaacatgggtaatcccagtgtgctgtccgcacgaggttgccgtgaggatttttatgtaaagtgacgcatggtgaatgcgagtttcctccctcctccgtacttgaaattcaaccaaatcactcagtctcatctaactactttgtgtttttaaaatgagtatcagtaacagctgctgcttctgttcttcccagagatgcagtgaacacaggccgtgaggctgttctgtaatttctaaatgtttatcttctcagagtgatgagttatgttagaagcaggtgattttcttcaaaaaactaataaagtcttattattctacc

SEQ ID NO: 219448 - DNA, 516 bp, Homo sapiens
tatgtatgtagtctgttgctgctgaaagatgtctgtgtgcctgtatcaacatgtgacttcatgtaaagtttctttgtgttcacagttcttagcaaatgcagttacaatccatagatagccagcagtggatgttactccaggaaaatgcaggattaaaattgtccttgtgtataacgtgtgaatcatttttttaaactgaaatttaaaatgcaacatagtttaatctctgattaaaatgtactaatagggccaagctgctttgatgcatggctataatcccagccgaggtgggaggttcacttgagtccaggttcaagactagcctgggcaacatggcaagaccctgtccctataaaaaatacaaaaattagccaggcatggtggcgtgcgcctgcagtcccagctacttgggaggctgagttgggaggatcacttgagcctgggaggttgaggctgcagtgaactgagatcacgacactgcactccagcctgggcaacagtaaaacctggtctcca

SEQ ID NO: 219449 - DNA, 207 bp, Homo sapiens
acttttctaacttggaccctattccaggtggtgcaattcttcattagatgagcacggcccactctgcacagacattcagcatcctggccttgcccgctaaaggccaatagcaatccctggtcattgtgacaaccccgaatgcccacccatttctaaatacctgctcgcaggctggtgctgcctctagttgagacaagaacctaggct

SEQ ID NO: 219450 - DNA, 563 bp, Homo sapiens
actctttggcttctgtccaaatgactgtgaaaatagatttctctcaatatccaccaatattacctgtttctgtccatatatgtatttaaaccctgttgaaagaatttattgatacaaatcaatttttaagggcttcagtataacggaacctttttctaccacccttttggtttatttttccaaactaagccagtatagatttgaggtttagggaaaataggcacttctttttaataagaatgtgggctaaaacagatcttatggttcaaatatttacaacttaaggaggcaaagagatttgataggaaatagacaaggtgatgtgtcctctgacaggtacacaaatcaagagaatatgacaggtccttgggaatgattgtgtcagtgttcgcttcccatccttttattctgaaagttcacagtaggggaatgtgagaaccaaaatgcatatgctaggtcagggactgggacactttctctgtggagagccagagaataactattttaggctgcgtgagccatacggtctctaggacaacagctgagatagacatttgtaaatg

SEQ ID NO: 219451 - DNA, 172 bp, Homo sapiens
ctcgtggtctcaggcttggggtgaggaaaaaggcgaagggaagggagaaaatccactgagtctaatgtgttcccactttattctcactccagaactccccatgtagagaaaagagaagagtgatttctggcagggcagggagtaaataaaggaaagttctatctttgaatca

SEQ ID NO: 219452 - DNA, 414 bp, Homo sapiens
aaggatggagatctgggtttcttgtatgctgaagagcacttgagagagactggtttgtgtatctaattgatgagaaaggcctagttaataaatgtccataaatgtagccaactttattgcaagccatgctgcccccaaaatagccctaagagttgtacctgaccaaataactcagtccagttttacaggatgtgaagactgagtattccatccccagacaatgcaatttcagttatctgagtttttaatcctgactgggatgagagaaggctgagtgatagaagtatctgaatatgtggtattattcctcctgcaactcagggaaaaacagagaaactggcaaagtgaacatcctatttaaaaaagaaaaaaggaaaagatgtgtttcatctgatcttgaaaaacattaactag

SEQ ID NO: 219453 - DNA, 457 bp, Homo sapiens
cctggagcttgtggaggctctgaaacaaaggagtagccgggccagatttgttttagaaagattccttaggctgtctggagtcacagagtggctgggcccaattgtccaggaagatgatcaaggcctgaaccaaggcaggtgacatggagagggcaggttgaggagaagataaacccaagacatagtgtgggagatgaggaagagagtggagttgacaacaacctccagggctgctgcaggcagcggcactccttccatttctcaggatccactacaccagccacttaaaccagccagtctgcagagcatgtggcccagcacccaaatcctcaccagaggctgcaaggccatcccagtcagtagtagctctggacaacccaccactctccaagcctgggactgggctcctttcctgccaggggaatggttgggggcctctgggaaagggcgaggcctc

SEQ ID NO: 219454 - DNA, 206 bp, Homo sapiens
gaagcacattatataggcgatatatttagggcagaggagtggcagatttactgtgctcatgtcatttttttcttaagctaatatttaaattatatggaacctccccccatccttcacatttttagaagtgtgcaatggctagttgggaaaagttagcttgtaaatttaaatcaactagatgtaattcactctgaataattcacata

SEQ ID NO: 219455 - DNA, 434 bp, Homo sapiens
ccattccattccattcccttccattccactctggttgattccattcctttccattccactcgaatacattccctcctattccactcggaacgattccattccattccattccattccattccattccattccattccattccattccattccatttcgttccattccattctattccgtatcattccattccattccattccattccattccattccattccattccattccattgtactcgggttgattcaattccattgcattccattccattccattccattccattccgttgcattccattccattacattcggattgattctattcaactcccttactctccattccattccattccattcgggttgttccattccattccattccattccactccattccattgcactcgggttgattccattccatt

SEQ ID NO: 219456 - DNA, 483 bp, Homo sapiens
ccattccattccattcccttccattccactctggttgattccattcctttccattccactcgaatacattccctcctattccactcggaacgattccattccattccattccattccattccattccattccattccattccattccattccatttcgttccattccattctattccgtatcattccattccattccattccattccattccattccattccattttgattccattccattccagtcctttccattccattccactcgggttgattccattctattagtttccattccattccattcccttccattccactctggttgataccattcctttccattccactcgaatacattccctcctattccactcggaacgattccattccattccattccattccattccattccattccattccattccatttcgttccattccattctattccgtatcattccattccattccattcc

SEQ ID NO: 219457 - DNA, 227 bp, Homo sapiens
aaaagaaatagccccatgtaaattctcctttaaataatctgcctttaatggtctctgttcaatttatatcctaaaaatgtattttgcatatgaccaagttgcatttctccctaaagtaggtgaaatctaattcttacttgaaaaaatggtatcctttctccatatgattgttattcagtgtttattgaagtatatttgttgattcaaaatgcaaaaagggagttttt

SEQ ID NO: 219458 - DNA, 478 bp, Homo sapiens
gctcagtaacaatagaggtaatggtgatattagtaagataataataataattatgacaataagagcagctgccacctacagagcagtccctttgtgccgggccctgtgctagactttcacgagtaatctcgtttgagcctcacagtactttgaggtaggtactatgattatccccatttttcagatgggaaaactgaggctaagagtggttaagccagttgtctgaggtctcatggcccggaaggggatgaggggcctgatttggggtctgtgtctggctcctcccctcactgtactgcattcctttggagctgccttgacgatcctcagcgaaggacagacgggctggggcagggcatggtatgaggagcccaggcaggaaccctgacccagagtcccagccctgccttctagtggctctgtgagttgggcaaaccatttaactccagtccgagcccaagtgattaaaagttcatcc

SEQ ID NO: 219459 - DNA, 195 bp, Homo sapiens
ctcacatgatcctaccatctcggtctcccaaagtgctgggattacaggtgtgagccactgcaaccagccagaaaaaaaaaaacagaggtggcaaggatgatcttaaggtctttagtctgagcaattagaaggacagagttgctaaacgtctcctgagtctcactttcctcatctgtgaagtgggaataaaaagag

SEQ ID NO: 219460 - DNA, 823 bp, Homo sapiens
tcatttatgactctggggagatttctgagcgagagctaggtgtcaggccctgttccaggtgctggagatgcacaagagaacaaaataggcaaagtttcctttttatggaacttatagcaggagaataaagataaaaacaagcaaaaatatttatctctgataagggcaatggataaaaataaagtagaataggccaggcacggtggcttacgcctgtaatcctagcactttgggaggccaaggcgggcagattgcctgagctcaggagttcgggaccagcctgggcaacacggtgaaaccccgtctctactaaaatacaaaaaattagctgggcgtggcagcgtgcacctgtagtcccagctacttgggaggctgaggcaggagaattgcttgaacctgggaggcggaggttgcggtgagctgagatcgcgccactgcactccagtctgggtgacagagagagactccacctcaaaaaaatttaaaaaagtagactaagagaaccaagcatcgctgggtgaggggtcttgttttaaagagttttctaggaagacctctctgagaaggcaccatttgagccaagacttgatgacctggctactgcatgaggatggaaggtggggaagctgatgggagcagcgagagaggtgggagcagttagaggctattgcagcagtccaggtaagaaggaatggtggcttggacaaggaggtggtagcagagatagggcagagatggccagattccagatgtattctgaaggtagagctgacagatttgctgagcaattggatgcagaataggagggaaccagaggcagtca

SEQ ID NO: 219461 - DNA, 388 bp, Homo sapiens
gtgtataccctgtgatattattcataatatcctggggagatgcaactgcctgatatcacagtgcatgtacccggtgtgtgtacacccttgatatcagtcgtgatatccagggtaaatatgactcctcatatcacacagtgtgcacaccctgtgatatttttcataatatttaagggagatagcgcttctaatatcaccgtgggtgtaccccatgtgtgtgtactctgtgacagtattttttatatccctagggaggtattactcgtaatgtcacagtggggtgttcaccctgtgatgtcattcttatttgaccttggcgccttttttaaaccaccctacaaaaggaatggaacagataagaagatgttgagattagactgtgctgcca

SEQ ID NO: 219462 - DNA, 439 bp, Homo sapiens
ttaaatggttgcagaggctttcattcatgaagttcaagtttactatatcatggtatgtcaggaaaaaaaaaatcatgaccctctgtgataaattaaatatcacaaccacgtaaatgtcatcttttcaatgaaactgaaagtgcataggaatgggactctttttcagtctgttttggctttaagctgtaagaaaaatattttaacactgacagtagtaaacctatgaagctaaagaacaaagccatactctccccagctttataagtcacacgcggaattgtgaattaaattattctaattgcaaaatttggggtcttggccgaaagaacacaggttgaatttgaagaagaggcagctagaaaaatcggtgtaacttttacatgaagataatttgcacagaatgtaattgaaagagaataaatatggagctccatgatgt

SEQ ID NO: 219463 - DNA, 464 bp, Homo sapiens
agccgaacatttctgtacaagtgtgtctaacttgccaggaacattcattttacctttcagattactgagtagtacaagaaattaagagtggaatattatgtagatatacacacaagtggcttatctggagcagatctctgcctttttctcttccctactgtatagagtaggaaaagattttgtgccctaatgctacaattccaagggggcagcagaaataagacaaatgagagaaaaacagaactaggaggccccaaatacatttaaaattagaggtctatgaatcctgttatttttcagctgataggaaatctccccttgtcaggttatcattttaagtaatatcaattcagatgacaactggggcatttttgtttttttgagacagtctcactgggtcacccagtgcactctagcactctagcctgggtgacagagtgcgacttcctctcaaaaaaaaaaaa

SEQ ID NO: 219464 - DNA, 303 bp, Homo sapiens
tcgacgcgcactactccaatgtaagataggctagacgtatgacaatcaattaatacactacattaacaggataaaggacgaaagccaaatgatcatctcaactcatacaacacaaaaactcagcactacaattccacatacggccaggtgcggtggctcatgcctgtaatcccagcactttgggaggccgaggtgggcggatcatgaggtcaggagttggagaccagcctggccaacatggtgaaaccctgtctctactaataatacaaaaattagctgggcatggtggcaggtgcctgtaat

SEQ ID NO: 219465 - DNA, 452 bp, Homo sapiens
ccgaaatattcttcagttgggtaatgtataaacaaattttggtacatctgtatggtggaatacatacaaccacatggatggatttcagatgtagtatactaagtgaaagaagctagcctcaaaaggctacatcttatatgattccattatatgacattctggaaaaggtgacagtctagtgacagagaacagatctggaaaaggtgacagtctagtgacagagaacagatcagtggtaagactgggggaatggtttgactagaaagcagtaaaatgaaggaatttggaaggaaggatgatcaactgttttgtattgtggtggttacatgactgtacatttgtcaaaactagtaccctaaaaagggcaactttcactactatacgtaaattatacttcaactttaaaaaagctgctacaaaaggataaattaaagtagaattgctgagtaaaa

SEQ ID NO: 219466 - DNA, 426 bp, Homo sapiens
ctatgtttcatgttgaccatacagctttgcctttttccagtctaggtttatgccagacattgtgtctgttattttccctttttaaagtgatatctgggctgagtgcaatggctcatgcctgtaatcccagtactttgggaggccaaggcaggcggatcacctgaggtcaggagttcgagaccagcctgaccaacatggagaaatcccatgtctactaaaaagacaaaattagctgggcatggtggcagatgcctgtaatcccagctattcaggaggctgaggcagaagaatcgcttgaacctgcgaggcagaaattgtggtgagcagagatcacgccattgcactccagcctgggcaacaagagtgaaactctgtctcaaaaataaataaataaataaaataagtgatatctgtgatatctggcca

SEQ ID NO: 219467 - DNA, 405 bp, Homo sapiens
  misc_feature (114)..(115): n is a, c, g, or t
gcaggattgcccatgaatgaacatgggtgaaatcgttggatcagctcagtcttgcctgtgcttaagcctggaaaaaaataaatggtgcttcacagtggattactacaaccttanncattgtaatcctttcattaagacccataacccaacacccagtattatggaacttactgaccccatccaatcaacaactgatttgatgttttgtcattttaaaggatactagacaagaggatctcaatttggatcactatattgggctcctaatatcctaatataattttaaatcatctcaaacaatgcattattaccatatacatcagcatttcccaaactgtgctataagctatgtatacttttgctatttttgagctaaaatatgcttacaaatatataaaaatataa

SEQ ID NO: 219468 - DNA, 479 bp, Homo sapiens
atatggcctttcttggtgcatgtatgtatgtcgagagggaagatgggagagggagctctaacctgtttctcttctcacagggacgctaatcctatcatgggggccccaccctcatgacctcatttaactctcaaaagccccacctctgaaaccatcccactgggggttggggttttaacataaattttggggagacacaattatatagtctgtaacacggactgagttataaccctgtagtcaggatactccattcctttgcctagagatgcttgtaagccctaggtgaattgttacacttgtcctgagggcagggcagtggacaagtcacatggcttatcagtgatgaggcttggggggtgccatccacccagccagccaggacattggtgtctggattttagccacagtgaaaaacaagggtgaattgcttaatggctgcaatgctgggcaactgaccaacttcattcatgacttaa

SEQ ID NO: 219469 - DNA, 718 bp, Homo sapiens
ggctaactcaagtagacagtgcaatggcccagaagaagatgaacaaagagaacaaagctggcaggagctggaaggcttgaggaggggaatccataggcttggaagaaattaatatattctgggaaaagcagtgatggcaaaataatttgggaaaatcaattcagaaaaatttttaaaaactaatatgtgcctatcactatgctaggtgctctgaacaatataaatgtgttatcagacaaggttcctgacctcataggcaatcatacgtttagaatgatacattctacaaattgaaatgttgcaaaaagttcttttaggataacattacaaaccagcatttcaaaagtctgacttccctccccaaaccttctgcaaaaataattttgtatttaatgcatttgagaattattttcttcagaattgttttccctgtgaaaataatttttaatatgctgaaacttggtgtatgtgaagcagagggtaggagagcatggaattcactttttagcccttactaaaattcattcattctgtaaagttaggttttccagactatctggttcaaggaagatgacaaaagtctttgtaaggtctggtcatagattttcagggagactgatgtgcaagaaacctccatagcttcttgatcatttatatttcacctttttccccagaaagaatttaagacaacttaaggcagacactggacagcaaacgg

SEQ ID NO: 219470 - DNA, 430 bp, Homo sapiens
ggtttctccatccacaggtcacatagcagctatattttcttccttttcaccatttgtcatttgaatgttaacaatgaacttttgaatctacctgtaattgattttgctatataaatgtgtcagtagacttatttgggagctttggtttattctgtcttcatttgtttggtacctttgttgaggtacacatcacgtatcacaaagtgtacaattcactgattttgggtacattcatagagtcgcgttaaccatcaccacagtccatttcagaatattttcatcatcctgaaaaagagccgagtacccattggcactcatttccattttcccccatcagtccacggcccctggcaaccagtaatcagctttctgtctctatgaatttgactgttctggacatttcaaataaatggaatcatacatggtgtgg

SEQ ID NO: 219471 - DNA, 682 bp, Homo sapiens
gacacaagaacaccagtggagtgttgaagcctcccactagtgtatttctcaggttcttaggtttagtagtagtttttttatgaatccgggtgctctgatgttgcgtgcatgtatatttaggatagaccttgatgactgtgtgccttggtgatattcatcttgcatagcatctctcaagtgttctctgaatttcttgtatctgggtgaaaaacatggaacaattcatgaattcacatatcatccttgcatcttatagccagagaagtttattcctttaattaataagacctgaaataatacttactaaatatgaaataaatatatgactaccatctaaaaaatagttctcggttaggggtatgctcctttctttcatgcctggctatgagatgagtggttgaatcagctgtaagaaacatagtggtaggaagtcacttttaacaccgcattgttaatgggcagagggaaagaagcagagtcctggaagttggtaacagacttagaaccacagatatagaaaacttgaatgttctaagtcccttgagggattttgtattgttcatttggtgtctaagaaaactaaatgttatactttcagcacagatttgttgaattgatttagattgaattgaagcgtggtggttttgtaagaattctaccatttattcctaagcatctagtt

SEQ ID NO: 219472 - DNA, 430 bp, Homo sapiens
cttataagtattttttaaaatcttcatttgcacctggaaaatagagctcagagaagttatcagagaagatataattaactccccaagcatgaaacaacttaagaagtggaagaggcaaggtacagggctagaatgattaactctaaaattcttattccttacacaatgattctaaatcatttctaacctagagaaacctcaggaggcccaaagtttctatctgttcgaagaagaatctggaaatggctctggatgccccatccatatcaattttgcagacccgtctggagctctgttgcagtggaagaagctgcataggagaaaggatgaatgagagggctgaacacaagaacacagaagggactgaagcctccacttttccccacctctgcctattgccacagtatctggattaaaactctatgcattg

SEQ ID NO: 219473 - DNA, 426 bp, Homo sapiens
tgatcagtgaagtgaatctacagttaagattgaaagaagtggtaggagccccatcacagggtggaaatgcagatctcagggcccctggagtaaaaatgtgggtcaacaaaatggtaaaattaaaatacacacaatagaccacatgtggtggctcacacctgtaatcccagcactttgggaggctgaggcaggtggatcacctgaggtcaggagtttgagaccagcctggccaacgtggtgaaaccccgtctctactaaaaatacaaaaattagccggacatggtggtgggcatctgtagtcctagctactcaggaggcttaggcaagagaatcacttgaacctgggaggtggaggttgcagtgagccgagattgcgccattgcactccagcctgggaaaaaggagtgaaactatctcaaaaaaaaa

SEQ ID NO: 219474 - DNA, 272 bp, Homo sapiens
gtcaatgggaaaagggtggcgtggactgggctggaggctggtaacaggcgatgaggacaggtcctgggcgggctctgagctgccttttgagcttccagctcagtgctccccacaccatggttctggctctccctgaacttcattcttcactctgctaagttagctgctacctgtctgcgatcactgcctcttggaagcatatcctgaccccctgaggtgcatcaggtacctcccctgggctcctagcttccccacctagcaagaagtcacct

SEQ ID NO: 219475 - DNA, 992 bp, Homo sapiens
aatgccaaaaaaggtctggaatgaggtgggcactcagatgctttattaaccactctaggtattattctaacactttatgtgcctattaaattatcccgacatattagatttgctgaattgcagtccatatttcgtagatatgatagctgaagcacggaatcattaggtaacttgcccaaagtggcattcacgactcataaatggcttaggatgtaaactcagttttattccctgggacgccctctctgctcttcagcacttgaagttcaggcagcgagagttgacatggggccagggctgcgcccctggggcgggttgaagacagggtgagtctcttgatattcaggaaatcatcgcgcacccagtcaccagcgttcgggagcctgtcgcagcgggaccgacggaatccggagcaggcgacagggcgcagaagcgggatgtacttctgttggggcgccgactccagggagctgcagcgccggaggacggcgggcagccccggggctgagctactgcaggcggccagcggggagcgccactctctgctgctgctgaccaaccacagggtcctctcgtgcggagacaacagcaggggtcagctgggccgcaggggcgcgcagcgcggggagctgccaggtgagcggggggccccaggtgcagggtgtgaggaccccagtacatgggcgcgggggcttgggtaccgggcgcagggaaccgggtgcggagcgctgggacccgggtgaggggcgcgggggcccaggtgcagggagcggctcagatgctgggcgccgcgggccaggcagggaggggtgctgggagccttggattcctcggggcccgaagagccacaggaaccaggaaaatggtgccctgtgctaccgaagagcaacttcctcagtttcgttttcccaacgcccctcggatttgtttcggtttccaattcaagttcaaagcgaaactgagagccgaaactaacctggtcagcgctgctc

SEQ ID NO: 219476 - DNA, 1354 bp, Homo sapiens
aatgccaaaaaaggtctggaatgaggtgggcactcagatgctttattaaccactctaggtattattctaacactttatgtgcctattaaattatcccgacatattagatttgctgaattgcagtccatatttcgtagatatgatagctgaagcacggaatcattaggtaacttgcccaaagtggcattcacgactcataaatggcttaggatgtaaactcagttttattccctgggacgccctctctgctcttcagcacttgaagttcaggcagcgagagttgacatggggccagggctgcgcccctggggcgggttgaagacagggtgagtctcttgatattcaggaaatcatcgcgcacccagtcaccagcgttcgggagcctgtcgcagcgggaccgacggaatccggagcaggcgacagggcgcagaagcgggatgtacttctgttggggcgccgactccagggagctgcagcgccggaggacggcgggcagccccggggctgagctactgcaggcggccagcggggagcgccactctctgctgctgctgaccaaccacagggtcctctcgtgcggagacaacagcaggggtcagctgggccgcaggggcgcgcagcgcggggagctgccagaaccaattcaggcattggaaaccctaattgttgatctcgtgagctgcgggaaggagcactccctggctgtgtgccacaaaggaagggtcttcgcatggggagctggttctgaagggcagctggggattggagaattcaaggaaataagtttcacacctaagaaaataatgactctgaatgatataaaaataatacaagtttcctgtggacactaccactccctggcattatcaaaagatagccaagtgttttcgtggggaaagaacagccatgggcagctgggcttggggaaggagttcccctcccaagccagcccgcagagggtgaggtccctggaggggatcccactggctcaggtggctgccggaggggctcacagctttgccctgtctctctgtgggacttcgtttggctggggaagtaacagtgccgggcagctggccctcagtgggcgtaatgtcccagtgcaaagcaacaagcctctctcagtcggtgcactgaagaatctaggtgtggtttatatcagctgtggtgatgcacacactgcggtgcttacccaggacgggaaagtgttcacatttggagacaatcgctctggacagctgggatacagccccactcctgagaagagaggtccacaacttgtggaaagaattgatggcctagtttcgcagatagattgtggaagttatcacaccctggcatatgtgcacaccag

SEQ ID NO: 219477 - DNA, 449 bp, Homo sapiens
gaatttacttccttcagacatttagaatggacttaaggtcttgattcaaaagaccattggaggagacaagaaatctggatgatccttctttttgaagaaaagtgctgtcttaaacttgtgttaaattaataatctgcagtggtggttggggggtgttttgttttgtttcccaaagaaccaattcaggcattggaaaccctaattgttgatctcgtgagctgcgggaaggagcactccctggctgtgtgccacaaaggaagggtcttcgcatggggagctggttctgaagggcagctggggattggagaattcaaggaaataagtttcacacctaagtaagtgtttcaacccactccttcatttattcaatatatatagtaccatgtgccaggcactgtgcaagatgccaggatacaaagacgactgcttggattacaaggaggggatct

SEQ ID NO: 219478 - DNA, 1737 bp, Homo sapiens
gtgcattgttaacaatagtcttacttataaatttgctcaaggtcagttaagtaacaaatgagctgtaataacccagatcaacctgactgcaggggcttccaggaagcctcctctgattccctacccatgccatacactcacttagaccctactctcctaggagaacagattagtgctgcccagaagctggggcaggacattagtttcctattgtcactgtaatgaattaccacaaagtggctcaaaaaacaaaattattatgttacagttcagaagtccaaaatcagcttcaccaggctaaagtcaaagtgttgacaggtctacactccttccgtgggctccagggaagaatgtttccttgctttttccagcttctagatgctgcttgcagtgcttgattcgtggctcttttcaccatcttcaaagccagcagcagagcatcttctctcctctctaacctctgtttccatccctacatctctctaattctactgcctctcacttgtaaggattacattgggtctactgggataattcagtatcatcttcccattggcaagatccttaattaaatcctgccttcaaagtcccttttaccatttaagataaaatgttcacaggttaagcagctggtgagtgtctgtagtcccagctactcagggggctgaggctggaggatcacttgagcccaggagttcaggccagcctgggcaatatagtaagactcttctcttaaaagaaaatttatatttatcctcaggtcctggggattaggaattggacatctttgggagaggggcttttagcctgacacaggcagggtggaaagtgggcaggaggatgcacccaggcccagaatgaacctctgtgctttgtccagcctcccctagcctggaatgagaggtggtaccaaggcggaggtggcaggtccagaccccatgtctagagaatgtcaaatgcctcctgtaccatcaccaccagggagagccaaagatgaagatcaggcttaggagaaagcctcagtttaggaatcgttttagacctgagaccttcctggtaaccacagtggaggattcctcaacactgtctcctctccagaaccattctgtgctcctattccccaaggctgaagataattatattcccagtgaactaacctgggttctctctggaaagggcagattgattagttgtcttctttttaaattgttatttttaattatttaatagttaaaccatgcttctcatagcatagtgaattccatcaccaggcccctttcttattttattttcttcttttttaaaaaaattttagactgggcacggtggctcatgcctgtaagtcccagcactttgggaggccgaggaaggtggatcacctgaggtcgggagttcgagaccagcctggccaacatggtgaaaccccatctctactaaaaatacaaaaattatctgggcatggtggcgcatgcctgtagtcccagctgctcaggagctgaggcaagagaattgcttgaacccaggaggcagaggttgcagtgaaccgagatcatgccactgcactccagcctgggcgacagagcgagactccgtgtcaaaaaaaaaaattattatttttttaagagactgggtctcactgtcacccaggctggaggacagtgatgtgatcttggctcactgtaactttgacctcctgggctcaagcaatgctcccacctcagccttctgagtaggact

SEQ ID NO: 219479 - DNA, 627 bp, Homo sapiens
ctaggtggagacgtcgacgttaatggcagtggaatcatatccgcagaaggactcaggaattgacattggggacatcactgcaaggaaggctctcaggaaacagctgcagtgcaagaccttccggtggtacctggtcagcgtgtacccagagatgaggatgtactccgacatcattgcctatggagtgctgcagaattctctgaagactgatttgtgtcttgaccaggggccagatacagagaatgtccccatcatgtacatctgccatgggatgacgcctcagaacgtgtactacacgagcagtcagcagatccatgtgggcattctgagccccaccgtggatgatgatgacaaccgatgcctggtggacgtcaacagccggccccggctcatcgaatgcagctacgccaaagccaagaggatgaagctgcactggcagcctctcagggagtgacccatccagaaccgaagtccaagcgctgtctgaagctgcaggggaatagcgacctggagttcggcttcagctggtgttgcagacgtgctcgggccagcaagggagcatcaccaacgtgctgaggagcctcgcgtcttgacccagcggggccacttccgtgtgcctcttgctac

SEQ ID NO: 219480 - DNA, 2281 bp, Homo sapiens
  misc_feature (10)..(10): n is a, c, g, or t
  misc_feature (167)..(167): n is a, c, g, or t
agcggggttntcctagcagcgcgggccggtcggaccgccaaggcagccggcgctggcgatgggaagcggcgtggccgccgacacaggcagtggcaaagtttcccagacgtacacatctggacgcgcggctgccggctacccgtgacccctctaggaagggttcaggnatttttaatttggaaaaaaatccacctggtttcctttgtcaaggtctctccgggtggccagcggcaggagctgcaaacttgggcacggcggctacaccggcagcggaccgggctttggagaacctcgggactcaggtgctgaggtgcccagcggctccggacgtgctacggggtgcgagcgcgggggagttcggggcgcacgacaaggaagggcccccgggagctctatatggaggaaggagcccagaatggtgtgcaccaggaagaccaaaactttggtgtccacttgcgtgatcctgagcggcatgactaacatcatctgcctgctctacgtgggctgggtcaccaactacatcgccagcgtgtatgtgcgggggcaggagccggcgcccgacaagaagctggaggaagacaaaggggacactctgaagattattgagcggctggaccacctggagaatgtcatcaagcagcacattcaagaggctcctgccaagcctgaggaggcagaggccgagcccttcacagactcctctctgtttgcacactggggccaggagctcagccccgaaggccggcgcgtggccctgaagcaattccagtactacggctacaacgcctacctcagcgaccgcctgcccctggaccggcccctgcctgacctcagacccagtgggtgccgtaacctctcatttcctgacagcctgccagaggtgagcatcgtgttcatcttcgtcaatgaagcgctttcagtgctgctgcgctccatccactcggccatggaacgcacgcccccacatctgctcaaggagatcattctggtggatgacaacagcagtaacgaggaactgaaggagaagctgaccgaatatgtggacaaggtgaacagccagaagccaggcttcatcaaagtcgtgcgtcacagcaagcaggaaggcctcatccgctccagggtcagtggctggagggcggccactgcccctgtggtggcactctttgatgcccacgtggagttcaatgtgggcttctctgcacagggctgaacctgtactcacccgcatcaaggagaaccggaagcggatcatctcgccatcctttgataacatcaaatatgacaactttgagatagaagagtacccgctggctgcccagggctttgactgggagctgtggtgccgctacctaaatccccccaaggcctggtggaagctggagaactccacagcgccaatcaggagccctgccctcattggctgcttcattgtggaccggcagtacttccaggagatcggcctgctggacgaaggcatggaagtctacgggggcgagaatgtggagcttgggatcagggtgtggcagtgtggcgggagtgtggaggtcctgccctgctcacggattgcccacattgagcgagcccacaagccctacacagaggacctcaccgcccatgtccgcaggaacgctctcagggtggctgaagtctggatggatgaatttaaaagccacgtctacatggcatggaacataccgcaggaggactcaggaattgacattggggacatcactgcaaggaaggctctcaggaaacagctgcagtgcaagaccttccggtggtacctggtcagcgtgtacccagagatgaggatgtactccgacatcattgcctatggagtgctgcagaattctctgaagactgatttgtgtcttgaccaggggccagatacagagaatgtccccatcatgtacatctgccatgggatgacgcctcagaacgtgtactacacgagcagtcagcagatccatgtgggcattctgagccccaccgtggatgatgatgacaaccgatgcctggtggacgtcaacagccggccccggctcatcgaatgcagctacgccaaagccaagaggatgaagctgcactggcagcctctcagggagtgacccatccagaaccgaagtccaagcgctgtctgaagctgcaggggaatagcgacctggagttcggcttcagctggtgttgcagacgtgctcgggccagcaagggagcatcaccaacgtgctgaggagcctcgcgtcttgacccagcggggccacttccgtgtgcctcttgctac

SEQ ID NO: 219481 - DNA, 401 bp, Homo sapiens
tctaggtgatcttggatttggcaatgacttcttagctacaacaccaaaagcaaaatccataaaataaaaaatatatatagttgagctttatttaaattaaaaacttctgctctgaaaaatacaagagaatgaaaagataagccacagagtgggagaaaatcttttcaaaggacatacctgataaaggactgatattcaaatacacataataaactatttgaacttaaagataagaacacaaacgacctaattaacacattagcaaaacatgtggcaggcacctgaccaaagaagacacataaatggcaaataagcctatgaaaaggtgttcagcaacatatgctattagtgaactgaaaattaaaacaacaagatactaatacatatctattagaatggca

SEQ ID NO: 219482 - DNA, 547 bp, Homo sapiens
ttatattgttatagtatctaattcattgtttgaacaagatgaacattaaaaatgataattatatgtataatcagtttataccaaggttgttagagtgaattgtttactggagatatgaggggtgattatcatatcactctagcctcatatactatgatgttagtaattcttagagtaatatgtttataaaaactccacaagatgtaatctgggtgaggagtttgcaagctgagttggcatgatttggataagactgaatccaaattagtaagttaaatgtagaatacacagctaggaagactgagggtcacttgagctgcatatggagactgtgggctaagataggtaacgagattttcacaggtctcagtatacaagtcctagactcagcagattaccatccaattccgtattaacaccttgagctctcgtacagtcttttgttttttttaaatcaagttttcccttgtaatggtagagtaaacataaatttcacacttatgggatgagcatacttcacaaaaggaagcaaagctccttaatgggg

SEQ ID NO: 219483 - DNA, 791 bp, Homo sapiens
atccctgtggcccacacagctgctgtgctataccatcttggaattggagctgtgactgaagtgtgtcttgctccaggggtgagtagtcatggctcccctttgtccctaaggctaagctgccaccaaaccaccccagcacagtggccccacatctccaggctgagctgggagcaactgttggctctgttcctcgggggccagcagagatggagctgctccacctgttcttcccccagctgctttggactggagctgaagcagtatcctgccttttgggaaaacagtaccttgaacactcagagcaatcatgcctccccagtgtctcagttgaagcagcgccacgcctcccaggaagtggtgcattggccatccagagtgatcacacatcccagtacctaagctgaagcagctcccagcatcacagggaaatggtgcctggcccacccaaaagagtatgctccctgggcctgagctgaagcagcacattatcctttggggagttggtgccttggccagactgagcagttgtgcatgccagggatgagctgatatagtacaccatgtcccagagaaatagagcggtgactgagctgagacaccttgcccttacaggccgtagaactctagtaccctgcttgcttgaacctgtactagtcttcaagaagctcagctgcttagataaccttcctcttggagagtggaattatcactgtgctatcctcccctcccatgctgggtccacacaacagctctgctcccctaagctaggatacttgctgtcattgcactgg

SEQ ID NO: 219484 - DNA, 560 bp, Homo sapiens
agtacactctggagagctaatgcatgctatatatacatatatatgtgtatatatgtgtgtgtgtatgtatatatagcctgtgaatatggtgcagtggtaaacctacttaattcaaaccttttagtgacagttatgctagttgtacctcttgtggcatttttcatttcctcgccttaattgcattttacccattttttattactgtaagatacttttgctttttttgtctccttgaccgggagaagataaaatattgtatagatttgagtttttgctgagacttgaagttccatatttagactatcttcttgaaacttggggagaaattttaacttgtctttcctgtactcctaggaagaattttggtagaaagttggcttatggccgggcgcggtggctcacgcctgtaatcccggcactttgggacgccggggtgggcggatcgcctgaggtcaggagttcgagaccagcctgaccaacatggcggaaccccgtctctactaaaaatacagaaattagctgggtgtggtggtgggcgcctgtggtcccagctactcggg

SEQ ID NO: 219485 - DNA, 515 bp, Homo sapiens
cacagaaactcagttttaagtactaaggaaacagggaaggatcttcaacaaaggcgccgaagctgaaaattactctaacataactctgttccttatccttttatagaaaacatcactttttttgttctattaaacagcacccccaattttcataaaatctataaagggaaaaactgtatttcagcctttttaaaaagtagcgagggtgcaatgtaccaaatctgtgactacaacagcttcacataaacaggctcgctattaaatgaccaaagatcaagtatacatcaattctgttttctgagttataaaacacaataaaactaatcagtatctgatacaggtactaacttggtccttccagccatagctttacaaaggggtcttacggctgagtgtggtggctcatgcttgtaatctcaacactttggcaggcctacgcaggaggatcacttgaggtctggagtttgagaccaggctaagcaatatatttgagaccgtgtctctaaaaaaaaaaa

SEQ ID NO: 219486 - DNA, 435 bp, Homo sapiens
ggggccactgggaagccaagcccttgtggcgtcggaggaggcgttttccgggttcgagttgggaattactcacagtccggaaatggcaatttatttagggttgtttatctgtttggaaagctctcttacccctttgaaaggagggggcttaactatttggtaacttattttcttggaacatcaaattaaaaccaaaccttgaaagttaagctgttccctctagggagacatttttatatatttaagatgggcttagactgttagggcttgtgagaacttattttaagacggggaggaggcgagagcgttcataaccaaaggaaacactgcgtgatgtctacatgttccaagagactgaaaatggatgtgacatgtgtggaaagattggaaaattctggtgggagtttaaaaacacggtctctttagaaaatccgc

SEQ ID NO: 219487 - DNA, 771 bp, Homo sapiens
aaaaccaagctggcccaaggtgtcatgcagcctgtaatactgtttaatcagagtgccattttttttttgttcaaatgattttaagtattggaatgcaaaattttcaaaaatatgcaaatagaagtttaaaaacttttttaaaaaaagggggggactcctctttttaaaaccatcagatctcaggagacttattcattatcacgagaacagcctgggaaaggcttgcccccatgattcaattacctcccactgcgtccctcccacaacacatgggaattcaagatgagatttgggtggggacatagccaaaccatatcaaatccccacccctagaagaaaattgctgccattttctgaacatacctcatatgaagaagcatgtttatgatctgtaactgcacatctggagttcctccctgtacatgcttacatacatacctccccgccccacatctaattccttaaagttccctggattccatcaccttcggaaggggttctttagaaaaagagctcactcctccgttcctgaccagcaataaaatctgcttgcctttttttccaattggatattctttcttggctatcaatacaaagtaaggaaagaacttggtttcccagtgacagaaggaaataaaggatgaccaaaataaattgagggatatactgtatatatgattgggaagaagcaatgtagagatgcaagctcctctgtgcccctaaaaatctatacacagaatacattttaataaaaatatcctataaaacaaa

SEQ ID NO: 219488 - DNA, 1895 bp, Homo sapiens
tcccctttctttttctttctttctttctttttctttctttctttctctttctctctctcttttttctttttctttaaggtggggaaagagacaaccaagagacaggaagctgatctgcaaggattcggagttgtgctaaaaggactttgattttttttccccctttacgaacgctggcaattgacatcactacagacagcctggttagagaacaaactgcctcatcccaagtggaccccggcagctgggggaagccaggcaagatctgggaaggctgtgtgtgggtgttttttctacagatctcactcctcgccctttttttttttttcctttggtgtgtgttttttgttttgttttgttttttaaaaaaattcttgctgtgttggaactagcgagtggtggagtctctgaagcctcatcagtcaccgggactgtcaggaatagtggtttaagaggaagctcggcctggggcactataccctgtcatccagttccctgcctcggagataaagattccagctacatgggcaaacgcctggatcagccacaaatgtacccccagtacacttactactatcctcattatctccaaaccaagcagtcctatgcaccagctccccaccccatggctcctcccagccccagcacaaacagcagcagcaacaacagcagcaacaacagcagcggggaacagttgagtaaaaccaacctgtacattcgaggcctcccaccaggcaccactgaccaggacctaatcaagctgtgccaaccgtatggaaaaattgtatctacaaaggcaattcttgacaaaaacacaaatcagtgcaaaggttatggttttgtagattttgacagtcctgcagccgcacagaaagcggtagcatctctcaaggcaaatggcgtgcaggcacagatggctaagcaacaagagcaagacccaacaaacctatacatctcaaatctccccatttctatggatgagcaggagcttgagaatatgctgaaaccctttggacatgtcatttccacaagaatactaagagacgctaatggagtcagcagaggtgttggctttgccagaatggagtctactgaaaaatgtgaagtggtaattcaacattttaatggaaaatatctgaaaacaccaccaggcatcccagcccccagtgagcctttgctgtgcaaattcgctgatggaggacaaaagaagcgacagaatcaaagcaaatatacccagaatgggaggccttggcccagggaaggagaggctggcatggctttgacctatgaccccacagctgccatacagaatggattttattcttcaccgtacagtattgcaaccaaccgcatgattccacagacatctatcacgccattcattgctgcttcccctgtctccacataccaggtccagagtacttcatggatgcctcatccgccatacgttatgcaaccaacaggtgctgtgattacaccaaccatggaccatcccatgtcaatgcagccagccaacatgatgggcccactgacacagcagatgaatcacctttcgttgggcacaacaggaacgtatatgactgctgctgctcctatgcaagggacctacattcctcagtacacgcctgtgcctccgacagctgtttctattgaaggtgttgttgctgatacctctccccagacagtggcaccttcatcccaggacaccagtggtcagcagcaacagatagcagtggacacatccaacgaacatgcacctgcatattcttaccaacagtctaagtaagtctgggctgtgctaagctcttttcctcaagatcagccatcttgacatcactctctcatgttgtatgtgttagcttttgctgaaatataaaccatcccaaacttagcaa

SEQ ID NO: 219489 - DNA, 2380 bp, Homo sapiens
  misc_feature (2082)..(2083): n is a, c, g, or t
  misc_feature (2087)..(2087): n is a, c, g, or t
  misc_feature (2091)..(2091): n is a, c, g, or t
  misc_feature (2094)..(2094): n is a, c, g, or t
  misc_feature (2100)..(2100): n is a, c, g, or t
tcccctttctttttctttctttctttctttttctttctttctttctctttctctctctcttttttctttttctttaaggtggggaaagagacaaccaagagacaggaagctgatctgcaaggattcggagttgtgctaaaaggactttgattttttttccccctttacgaacgctggcaattgacatcactacagacagcctggttagagaacaaactgcctcatcccaagtggaccccggcagctgggggaagccaggcaagatctgggaaggctgtgtgtgggtgttttttctacagatctcactcctcgccctttttttttttttcctttggtgtgtgttttttgttttgttttgttttttaaaaaaattcttgctgtgttggaactagcgagtggtggagtctctgaagcctcatcagtcaccgggactgtcaggaatagtggtttaagaggaagctcggcctggggcactataccctgtcatccagttccctgcctcggagataaagattccagctacatgggcaaacgcctggatcagccacaaatgtacccccagtacacttactactatcctcattatctccaaaccaagcagtcctatgcaccagctccccaccccatggctcctcccagccccagcacaaacagcagcagcaacaacagcagcaacaacagcagcggggaacagttgagtaaaaccaacctgtacattcgaggcctcccaccaggcaccactgaccaggacctaatcaagctgtgccaaccgtatggaaaaattgtatctacaaaggcaattcttgacaaaaacacaaatcagtgcaaaggttatggttttgtagattttgacagtcctgcagccgcacagaaagcggtagcatctctcaaggcaaatggcgtgcaggcacagatggctaagcaacaagagcaagacccaacaaacctatacatctcaaatctccccatttctatggatgagcaggagcttgagaatatgctgaaaccctttggacatgtcatttccacaagaatactaagagacgctaatggagtcagcagaggtgttggctttgccagaatggagtctactgaaaaatgtgaagtggtaattcaacattttaatggaaaatatctgaaaacaccaccaggcatcccagcccccagtgagcctttgctgtgcaaattcgctgatggaggacaaaagaagcgacagaatcaaagcaaatatacccagaatgggaggccttggcccagggaaggagaggctggcatggctttgacctatgaccccacagctgccatacagaatggattttattcttcaccgtacagtattgcaaccaaccgcatgattccacagacatctatcacgccattcattgctgcttcccctgtctccacataccaggtccagagtacttcatggatgcctcatccgccatacgttatgcaaccaacaggtgctgtgattacaccaaccatggaccatcccatgtcaatgcagccagccaacatgatgggcccactgacacagcagatgaatcacctttcgttgggcacaacaggaacgattcaatcccaagacaggattatgatactccaccagctgttgtgtcagtatatgactgctgctgctcctatgcaagggacctacattcctcagtacacgcctgtgcctccgacagctgtttctattgaaggtgttgttgctgatacctctccccagacagtggcaccttcatcccaggacaccagtggtcagcagcaacagatagcagtggacacatccaacgaacatgcacctgcatattcttaccaaaccataaacaggactgaagaatgtctgtctgaatctttgccttgaatgaagaaacttcattgaacaagaagttggcttccagtttgcacagacgtcaatggaatgcatttttgttgttgttgttgtagtttttttttagtgttataccttacccaatgaaagcaaagtttttatgtgctgtgcaaatggtcttcatgtggtctgacaatttatttttgccatcatttttttaattaaagaaaaaatttccagaagaggannaaanactncanaaacanaacattgaaggttgatattttatgtggaagaacatttgaattgaattcaaaatatctctgaaggtgtagatacttctttttttttttaacagaaaacctgatgtctagaggtgggcactataaacggaatccaattggcttgcttaataatcaagctgctttctctttacccctctttatttaacgcaggggggtgtatcattatccctttctatcaaaaccccagaaccggaaacactagacttcgttagccttcattttaggggcgcaaagggcctgg

SEQ ID NO: 219490 - DNA, 1782 bp, Homo sapiens
tcccctttctttttctttctttctttctttttctttctttctttctctttctctctctcttttttctttttctttaaggtggggaaagagacaaccaagagacaggaagctgatctgcaaggattcggagttgtgctaaaaggactttgattttttttccccctttacgaacgctggcaattgacatcactacagacagcctggttagagaacaaactgcctcatcccaagtggaccccggcagctgggggaagccaggcaagatctgggaaggctgtgtgtgggtgttttttctacagatctcactcctcgccctttttttttttttcctttggtgtgtgttttttgttttgttttgttttttaaaaaaattcttgctgtgttggaactagcgagtggtggagtctctgaagcctcatcagtcaccgggactgtcaggaatagtggtttaagaggaagctcggcctggggcactataccctgtcatccagttccctgcctcggagataaagattccagctacatgggcaaacgcctggatcagccacaaatgtacccccagtacacttactactatcctcattatctccaaaccaagcagtcctatgcaccagctccccaccccatggctcctcccagccccagcacaaacagcagcagcaacaacagcagcaacaacagcagcggggaacagttgagtaaaaccaacctgtacattcgaggcctcccaccaggcaccactgaccaggacctaatcaagctgtgccaaccgtatggaaaaattgtatctacaaaggcaattcttgacaaaaacacaaatcagtgcaaaggttatggttttgtagattttgacagtcctgcagccgcacagaaagcggtagcatctctcaaggcaaatggcgtgcaggcacagatggctaagcaacaagagcaagacccaacaaacctatacatctcaaatctccccatttctatggatgagcaggagcttgagaatatgctgaaaccctttggacatgtcatttccacaagaatactaagagacgctaatggagtcagcagaggtgttggctttgccaggtaaaattctttctttgtatgtaatcgttctttcctcattgttccttttaaattccattccttttttagtactagagcccaaagcaatagaatatgcaaaaaaaaaaaaaaaattaaaagtagcttatcaaatctgtcatccctctgtgtctttgcttggagctaaataatttcaatgtaattataaataaactgtgcttgttcaaatgtcaaaaaaaaaagaaaaaaaaaaaaaaaaaaaaaaaaaaaaaaaaaaaaaaaaaaaaaaaaaaaaaaaaaaagaaaaaaaaaacaaaacaacaagggggggggcgcgccacaaaagcaacacccacgggagggagcacacaaatgaagagagacacacgggttatcagaaaagagcgagccccacatagagagcggcatataatatacgacaacaagcgagagcccctaaaaacaacggacgaggaagggaaaacacccagcacgtgcaccagcggcagcaaagccgggggacaaaaaccacacaacagcggggggcaggacaccacaatacgcgaaaacaccacaccacagagagatatcaacccgcaccgcgcagagaaaaaaaaaaacgaaagagagagaaagagacagaaacaaaacggacaaataatacgacaggtagagaaaaaactgtcacacgacgataagattgctagcaaaaaatcaacaccg

SEQ ID NO: 219491 - DNA, 1943 bp, Homo sapiens
tcccctttctttttctttctttctttctttttctttctttctttctctttctctctctcttttttctttttctttaaggtggggaaagagacaaccaagagacaggaagctgatctgcaaggattcggagttgtgctaaaaggactttgattttttttccccctttacgaacgctggcaattgacatcactacagacagcctggttagagaacaaactgcctcatcccaagtggaccccggcagctgggggaagccaggcaagatctgggaaggctgtgtgtgggtgttttttctacagatctcactcctcgccctttttttttttttcctttggtgtgtgttttttgttttgttttgttttttaaaaaaattcttgctgtgttggaactagcgagtggtggagtctctgaagcctcatcagtcaccgggactgtcaggaatagtggtttaagaggaagctcggcctggggcactataccctgtcatccagttccctgcctcggagataaagattccagctacatgggcaaacgcctggatcagccacaaatgtacccccagtacacttactactatcctcattatctccaaaccaagcagtcctatgcaccagctccccaccccatggctcctcccagccccagcacaaacagcagcagcaacaacagcagcaacaacagcagcggggaacagttgagtaaaaccaacctgtacattcgaggcctcccaccaggcaccactgaccaggacctaatcaagctgtgccaaccgtatggaaaaattgtatctacaaaggcaattcttgacaaaaacacaaatcagtgcaaaggttatggttttgtagattttgacagtcctgcagccgcacagaaagcggtagcatctctcaaggcaaatggcgtgcaggcacagatggctaagcaacaagagcaagacccaacaaacctatacatctcaaatctccccatttctatggatgagcaggagcttgagaatatgctgaaaccctttggacatgtcatttccacaagaatactaagagacgctaatggagtcagcagaggtgttggctttgccagaatggagtctactgaaaaatgtgaagtggtaattcaacattttaatggaaaatatctgaaaacaccaccaggcatcccagcccccagtgagcctttgctgtgcaaattcgctgatggaggacaaaagaagcgacagaatcaaagcaaatatacccagaatgggaggccttggcccagggaaggagaggctggcatggctttgacctatgaccccacagctgccatacagaatggattttattcttcaccgtacagtattgcaaccaaccgcatgattccacagacatctatcacgccattcattgctgcttcccctgtctccacataccaggtccagagtacttcatggatgcctcatccgccatacgttatgcaaccaacaggtgctgtgattacaccaaccatggaccatcccatgtcaatgcagccagccaacatgatgggcccactgacacagcagatgaatcacctttcgttgggcacaacaggaacgattcaatcccaagacaggattatgatactccaccagctgttgtgtcagtatatgactgctgctgctcctatgcaagggacctacattcctcagtacacgcctgtgcctccgacagctgtttctattgaaggtgttgttgctgatacctctccccagacagtggcaccttcatcccaggacaccagtggtcagcagcaacagatagcagtggacacatccaacgaacatgcacctgcatattcttaccaacagtctaagtaagtctgggctgtgctaagctcttttcctcaagatcagccatcttgacatcactctctcatgttgtatgtgttagcttttgctgaaatataaaccatcccaaacttagcaa

SEQ ID NO: 219492 - DNA, 1073 bp, Homo sapiens
tcccctttctttttctttctttctttctttttctttctttctttctctttctctctctcttttttctttttctttaaggtggggaaagagacaaccaagagacaggaagctgatctgcaaggattcggagttgtgctaaaaggactttgattttttttccccctttacgaacgctggcaattgacatcactacagacagcctggttagagaacaaactgcctcatcccaagtggaccccggcagctgggggaagccaggcaagatctgggaaggctgtgtgtgggtgttttttctacagatctcactcctcgccctttttttttttttcctttggtgtgtgttttttgttttgttttgttttttaaaaaaattcttgctgtgttggaactagcgagtggtggagtctctgaagcctcatcagtcaccgggactgtcaggaatagtggtttaagaggaagctcggcctggggcactataccctgtcatccagttccctgcctcggagataaagattccagctacatgggcaaacgcctggatcagccacaaatgtacccccagtacacttactactatcctcattatctccaaaccaagcagtcctatgcaccagctccccaccccatggctcctcccagccccagcacaaacagcagcagcaacaacagcagcaacaacagcagcggggaacagttgagtaaaaccaacctgtacattcgaggcctcccaccaggcaccactgaccaggacctaatcaagctgtgccaaccgtatggaaaaattgtatctacaaaggcaattcttgacaaaaacacaaatcagtgcaaaggttatggttttgtagattttgacagtcctgcagccgcacagaaagcggtagcatctctcaaggcaaatggcgtgcaggcacagatggctaagcttcaagagcgggacccagctgtgactaagcgtctcaagtctgttacttttctatgtatgagcaggagcttgagaatatgctgatatgcatatgggaatgtcggtttgtcacgagtacttagaggggaatcctctagggtcggccgcacgg

SEQ ID NO: 219493 - DNA, 1282 bp, Homo sapiens
tcccctttctttttctttctttctttctttttctttctttctttctctttctctctctcttttttctttttctttaaggtggggaaagagacaaccaagagacaggaagctgatctgcaaggattcggagttgtgctaaaaggactttgattttttttccccctttacgaacgctggcaattgacatcactacagacagcctggttagagaacaaactgcctcatcccaagtggaccccggcagctgggggaagccaggcaagatctgggaaggctgtgtgtgggtgttttttctacagatctcactcctcgccctttttttttttttcctttggtgtgtgttttttgttttgttttgttttttaaaaaaattcttgctgtgttggaactagcgagtggtggagtctctgaagcctcatcagtcaccgggactgtcaggaatagtggtttaagaggaagctcggcctggggcactataccctgtcatccagttccctgcctcggagataaagattccagctacatgggcaaacgcctggatcagccacaaatgtacccccagtacacttactactatcctcattatctccaaaccaaggtatggcttgacccacggtctggcgatcagcgtggtatcgttctgcacttgggatgggaaacagacaggcgtgtgaattattagttaacccccacccccatcacttcttcctgcttctttgaaattagtgacataccaatggagttaatgaggcagaggaagacataagaagaaagcagcaaacccggaattgtagctttctctttaaggagagataatagtttcacttgagttcagtttctttgttgttatttggcagcataaatggtcctgatatcaggaacgtcttttgcagatgggcacggtttttagaaagcagatcacaacagtgattaccaggcacaagaatataatttcaggggcttttctggtgagctgttctttgattgtggctctaaaagggtttttcccactggataggacgtgcaacggtgggggtaactcaaacttttaatcgcagggtatagaatgaaagaagggtgtgagaaggtatagggctcctaccagagtctctgagagtttatttttatttttaatttgccttgcctattttattttatgttgaggatgatcagcatgctacagactgctttacaatagatgttctttacttttagaagatctatttttctgtgtagctgccatgaggaggcctgcctgcgaacctatgaggtccgctcattc

SEQ ID NO: 219494 - DNA, 1082 bp, Homo sapiens
aaggaatgatggatggagagcttggctttcattgatcattttgtctatgataaacattctgcacaagacatcagtaaaaagaagtaatgcccctagtgaaagcactttcaagagcattttggagattattatctagattgcagtttaaacaaaagtttctctatttgtacaatgtttctcaatactcagaacttaccatatttgttactttccttcccttagcaacaagagcaagacccaacaaacctatacatctcaaatctccccatttctatggatgagcaggagcttgagaatatgctgaaaccctttggacatgtcatttccacaagaatactaagagacgctaatggagtcagcagaggtgttggctttgccaggtaaaattctttctttgtatgtaatcgttctttcctcattgttccttttaaattccattccttttttagtactagagcccaaagcaatagaatatgcaaaaaaaaaaaaaaaattaaaagtagcttatcaaatctgtcatccctctgtgtctttgcttggagctaaataatttcaatgtaattataaataaactgtgcttgttcaaatgtcaaaaaaaaaagaaaaaaaaaaaaaaaaaaaaaaaaaaaaaaaaaaaaaaaaaaaaaaaaaaaaaaaaaaagaaaaaaaaaacaaaacaacaagggggggggcgcgccacaaaagcaacacccacgggagggagcacacaaatgaagagagacacacgggttatcagaaaagagcgagccccacatagagagcggcatataatatacgacaacaagcgagagcccctaaaaacaacggacgaggaagggaaaacacccagcacgtgcaccagcggcagcaaagccgggggacaaaaaccacacaacagcggggggcaggacaccacaatacgcgaaaacaccacaccacagagagatatcaacccgcaccgcgcagagaaaaaaaaaaacgaaagagagagaaagagacagaaacaaaacggacaaataatacgacaggtagagaaaaaactgtcacacgacgataagattgctagcaaaaaatcaacaccg

SEQ ID NO: 219495 - DNA, 1813 bp, Homo sapiens
tcccctttctttttctttctttctttctttttctttctttctttctctttctctctctcttttttctttttctttaaggtggggaaagagacaaccaagagacaggaagctgatctgcaaggattcggagttgtgctaaaaggactttgattttttttccccctttacgaacgctggcaattgacatcactacagacagcctggttagagaacaaactgcctcatcccaagtggaccccggcagctgggggaagccaggcaagatctgggaaggctgtgtgtgggtgttttttctacagatctcactcctcgccctttttttttttttcctttggtgtgtgttttttgttttgttttgttttttaaaaaaattcttgctgtgttggaactagcgagtggtggagtctctgaagcctcatcagtcaccgggactgtcaggaatagtggtttaagaggaagctcggcctggggcactataccctgtcatccagttccctgcctcggagataaagattccagctacatgggcaaacgcctggatcagccacaaatgtacccccagtacacttactactatcctcattatctccaaaccaagcagtcctatgcaccagctccccaccccatggctcctcccagccccagcacaaacagcagcagcaacaacagcagcaacaacagcagcggggaacagttgagtaaaaccaacctgtacattcgaggcctcccaccaggcaccactgaccaggacctaatcaagctgtgccaaccgtatggaaaaattgtatctacaaaggcaattcttgacaaaaacacaaatcagtgcaaaggttatggttttgtagattttgacagtcctgcagccgcacagaaagcggtagcatctctcaaggcaaatggcgtgcaggcacagatggctaagcaacaagagcaagacccaacaaacctatacatctcaaatctccccatttctatggatgagcaggagcttgagaatatgctgaaaccctttggacatgtcatttccacaagaatactaagagacgctaatggagtcagcagaggtgttggctttgccagaatggagtctactgaaaaatgtgaagtggtaattcaacattttaatggaaaatatctgaaaacaccaccaggcatcccagcccccagtgagcctttgctgtgcaaattcgctgatggaggacaaaagaagcgacagaatcaaagcaaatatacccagaatgggaggccttggcccagggaaggagaggctggcatggctttgacctatgaccccacagctgccatacagaatggattttattcttcaccgtacagtattgcaaccaaccgcatgattccacagacatctatcacgccattcattgctgcttcccctgtctccacataccaggtccagagtacttcatggatgcctcatccgccatacgttatgcaaccaacaggtgctgtgattacaccaaccatggaccatcccatgtcaatgcagccagccaacatgatgggcccactgacacagcagatgaatcacctttcgttgggcacaacaggaacgtatatgactgctgctgctcctatgcaagggacctacattcctcagtacacgcctgtgcctccgacagctgtttctattgaaggtgttgttgctgatacctctccccagacagtggcaccttcatcccaggacaccagtggtcagcagcaacagatagcagtggacacatccaacgaacatgcacctgcatattcttaccaataccacaacacaatgaggctcctgacactgaccgggtac

SEQ ID NO: 219496 - DNA, 514 bp, Homo sapiens
ttaatagaaggggacatattaatataacatattacaaagtcaaaataaaacctttatggcagtagatgcctaaagcatttgaaatagggcacttgcaaaattggaggctacaagagacgctcatgtatgacttcttagtcatacatgaagtggacccagtgattatgccctgagtaccaatggctaagcaagtgattctgaagcctgcggatgccaggcctggtcaccactgtgactcaggcaggcacctggaactggaagaacatcagcacagcaataaaacatctgcgcaagatcagtgacagcatgcctcatccggcaccacaggagtggtggactcaacagactgaccaggttcctctctgactgacttgaaagctagtctgattctctttggactgagtcatcccaagttttctcgatctaagatgggtgggtggtggtggtagggggtggcttaaattgacgagctttgctttctgctaataataaagttggaacaattattaaaaga

SEQ ID NO: 219497 - DNA, 292 bp, Homo sapiens
gcctcgggaaaaacacaaaagtacaaaaagtaatattcagctgagaaagaaggctttagtttactctctaaaatcacgtttttttacaagtggctatgtgtccatttgtttctttgttcagttttttacgccagcctttctaacagttaccatgtgcttctggaggtaaaaggatagtttcccaggtaaatacttcattctttccttctttttttttttttgagattgtgccactgcactctagcctgggcaacagagcaagactgtgtctcaaaaacaacaacaacaacaa

SEQ ID NO: 219498 - DNA, 323 bp, Homo sapiens
aaaaaaaaaaaaagaaagaaattaaaaccaccatgagatgctattgtatatgcactacaatagccaaactaaaaacactgtctataccaaatgtcagccgagatgtgaaacatacttatacactgctggtgagactgacatgaccactttggaatacagttggatgcttaaacatacaccaaaacatccatatgggctgggcgcagtggcttacgagtataatctcagcactgtgagaggccgaagtggacagatcacctgaggtcgggagtttgagaccagccaggccaatatggcgaaactctattacaaaaaccaaaatt

SEQ ID NO: 219499 - DNA, 500 bp, Homo sapiens
atcactgagcctcccttagctctttactttgttggcatcctttggaattttgtgttggctcattgaggtcattgatctgtctggctgtctgtggatttatgaataacaccatacttgaacagcaccattctaaattattgcatacaatgcacttaattttgtcctgaatctcattagagaaaacaaggaaaatattataaagtaaaataatacaaatattggtcagtgtattttactcaaaggcaatcactgggaatttgtttgtgtatttcctgccaatcttttttaatgcatttttaagaaagcatgataatgtctaaaattcaactgtttatttaattttgtattttggtgtaatcctttaatattgtaacctaagtgttttccaatattctataaactctttgttaagttttacttaatgaatatattgtatactgcagtattgtaaaatgaatttgcaaaaatttcaataaacaattttctcattgttgaacttt

SEQ ID NO: 219500 - DNA, 606 bp, Homo sapiens
aactcttgacctcatgatctgcctgcctcggctttccaaagtgctggaattacaggtgtgagcccccgcgcccagccaaaaaaattgttttaaattagctgggtgtggtggtgcctgcctatgaagtcccagctactcgggaggctgaagtgggaagatggcttgagcccaggagttgaaggatgctatgagctctgattgtgccactgcacccctgcatgggcaatagagtgagaccctgtctctttaaaaaaaaaaaaaaaaagtatcatattgtatgtgttctgtagaacttgctcccacactttaacattttgctttaaagatttgttcgtgtacttagatcattccttttcactgctttatgagctgaatcatttctgctcttctttccatccatacccattggtctccaaagtatccaggcctccccaaaagttcctgcaggagacctcagttccactggctttcaggtcattattgttccagcactacttctccatttctggttccagcccttctctcccacattctcaagcttctagagggtcataagagaggaaaaacgccaaatgcctttgataaaatgttgcctttccagtggta

SEQ ID NO: 219501 - DNA, 425 bp, Homo sapiens
aagtaaattgataatacagaagatattggggagaatttagagagcagtatccttgagtagcaagttcatatccaaaacagaagagagaacttggagtgcaaaataattccaatagatggttatacttgctaaattgtttactaatcatttatcacaggaggatttagacagggttgatgtatcaatttcaactaggagccaaccagtcaagcatcatggtgtcctctaacagagtaactgtagaaggtgaactgcatttttctaagtatcacctggatatctggatagggtgtgtgactgttaacatggctcttttttttttgtttgtttttttgtagtggtaaatggagattattttttgtagcttatgaatatatttgtttctgaaatgattcttttctttttttaaaaaagtgagatttgta

SEQ ID NO: 219502 - DNA, 380 bp, Homo sapiens
gaattgagcaatccgggggctctccaagtctctgcagctgcccgagggtcgaaggggcacaaagattccctctctgctatttaagaattggtggagtgggctgggcacggtggctcacgcctgtaatcccagcattttgggaggccaaggcaggtgtatcacttgaggtcaggagtttgagaccagtctggccaacatggcaaaaccctgtctccactaaaaatacaaaaattagctgggcgaggtggcaagcacctgtaatcccagctacttggaaggctgaggcaggagaatcgcttgaacttgggaggcagaggttgcagtgagcagagattgcaacatagcactccagtctgggcgacagagcaagactccatttc

SEQ ID NO: 219503 - DNA, 889 bp, Homo sapiens
tagtacaaaaatagtgagtaaaagaggtagtaaagcaaagactctgaaaccatactgcctggattcaaaatttggctttgtcatttattagccaagtagccttcattagggacttacacattctaggcctgttttctgatctatagaattgggtcaataagagtatttacttcatggtgttgtgatgattaaatgataaacatgccaggcatacaaggaagcaggacattattgctatggtggttgctatcactacaaagttattgttaaccaatgcactgctttcaaacaaaaatggcaaacagcatagaatcataagggaaaaatatgtaggagtggcaagctggagaaagggacctggggctacagatgtgccagcaaaagtcatgaacacacagagacagccaggaggaaggtagccagtagtggctgtgggtgtgcccactgtcagcacatggatgtaactgacatagaggtcatgggagaaggggctgctggagggagcctgaactgggtctgtgatctccttttgcaacatgctcatagcacttagttcctaagatccatcaccaactctctgtggggaaggatatctttggatctgtttttgggcacagttcatctagaatagtggggaacatcagccaaagaggcaaaattaagttgtgcaccttttgacagcagcaagtatctccaggcattaaaggcaagttttgtctaatgtagtagttttcctgacaaatgcagtactctactcatggacctcttttttcttttccttttctttttcttttttctttttctttttcttttttcttttttgagatagtttcatgtcaggtcgcacatattggaatgaagtggcattatccgtaccgttgtttttcct

SEQ ID NO: 219504 - DNA, 391 bp, Homo sapiens
gattcctcagcccagcccactccaatgaaccagaatctctggagatacagcccaggggtctgcattttcagacaactcccaggtgattctgatacagaatacagtttgagacatcccactaaccccagcactgcaccgtactacctcccagctccaaatgggaaggtgttgtgaaaatctgcacaggtagttgtagtcactattatgcacgatattattatctcctctagtccaattctttctttgcagtcccagaggtttagaaggaagtaagaggaagggctgaggtggaaaaagatgagaaggcagagcagggagggaggtctcagcccaagcaactggtacattgctccctgcagtgcaaaaatcagagctgcgaccaacacaccac

SEQ ID NO: 219505 - DNA, 237 bp, Homo sapiens
cagggaagctgacagtgcacccttcagtctgtggccaaaggcccaagagcccccagcaaaccaatggtgtaagtgcaggaatccaaaggctgaagaacctgaagtatgatgtccaagggcaggaggagcaggaggaagcatccagtataggaaagggaaaagccagaagacccagcaaacaaagttatcccaccttcttccccctgctttgtctttgctgcactgcagcctcttgga

SEQ ID NO: 219506 - DNA, 539 bp, Homo sapiens
cataagaaagtagagataagtatgattaattttttagctaactttctcagcttactgggtaagaaaataaataaataaaaattgataggtaaatctagttcaaacttggaaatgttctctttaagatgtaatacaaattattttaagaaactaaaaatctagaaaaaattgtgttatatatacttagtatatttaatacataaggaactgttattacaaattaataagaaaattatgaaaatccagatagagattgtgaaaggcaattcataagggaaaagtaaaaattgctaaactttgattttaaaattactattatacaaacatataaattaaacatagtttgtatttttttaaattaaaaagaaaaattatagttttggtgtagttgcactgaaactgaaaatatagtaccctgctcttagaaatgtaaactactagaacctttcaggtaagaaatacaatatccagttatcaaaaatgtaaaattgttcatatcttttctgagcatttgaatcttatcctaaaaataaaaaaat

SEQ ID NO: 219507 - DNA, 422 bp, Homo sapiens
taactgtattagtaatagcagtgattactgtagagactatatgaagtagttgaaagaatgtggacgtttagacagacagacatggacattaccttcttcttccacttaagtagcatttcagcctcggacaaatttcttagctcattatctttctatgtaaaattagaataataatatcttaagtttcagtattacgaggattaaatgagatagtgaattaaaaggttttagtacgtagatcctcaaaaaataatcatttttctgtcactgacatcttagagttggttcctactgctcagtcttatcccctcccaccccccagaacactttcttttacgcttccggggtgttctcttttgtaatctggaaggagaattgctacacacagttatagtccaattagggctcccactggcaatctc

SEQ ID NO: 219508 - DNA, 794 bp, Homo sapiens
ttcagaagagagatcacagagcctagatcatttctgcctttgatgtgcatctcctagacgtcagcaggagactagacggcttgtcaggaatgagattagaaacctgcaaagcaagaaccttttcctaagatttttcaactatccctgttgttactggacagactcaggaaagagagaaaaatgcatctgaaatctctaccttctaaggctttcgttgagaagaaaaaagcaagcccaaatgtatgagcctttgtgctgaaatctatgtgaaagaaagaaaaagataagaaaagcaaagaaagagagaaaaaagaaaaaggaaggaaggagaaagagaaagaaagagagagaaagaaagaaagcaagcaagcaagcaagaaagaaagaaagaaaaaagaaaaaaaagaaaaaaaaagaaagaaaagtgagattgtatcttaaatggctccagggtggggcaggaggagtttaagaaaacataagcaggctacacttttccctttttttttcagcgacttttttctacacaggatttcctgatcacatcatgaggaactatgtaaatatgccctctttgactcagtggaaataatcatttcctgtcaagttatttcaaggaaggaaaaagacccccaaacagccaaaaccagaaaagtacaaattgtcaaatgaaatttcataagggacagttttcaagtgagtcaagcattattctgtaattcgttcttaacttggttgcctttgttttgtattgttttgttggtcaaatacattacttacattgcgaaataccc

SEQ ID NO: 219509 - DNA, 659 bp, Homo sapiens
ctaactctcactgttcaagccatgctagccttaattaggtccttcatttcaccattctcccttctaccacagggcctctgcacttgctatttcttctgtctggacaaccatctcccatctatcctttctttgccaagttaacatctactcctccttcagatcatagcacaagtatcatttcttgaggatgccttctctaatctggtcaaatctcactaatgtaagtgttacccaatacctactcttatgccactgtcacaggtgcaatttaaacacttaatttgacatttctgtcttctccaccagaccctaagttccatgggggaagggtatcacatcagtttttgccccacataatatcctgttgcctaggtggcccaataaaaatgtgttgcatgaatgaacaaatgcatgaaccatgctcaaaaatcatgagatatggtccagactgcctaagtcaaagttcagttgccagcaatcacaaaacattcaccactaggtcaaactcctatcaccatgatcttcactatactaaattttctttggcaaggtccttttagctaagataatgaagtttacttatgacaggccttcttctggtggcttcctatttacatgaagaaaccatcaaaaactcaaactccattgaataaaataaa

SEQ ID NO: 219510 - DNA, 624 bp, Homo sapiens
  misc_feature (586)..(586): n is a, c, g, or t
gtcaccctccgcttggatcggactattgctctgcagtggggcaggagggggaactgaggtcttattgacaatgcctggtggtggctgtctgcagttctgtgctgaggcctggaggccctgtcctggttcagtgggaaaggtacgtaggttgattactgacatgagccatgggcaaggggagtaggctgcgggggcatttgctctgtgccagcctacactacatgttggagctgctggtcttgcctctgtctcagtgctgagccccaaatgggtcagcatggtagagatggtggagggaactggaagcccccaggattctttgctcctgtgggagtcatacctctttcccaggcaggagaaggggcaggcccagggcaagggaatacacatgacataaaatatccccagtggccaggcacggtggcacactcctaggtgacaaagtgagaccctgtctctgaaataaaatacacacacacacccaaactccagctctccaaatctaaaaaagtacatagtacctttatttaaactaaatgcttaagtgtggaagtggcacacaaatagatagaacagactaggtganaagaagagaaagtcccgaataggccgggggatcctcta

SEQ ID NO: 219511 - DNA, 675 bp, Homo sapiens
aaaatacagtaggctgtgtgtaaaatatttcctgaagctagctgatgggtacatgaaaattcattaaataaacatcaacactacagtccgccatacccatatgaacgtatatctgtacttattaatacaagtaatacacaaaagtgctgacaaccctcaactagaaacaaacactaaaccagaataagatattactatacatggtttatgggtcaccatggggaaaaaaattacctacctccataagcctgaattgtgttattttaaatagtatataaaatgaatgatctaagattattcaaaatagagccagatatggtggtgtgcatctgcagtagtcccagctacttaggaggctgagttggaaggatcaactgagcccaggagttcaaggctgtattgcaccatgattgctcctacaaatagccactgcactccagcctggacaacacagtgagacccccaactcttaaaaaaaattattattcagaatgacagaaaaggattatttccaaagggcgtgagtaccccgtttactatttttgagtattcttgttcctatttgccaaaaatgttttaaacgattaaagccttggtttttaaggtttaatagtaaaattttaattattcactggcaatcttttaaagcactgttaacttcctgggcaccaaatg

SEQ ID NO: 219512 - DNA, 864 bp, Homo sapiens
gggatgggatttctgggaatgtttcctttctaatggattttctggttgtatttttaaggtggtgccaataggatgtactgacagatcagaagtggtcgtgagagaaggagcaagtagccagaagagtgaagtgtgcactggctgagatgtgggagcaggtgttgttggtttccccggagatgcagcaagaaggccctcgccagatatcaaggccttaagcttggacttcccagcctccagaactgtcttatgtatcaacaaaatcacaccagaccacccaaagctggccctgccaactgaccacacacacccctgcctgaaaggcatgtttcaatgtgcaacagacgcctgccactcaggggacatcaaatgttcatgagaactcgctaacctcgaaacaggttctacaaattcaaaaaaaccacccgtggcctggctctgggctgaagctgagtcctggcttgaaatcccctgccttaatctctcttcgaagacttttctgcattcatctgagtcctcatcctccaaggcagggctcaggcttgggctcaggctcccagccatgtatccctcctggaccattcctgactcctttccagtatccttatcacttgtaccacatacgttggcctttgatcctgtgtactgttggatttgtctttacttcacaggttcatcttgtctccccaagaacaatgagagttgcctcaaggggtagaaccatgctttttgttttcttttgaattcattacagcacagccaaaagctcaacacacaaaacacactcagtaaatatctgttgaacagaataaaaaccgagcggccggccccaccatatatatccccccctccctccatttcccc

SEQ ID NO: 219513 - DNA, 506 bp, Homo sapiens
gggatgggatttctgggaatgtttcctttctaatggattttctggttgtatttttaaggtggtgccaataggatgtactgacagatcagaagtggtcgtgagagaaggagcaagtagccagaagagtgaagtgtgcactggctgagatgtgggagcaggtgttgttggtttccccggagtaagttaccttgagtgagttaaggttaagatatcccaggggtgaggttgagcaggcagttgtgtatgtgaccctggggaaagtctagctgaagatacaaagatgggatgagatcaccaaggagtaagtgtctttagcaaagagaagagaccaaggactgaatctggatacctcaacatttggagtcagagcctgaaaaggatccctcaaaagtgcccaagaagcagcagaatgaggaaagacagcccagggagtgtggcacagctgctcccaggggtgaggttgagcaggcagttgtgatggacccgaaaatagggagcctcagagt

SEQ ID NO: 219514 - DNA, 418 bp, Homo sapiens
atttggagagaccttgggaatggtgaggactgtgacctcagtggagcacctactttactgagacagggcagctgcttctccatcttgccctgtgctagtcttgctggatattttatttttcaagaaataaaatatggaatgtggaataatatgtgtgacttatcaatttttaaattttggtaggttctacaaattcaaaaaaaccacccgtggcctggctctgggctgaagctgagtcctggcttgaaatcccctgccttaatctctcttcgaagacttttctgcattcatctgagtcctcatcctccaaggcagggctcaggcttgggctcaggctcccagccatgtatccctcctggaccattcctgactcctttccagtatccttatcacttgtaccacatacgttggcctttga

SEQ ID NO: 219515 - DNA, 518 bp, Homo sapiens
actgagaaatctgatacctgtttccttactaatggattcttctaggatttctaatcttgcagggctagtgtgccgcttaggatttaccgatcggtatcacaaggtctcgagtgtgaaaaccctgtgcgcgcgagccagtgaggtgtggagcgcgagttctgcgtcatggtcttaggtgggtcctgccggagtaagttaccttgagtgagttaaggttaagatatcccaggggtgaggttgagcaggcagttgtgtatgtgaccctggggaaagtctagctgaagatacaaagatgggatgagatcaccaaggagtaagtgtctttagcaaagagaagagaccaaggactgaatctggatacctcaacatttggagtcagagcctgaaaaggatccctcaaaagtgcccaagaagcagcagaatgaggaaagacagcccagggagtgtggcacagctgctcccaggggtgaggttgagcaggcagttgtgatggacccgaaaatagggagcctcagagt

SEQ ID NO: 219516 - DNA, 888 bp, Homo sapiens
ttccagcagtatgctaggacctggggataggtagccagtaaaatctcttatgtgccctcagaattcaacctggctggagagacagactcataaacaaataatcaaaaggcacaacagataactcagtgtgaaactgtggctgatcccttgagctagatcctctaggatctcttgcctggtcaaagtataagaatgctgttttagcaaaagacagggttggcattgccagtacctgcattccactttaaacactgaccttatgtcagccagcagaccttggcaactgccttgtctgaggatcctaaggtgaaataaaggtattagtccggtaaacatggattgaccacatgcaggataatgggataggcatatgagggagagaccacaatgaacatatatggtcactgtgttccatgagccgatggcctagtgaatgattccagctatgattaactctgttacaggaataggagaaagattaatttaggctctgtcactcaggcctgattttatggagaaagtagcatctgagctgagccttgaaggacatataggttgggacaggtagaactggagagggaggacagtctaggtggaggaaacaacatagcaaaggttcagggaggaaaagcacaagacattcttagaagattgtgggtggcacaagccttcgggtgtggtccctgctactcaggaggctgaggcaggaggataacttgagcccgggatttccaagctgtagtgcactataattgagcctgaataggccactgcactctagcctaggcaacatagtgaaatctcatctctaaaaaaaaaaaatttttttttgtttaaagcagggtctcactccagcctgggcgacagagcgagactccatctcaagaa

SEQ ID NO: 219517 - DNA, 539 bp, Homo sapiens
gtccaattctgtgctgtcttttatcattttccccattataggttgaaagcttcagatgtcacaatttcccagggtcttaggattctaccctggctctggcagcctaccttcattgttttacccaccaaaggaaatggtagaaactcagctctgaggcaaggggttatggcttctactaaggtatccctaagaatagggcatatgctttgtctgagctttaaactatataaatggtgatgcagaatggcagatgcttgaaaggtaggtatagtctcttaatgcctaaggtagactaacacaagaagatagattcttgatgtgtgtagtcatggactccttggctgcaagtgtagaaatgcaactcaaaccagtataagcaaacctggaacttattaccttttgtaagtgggaagtccaaagctacaactggctcagggcaagtctggatggaaggaattaagtgatgtcatcaggaccttctctttttctctactttcttgtgttggcttttttcaattaggaccttacgtcatggcaga

SEQ ID NO: 219518 - DNA, 97 bp, Homo sapiens
agtggttgccctagggattacaattaacatcttaattttagcctcgttggaactgatgccaacttgctttcaatagcataaaaaagctttgcttcta

SEQ ID NO: 219519 - DNA, 574 bp, Homo sapiens
acgcctgtaatcccagcactttgggaggctgaggcggacggatcacgaggtcaggagatagagaccatcctggctaacgaggtgaaaccgcgtctctactaaaaatacaaaaaaaaattagccgggtgtggtggcgggtgcctgtagtcccagctacttgggaggctgaggcaggagaatggcgtgaacccgggaggtggagcttgcagtgagccgagattgcgccactgcactccagcctggacaacagagggagactccgtctcaaaaaaaaaaaaaaaaaaaagaaaagaaaatagggtctttgtagtttctattaagtaaacaatctccagataaggccatcctggatttagggtgggacctaaatccaacaacgggtgtccttctaagagacagaagaggaaaaaagagtaataataaaaaatggccagtgagcatggtggctcacacctgtaatcccactactgaggaggctgaggcaggagaatcatttgaacccgggaggcagaggttacagtgagccgagatgatgccactgcactccagcctgggcaaaagagcgaaactccat

SEQ ID NO: 219520 - DNA, 283 bp, Homo sapiens
ctacgtgaaagatgccagattccaaagaccgtgtattgtgcgattccatttgcgtgagatgcgcaaaagaggcccctctatagaggagaggccagtaaacgtctcctgcgaagggcaaggcggtaaatattctaggatttcagggctcaacagtctcggtcacaactcaactctgcagttgttgcaagaaagcaaccacagactatacatcaatgaatgggcgtggcagcgttccaataaaactatttacaaaaacaggcagccagctggatctggccgtgac

SEQ ID NO: 219521 - DNA, 553 bp, Homo sapiens
aactcttacaacccaccaacaaaaagaaaaacaacccaatttaaaaatagtcaaaatgtgaatgtactaaaaagcgctaaaaaacaagggcaaaggacttgaataaacatttctccaaagacaaatggccaataagcacatgaaaagatgctcaacagcactaatcattagggaaatgcaaaccaaaaccacaatccctatcaaaatatcctttttcgcagaaatagaaaaaaatccaccctaaaatccatacagaatctcaaaaaacctcaaatagccaagacaatattgaaaaagaataacaaaattggaagactcacacttcttgatctcaaaacttaactacaaagctacagtaatcaaaagagtgtgatactggcataaagagaaacataaagaccaatggggccagatgtggtggctcacgcctataatcccaacacttcgggaggccaaggcgggggggatcatctgaggtcaagagttcaagactagcctggccaacatggtgaaaccccatctctactaaaaatacaaaaattagctgagtgtg

SEQ ID NO: 219522 - DNA, 364 bp, Homo sapiens
agaatgtgtgaactatattgctggtgttctttctttccaaaatatgaatttgatattcagtacttcacttgtaaaattttaggaacaacttttaaaaaataagtatccagaatattttcatgtgaaacaacttttccttttccttttgttctttctttcctataagaaaacgctgttttacgctaatcatgttttgagtagacccttgggctttttctcttgaaattggaaagttaacaggtataatatgcaagtcttgttcagccaagaccttcagtttgttcttgacagtaggaaaatgcttattttccaggctcagccctgaaatttctatgttatatttacgaagatactttaagaaata

SEQ ID NO: 219523 - DNA, 346 bp, Homo sapiens
catgcaagaaaatgctttgaaggggcttcagaaaagaataatcaacatgcaagaaaacgctatgaaggggcttcagaaaagaaatcatcaaagcaaatgtgcaagaaaacgctatgaaggggcttcagaaaagaaatcatcaaagcaaacgtgcaagaaaacgctatgaaggggctttaaaaaagatatcatcaaagcaaacatgcaagaaaacgctatgaaggggtttcagaaacgagaaaccgttaaagaaaagatgcaaggaaacaacactgtgaggggtttcagaaaagagaaatcatcaaagcaaacatgcaagaaaatgctatgaaggggtttcagaaac

SEQ ID NO: 219524 - DNA, 509 bp, Homo sapiens
gatgccagctaccatgttttcttcagctattaggataagtgtcattataaagatccatctgtatttaagaattaatagtaaggttaaaaaccaagaggtgagctttctttcctgtgctgaaagaccctttcagttggtaggcccgccttgccaactggctttcaaatctatctttattaccttttcccagcctgtgaattaatgtgaccctgctgaattctcatccttgttctccggcgatgttttgggcaagagtgtggagtcaggcagtgagtctcaagtcctattccagggtctgggagctggaggctttgagggtcagctctgggaggattcttcctctcttagacattaactcagcttgactcacgcctatgaatccagagccttctgcgattatgagaagctgtaaacataagctatgcatctcacttctgtaccaggatgcgttcggtcttcatggctcagttatgagtatttcttaacatgtcgtaacatttatcttttga

SEQ ID NO: 219525 - DNA, 1716 bp, Homo sapiens
tagaagatacttaaaattctctttatgtgacaaataagtataatatattcaatttatttccatgttaaatatacaaatcttatgaagttcaatatgtgcaaatttttcacatctttctccttctctcactttacctcttctccctcttttaaacttttctttctccctgccagagtgaaccttatactaaaaaattacaagttttgatctgatcctctctcataccccatgtttgattcagagctgtagatgcctctgaatttgcgaatttctcaagggaaaattaactttaagagctttctttatttcaagcatgttgaaaaggattttgcaacatgacttgggagtacattaaagtaagtcagcatgtatttgacgaagaagatatttgaacttttgcagtttattgtacagtgcatggtaattttttcacctttaaaattcagtttacaggaaaattctaaaatcatgttgccattgtgatgtccaataaatttgtttttagcaccagcattattcatacaggggttaaagtattatttgtagaaggtcttaggttttgtttgttttttaatcatttaaagcaatttctttagccagtttccatttactatgtgaatagaagcactgctaaaaattgggaaccctgaaacacagggctgtttattaattcatttttctgtagtaaaattcaatttttcacaaattatatttctaaagaaatatagtaaacataaatttgcaacaattttaaagctccagtttttaggtgactcaaagaaagtcattatgcctattaatagttatttgatgccatcaccaaaagtctatgtgaaaatctcctaaagtcaaaacccctgcctttggttttacagacggttattaccattgggtggagctgcaaggtcaaatttctcctaagttcccctatttagaggaaaagtcactggttattgtaataaaccacccatggttctttatgtacattttgataacacattattatagcttgattttaattttttgcattaatttttgaaatccacatacatctcatttgtttaaattaaggccatgcacaaatattttttttagttcagtgctgaccattaaaaactatcatgcttgatacggtgcaaaagttaaaatgagtatcactaaaaatgccttctttttatgtggtgcaatatgaaatacaccaagactgtgtcttgacattctgatggacccaggtaaagttgttaaaagaacgaataaaactttattaaaataatttagacacctgtgtaccagcaacaattgatttaatagacctatagtgtctatactatcccttagaataaaggtttatgattttcctgatactaagatgcagtcacataatcttttgtgcatattcctatacaaattatttctaattttaataagaaggacgtgactacggaatatttgtacatacttgtcattatgcagtatttatttaaaagttggtgtttttttttttaattttcacatctgcacctcgacttgtggtttagtcatgtaactagcactatgccagtgaccgttgttgccctgtacatagtatgtttgaaaagtaaagggaattccagttgggaaaaaagggcagattagtcctgtaatgaacaccaactaatgtaaatcaaattcattctggtgatggtatttaacactttaaataaaacattttcttta

SEQ ID NO: 219526 - DNA, 1884 bp, Homo sapiens
tagaagatacttaaaattctctttatgtgacaaataagtataatatattcaatttatttccatgttaaatatacaaatcttatgaagttcaatatgtgcaaatttttcacatctttctccttctctcactttacctcttctccctcttttaaacttttctttctccctgccagagtgaaccttatactaaaaaattacaagttttgatctgatcctctctcataccccatgtttgattcagagctgtagatgcctctgaatttgcgaatttctcaagggaaaattaactttaagagctttctttatttcaagcatgttgaaaaggattttgcaacatgacttgggagtacattaaagtaagtcagcatgtatttgacgaagaagatatttgaacttttgcagtttattgtacagtgcatggtaattttttcacctttaaaattcagtttacaggaaaattctaaaatcatgttgccattgtgatgtccaataaatttgtttttagcaccagcattattcatacaggggttaaagtattatttgtagaaggtcttaggttttgtttgttttttaatcatttaaagcaatttctttagccagtttccatttactatgtgaatagaagcactgctaaaaattgggaaccctgaaacacagggctgtttattaattcatttttctgtagtaaaattcaatttttcacaaattatatttctaaagaaatatagtaaacataaatttgcaacaattttaaagctccagtttttaggtgactcaaagaaagtcattatgcctattaatagttatttgatgccatcaccaaaagtctatgtgaaaatctcctaaagtcaaaacccctgcctttggttttacagacggttattaccattgggtggagctgcaaggtcaaatttctcctaagttcccctatttagaggaaaagtcactggttattgtaataaaccacccatggttctttatgtacattttgataacacattattatagcttgattttaattttttgcattaatttttgaaatccacatacatctcatttgtttaaattaaggccatgcacaaatattttttttagttcagtgctgaccattaaaaactatcatgcttgatacggtgcaaaagttaaaatgagtatcactaaaaatgccttctttttatgtggtgcaatatgaaatacaccaagactgtgtcttgacattctgatggacccaggtaaagttgttaaaagaacgaataaaactttattaaaataatttagacacctgtgtaccagcaacaattgatttaatagacctatagtgtctatactatcccttagaataaaggtttatgattttcctgatactaagatgcagtcacataatcttttgtgcatattcctatacaaattatttctaattttaataagaaggacgtgactacggaatatttgtacatacttgtcattatgcagtatttatttaaaagttggtgtttttttttttaattttcacatctgcacctcgacttgtggtttagtcatgtaactagcactatgccagtgaccgttgttgccctgtacatagtatgtttgaaaagtaaagggaattccagttgggaaaaaagggcagattagtcctgtaatgaacaccaactaatgtaaatcaaattcattctggtgatggtatttaacactttaaataaaacattttctttaaaaaaaaaaaaaacgttcagggtgttgtaacttgggaacatctgaatgctgaggcctagagatcggtcaggggtgtgtaaactgggaccatctgaatgcttgagcctagagatcgttcagggtgttgtacctgggacatctgaatgcttaggcctaaacaatcgttag

SEQ ID NO: 219527 - DNA, 1983 bp, Homo sapiens
tagaagatacttaaaattctctttatgtgacaaataagtataatatattcaatttatttccatgttaaatatacaaatcttatgaagttcaatatgtgcaaatttttcacatctttctccttctctcactttacctcttctccctcttttaaacttttctttctccctgccagagtgaaccttatactaaaaaattacaagttttgatctgatcctctctcataccccatgtttgattcagagctgtagatgcctctgaatttgcgaatttctcaagggaaaattaactttaagagctttctttatttcaagcatgttgaaaaggattttgcaacatgacttgggagtacattaaagtaagtcagcatgtatttgacgaagaagatatttgaacttttgcagtttattgtacagtgcatggtaattttttcacctttaaaattcagtttacaggaaaattctaaaatcatgttgccattgtgatgtccaataaatttgtttttagcaccagcattattcatacaggggttaaagtattatttgtagaaggtcttaggttttgtttgttttttaatcatttaaagcaatttctttagccagtttccatttactatgtgaatagaagcactgctaaaaattgggaaccctgaaacacagggctgtttattaattcatttttctgtagtaaaattcaatttttcacaaattatatttctaaagaaatatagtaaacataaatttgcaacaattttaaagctccagtttttaggtgactcaaagaaagtcattatgcctattaatagttatttgatgccatcaccaaaagtctatgtgaaaatctcctaaagtcaaaacccctgcctttggttttacagacggttattaccattgggtggagctgcaaggtcaaatttctcctaagttcccctatttagaggaaaagtcactggttattgtaataaaccacccatggttctttatgtacattttgataacacattattatagcttgattttaattttttgcattaatttttgaaatccacatacatctcatttgtttaaattaaggccatgcacaaatattttttttagttcagtgctgaccattaaaaactatcatgcttgatacggtgcaaaagttaaaatgagtatcactaaaaatgccttctttttatgtggtgcaatatgaaatacaccaagactgtgtcttgacattctgatggacccaggtaaagttgttaaaagaacgaataaaactttattaaaataatttagacacctgtgtaccagcaacaattgatttaatagacctatagtgtctatactatcccttagaataaaggtttatgattttcctgatactaagatgcagtcacataatcttttgtgcatattcctatacaaattatttctaattttaataagaaggacgtgactacggaatatttgtacatacttgtcattatgcagtatttatttaaaagttggtgtttttttttttaattttcacatctgcacctcgacttgtggtttagtcatgtaactagcactatgccagtgaccgttgttgccctgtacatagtatgtttgaaaagtaaagggaattccagttgggaaaaaagggcagattagtcctgtaatgaacaccaactaatgtaaatcaaattcattctggtgatggtatttaacactttaaataaaacattttctttacaggcgtctgcagtgctttctctgacttttctccccacacagccctgagcctgctgcagctcattccctgaactcatgtgtcatttaaagaatgaaatcaccgtctcctacttctcgataacataagtggactgctggtcttagcagcggccctcagtagagcatttctttaaaacgccaaaggatttctgctcacactatgaaaaggtgctgttttttaaaagattgttattttggattgagtttctttctgattaaatgactcag

SEQ ID NO: 219528 - DNA, 479 bp, Homo sapiens
  misc_feature (14)..(15): n is a, c, g, or t
  misc_feature (47)..(47): n is a, c, g, or t
ttttcgactctagnngatcccctcatttcaagaataaaccttacaanaaacctttattctaattgatttaatagacctatagtgtctatactatcccttagaataaaggtttatgattttcctgatactaagatgcagtcacataatcttttgtgcatattcctatacaaattatttctaattttaataagaaggacgtgactacggaatatttgtacatacttgtcattatgcagtatttatttaaaagttggtgtttttttttttaattttcacatctgcacctcgacttgtggtttagtcatgtaactagcactatgccagtgaccgttgttgccctgtacatagtatgtttgaaaagtaaagggaattccagttgggaaaaaagggcagattagtcctgtaatgaacaccaactaatgtaaatcaaattcattctggtgatggtatttaacactttaaataaaacattttcttta

SEQ ID NO: 219529 - DNA, 763 bp, Homo sapiens
cttttcttcctgcactaggtcatgcaagctcaggtttctgagtgaatacagcaaaagagaaacataaagcagtgttttctttcagacagataatctgactgaatttctctcttcttttctgccttggctgacttgatgggtagtataaaatttccacagactattctcaaaatcaaaatgctaagatgggaaaatagtactcctttattgtctttctgttttatctcctggaattagtagaagtactcatttattgaatcagtgttatatgtataatttttttttaatctgacaactaccccagcaggcatttccctgttttatagaagaaaacactgagacctgtgaggcaccttcttgagatcatgaaactagtgagtggtataacctggatgtacacccaggcctgtctaactttctatagcccatcactttctccctggcactacattactttccagaaaaaagggcagtatggtcagtcatcctggtgatatatatatatatatatattattttttttttcctaaggcaaagtcttgtgcccagccatctggtggtatattttatatcacaccaaagcccatatactccagtctcttggaagtgtattcaacattctgtgaacctcagcgtaaaacagttggcatgttagataagtaatcatgagactgagcctaaattagggccaggtacggtggcttatgcctgtaatcccagcacttcgggaggctgaggcaggcggatcacttgagttcaggag

SEQ ID NO: 219530 - DNA, 288 bp, Homo sapiens
acttatttgctttttctcagctatttctgtttgctggtatttacttttaattttatgagttttttctttgtttctgttagttgctagtttatctaactggttgtcatttttcagctggattatattttctttatatattttgtatttttctgcatcacagtaaagcacctgcctcaagtaaagcacctgcctcaagtaaagcacctgcctcaagtaaagcacctgcctcaagtctgcctcaagtaaagcacctgcctcaagtaaagcacctgcctcaagtaaagcacg

SEQ ID NO: 219531 - DNA, 515 bp, Homo sapiens
cgagacagaggcaagaacaggtgctgagaccaagaggaagacacacagatgcaagggaccgacttcccaggccagtggcaatggcgtggatattaatgacagcctggttatgcctgcaggagatccaagagggcgggaagagcggaccccactgtcagcactgggaccgcagcaggcattgggggaaggcaccgaggtcttccacatgattcctgtgctgaattctcagttacagggagaaaagtactcttgtaataatatgccaaaaaaagttaacacaagtaaaatcatccctttaacatttaattcagcttaagccatgagacccctatggggtaatccacaatgctaaggcccagaatgaatgagactcctggcatcagagtcctgccagggaatagaagaatgaaaatccctccaaaccagaggcaccgctgccctaaatgcaaaatcacccatgcaactcaaacctagagaaactcagcagccacagttcaattcctgctgattcttta

SEQ ID NO: 219532 - DNA, 558 bp, Homo sapiens
gcagatgacgcaggccgggggcagtggctaacacctgtaatcccagaactttgggaggctgaggcaggcatattacctgaggtcaggagttggagaccagcctggctaacatggtgaaaccctgtctctactaaaatacagcaattagccgggtgtggaggtgcacgcctgtaatcccagctactcgggaggctgaggcaggagaatcacttgaacctgggagacagaggttgcagtgagccaagatccagtgctttggcaacagagaaagactcacacaaaattaaaaaaaaaaaaaaaattaaaaaccaagcagtgatgctgctactttatagtatgagaggctcttctgaatacccatcaacttcagagtatttggatttgaggttggcagggcagttgataatttcattcacagatgaagaagcttgaggttcagagacattagttatctcacccaagatcaccaaaccagttaattgcggagtcatgattagatcccaggtctatagtacaagaatgcttaccacttcatcacagggtctcattagcatatgc

SEQ ID NO: 219533 - DNA, 347 bp, Homo sapiens
agctgtccttccacgacactgttggatgaaagacatgtctccacccaaattcttttgcttgacccactatggagatttttctctggcttcttcagtctgaattctagacagggcttgaccggcgtaagtaagcaagagaatggcttcagctgcacacgtgagggcgcagagaactgactactacccacgcgggaccctgggtccacggggacaaccccacaagactgcagctaccttctgcccgatgaatcttccccagtcttttgtctctgtggtttggtgcttaccttttttttctttctgcctctactgaacttcatgaaatatgatcttttaatagacactaa

SEQ ID NO: 219534 - DNA, 540 bp, Homo sapiens
cttctgatctgtggattgcaaaacccgtgggaaaaatgtagtatccaggctgggtagcacagtccctcatggcttcctttggctggggaagggaggtccccaggctccttctcgggtaatgtgatgccccaccctgcttctgctcaccctccgtgggctgcacccactgcgtaagcagtcccagtgagatgaactgggtatctcagttggaaattcagaaatcacttgccttctacattggtctcgctgggagctgctgacctgagctgttcctattcagccatcttgccagatcctcaacttttcattcaataagtcttgatatatcatccctctttgcctttgtcatgcatttctctttctcatgaattagccatctcctaaactcattcataagatcactctttctatgaagctactgcttaattttgtttagtgaagcctttctaagttatgtgagtccaaacatttatcattcctttgaatgtaacatttattacaaatcacttcacattatttcattttgtgtctatattgtta

SEQ ID NO: 219535 - DNA, 805 bp, Homo sapiens
tccgggccagcatcctagagcccggggtggagatctcttaacaagactgaatcatagaagctaggcgtcttagtccgttctcatgctgctgtcaagaactgcccaagactgggtaatttatagagaaaagaggtttaattgacctcacagttctgcatggctggggaagcctcaggaaacttacaatcatggcggaaggcatctcttcaaagggtggcaggagggaatgagtgcaagcaggggaaatgccacatgcttataaaaccatcagatcttgtgagactcactctttatcacgagaacatcatgggggaaactgcccccatgatccaattacttccacctggtcccacccttgaaacatggagattattacaattcaaggtgagatttgggtggggacacatagccaaaccatatcattaggatgcttgagtcactgttttggagatagttctgaattctgggcactaaggaataccgtttggacactgatccttttatgttaaagatggtgaactggtgagttgcagtgttctcctttcagtttgttaattgggaatcctatagttgagcctaaattttcagtgttttgcttttttttttttaatcataaatggcaaatattacgcctacccagaatacggtgctttgaaacccaaatgttaaggagataaatgggtatacctaactgcttgggatgaacaagattttggggaataggaggatggcttctttagagacctaacagttatttgtgtggcctggaaaagtgggatagctcattctgaatcattttcaaact

SEQ ID NO: 219536 - DNA, 507 bp, Homo sapiens
ccaagatcacgccactgcactccagccagggtgacagagtaagactctcggaaaaaaaaaaaaaaagttactagttagttgactttgaattcatcaaaagagaaattatccaggtgggcctgacctcatcacacctatcctttcaatatgggcatagaggctagagacagcagaagtcagaaatgtaaagcacagagggcctctgtgcaccctgctggctttgaagatggaggagcaaggtgtgtaggtggactctaggcactcagagctgcctctccctgacagccagcaaggaaacaggggcctcctttctacagccagagtgaactgaattctgccatcaccacatacacttggaagaggaccttgggctccagatcagaatgtagcctgaccaacatctccattttattagccttgtgagtccatgaccaaagagccctgccatgctgtgccagaacttctgacctacggaactgcaagctaataaatgaactgttttaagtt

SEQ ID NO: 219537 - DNA, 536 bp, Homo sapiens
gctaggaaagaaggagggggcctctctaccctccgtaggcacttgtcagtttactgatctcttttgtggggtgaggataggagtgtggcgtggaaaaaacagatcccagacagacagcaccctcgagttcctttcccttcatgggaagagatgctgaatcagagaagggtggctgagacatcttctgacaagatggggactgggaagagtcaggaactcgtattctttctcaacagttctttttcattagacttgccaagtgcccgctttgtgcccagccctttgcttggctttgtgagattgtaggaggagacagtccctgccttgggaacaggcttcatcgggttggaaaaacaagagcaacatacttttaacaaccgcatgagatacgtatgaacaagttttgagttgaacctacttgcccttgttaaagcaatacaatgatttcaaaattgtaggcacttagtaaatactggttaatcgactggttgtttctattttgtcctctaggctgtgaacatttcaaagatggagac

SEQ ID NO: 219538 - DNA, 427 bp, Homo sapiens
ttactggagaatggtattagaaaccagtgtcttggagctaggcgtgctcgttgctcctggggtgccatttcttggttctcttggccaacagagtaaagaacgaaatgtgtgtatactaacctgcatatgcatatatatctacaaatatttctatatgtaaccatctgtatctatatttaacagatttcatattcttactggcataaaattggaaataactaagtgttttaacatgaggaatggctacaactatgttaatactacctccatgatgcaactgttataagggacaggttggaaaactgtggaaacataatactttacattaaaaagtagtattttttattgtagagtctccaacaaaggtctctgttggagttacgcttacaatgtgatagttgtgtgtgtgtacggatatgaactttaa

SEQ ID NO: 219539 - DNA, 603 bp, Homo sapiens
tcagctgcgatgccatcagtcactgtctcttctgagagtcccccagacttatgagacccttgggtgtgtctgtgtgactgcctccgacagacttgacagtggtgcatgcttgtcacatgtctctcttctgtcaaggttctgtagtgtttgcatgtgactccctcagttcaataacttgcatttttccgatggcacagttacccaccattgcaggtaaggtttcactgcttctctgtcttccttcaagttactccatttccattgtaagaggttaacataactttaacagattagttctagtttaagatgtcagcccaggctgggcgcggtggctcacgcctgtaatcccagcactttgggaggccaaggcgggtggatcatttgaggtcagcagttcaagaccagcctggacaacatggtaaaaccccgtctctactaaaaaaaatacaaaaaattaactaggcatggtggcttgcacctgtaatcccagttacctgggaggctgaggcaggagaactgcttgaacccaggaggtggacgttgcagtgagctgagatcacgccactgcactccagcctgggggacacagcaagactcagtctc

SEQ ID NO: 219540 - DNA, 441 bp, Homo sapiens
tagaaaatgccatctttggataagagttatatttcttgtgattcttttagaagaaatcttttctgtacatgtcagacataagatactcataaaacatatttgacaaaagtaaaaatcagtgctttattttaggatacatacagtgataccctacgcagaaatgactgatattcattaagcaagctgagtacaaactaaatggttaaaaaaaaaaaaaactatggaaaacaactaaaagaaaatgtagaaatctccaaaaacaatctcaattttaaaactaagactgggctaaaagatactatagtacataccctgtaataaatgacatttgaaaactgaaaaaatactaaatttttctctttactattaacagccttcatgttatggtcaataataaaacaaattatgaacactatatctaggggggaaaaatccaaagta

SEQ ID NO: 219541 - DNA, 684 bp, Homo sapiens
agcaaaccaaggccagacaggctaagtgacttgctcaaggcacatgggaagtggcatgtttgggggttcccagggccaggccaggatcggagatacgaacatgcaataaaaagtttcaaagtagaaaacaaaaacaaaaccaaaaaaccctccagctcctcagcttgcagctcctagagtagcttcctggacactttcctgcttggtcctggcggtcacatcaatgtccatgcacgcttccccaagaaccccacagaaccaattgttgaaagtcagaaatttagtgaagacacaatcatccaaaacacttgtttagcaacatgtagaacaaagaactataacagttgactattcactttttagtgtttgtgttgcctacatgattttttgcattggagtgacacagttttggcctaggcatgggcctccttctctcccctggccccttccttctgacttcctgcggccgctgtacttccacgggttcccctagcagcctccttactcccctttgctctcaagtctcagcactcaaagcaggcaggctgcattctgctttgcactcaagtagatggggtcgttaaagccacactgccctgagtcctccacagagtctcagttttcaaattccatgaatcatattctcggctgtctttccccaaagctggtggaagccaaaatgcc

SEQ ID NO: 219542 - DNA, 808 bp, Homo sapiens
tccggaccagatccaaagctaggccaaattcccagggtggaaacagggctaaattagacttagtggttagttacagtgaagtttgccaggtattcagaggattttgactcaatgttgtggtttcatcacaaacttaactccccccaaaaagggaggagaagagaatctctactatgggtatattttctcttctgtaaatgtagctgaattacaagtcttctctccaagtagtgatattcatacataggaaatagaactactcaagatacgttaactctatgataacggaagagaataggatccaatagtgcatccgaataggacccatgtacaaacatagattctacatcaattttaagtacagagaatgatgagtacatctttggagccactttaattctttgaaaagccgaaagtctaaaatgggtgacctaattttataagccagggaagctaaattgtaacattataattgataattctaaataattttcattggttcaaggaattaagataaataatgtaagtagtattttacacagtcactcccacagctagcccatgtgacgactttgtaggaattagaaaaatatacccctttctcagacctatcttcttcaaaacccagctgaagtgtctcttctgtaacaccttccctcatcacttcaagcagatttaatgttccaaatgtttggagtaaataagtgagtaaatgagtgactgaatataaaatacttacagataacatgcagagttagtggaggtaacatgtatgaattaggccattaggcattaaacctggtactgt

SEQ ID NO: 219543 - DNA, 600 bp, Homo sapiens
atttattgtacttcagaaataccactaaacccagcttctcttagtatctttatagccacagaaggtcactgaaaggctttaagcacaaaagtggtacaggtagaattgtttcaagaatgattactatgcttgcagcaagaggaatctgttgaaaagttggaagtacagagacaggctgggagttattaatgaaatccaggaaagagactatggatgcttgaactaaggtgatggcagtggagacacaggaaaattaattcatttcatagataagttagtaatggacttgatatgagtggtgctgaagctaggaagagctgtgaagggtgagtctcaagtttctgtcatagcaactgggagattattgtgcaattttctaaagagaatcgggaaggagtaatggttgcttgagggaaagattgtatgcctgcagtcatggatatgttatattgaaggaattttggcataaaagtaaaagtgtttataaataaattgtataaatagatccaattagaagaactgaggtccaggctattgatgcaaatttgaaagtggttagagtattgacgcaattgatgccatgggggatggagcacccat

SEQ ID NO: 219544 - DNA, 467 bp, Homo sapiens
ctaagcaatagtacttgttttatacccctttccagtcgtggagcaccgacggaaaccatcattataaaacagtattgttttttatattagtaaggatgaggttttaaaagacgtaattgacattaaacatgattgaagccctaattttgaccaaacgatatttacttcatgttttgagagatgatattaacagtaacaaggatacttgtacacagctttcttccaaaaatgatcatgcggctaagttgccaggagcaatagtaccaaaagatagtttgggacagaatgtgaagattttcaaattaaatattaaaaatgttttctctttctgaatggcttaaagttcttaatacattagatattctgtggtaaagaatccatatctgcaagttatttaaaaggtattagtacacaagagtataggtatataaaactaaatgaagtcaatcatattgattatcccccca

SEQ ID NO: 219545 - DNA, 339 bp, Homo sapiens
gactgtaagcattttaactcaggattataagtagttcctacttataagacgtgaggtgcagtggctcacgtctgtaatcccagcactttgggaggccgaggtgggtggatcacgaggtcaggagttcgagaccagcttggccaatatggtgaaaccccatctctaccaaaaatacaaaaattagcccggtgtggtggtacacgcctatagtcccagctactcaggaggctgaggcagaagaatcgcttgaacatgggaaatggaggttacagtgagccaagattgtgccactgcactctagcctgggcgacagagtgagactccgtctcaaaaaaaaaa

SEQ ID NO: 219546 - DNA, 615 bp, Homo sapiens
cccattcttctcctgtctggtctactcctcctctaggaagccctcgcagatgatccggcccttggctgcttctcttctaaccatctctccttcaccctgcctagtatctggagcccagggcttgggaggacttgggctaccaaagagacagggggttggccaggatggccttcctgttctgatggccccagggcctgcccaaccctgacctcaggccacaactatgactccgcgggctgacggtatctatgtcaccaaaagttccccttcaaaggctctcaaggctctggctgattgactctgattcacctgactccgtggacaggacaagggtggggcggagtgaaccttgtgggtggcagggggttgggacaggcagaggcagggccttcctggtggacatgggagaagcaaagatgggcaggacatttggcaatgcccacccatatctgttcccatcctagtggtcccaaggctcaaagaaactacagggcatctgctttcaaagctcccataccagcacaggtcaaaagggagcagatgcccagagagggaaacaggcacaaactcaccaactgtggagaagggtggctgaggagaagccttcacaaatgg

SEQ ID NO: 219547 - DNA, 602 bp, Homo sapiens
tagtgttgggattacaggcatgagccacctccacacccagcccccagaatatataaataattcctacaatttcataatacaaaggcaaatggctcaattttttaaatgggtgagtaatctgaatagatatttctataaagatgtacaaatgaccagtaagtgcatgaaaaaatgctcaaaatcgttagtcttcagggaaatgcacatcaaaatcacaatgaaatacaacttcacacttactaggatgactggaatcataaagtcagatgatgagttttggcaagtatgtggacaaagcagaatcctcagacactgatggtaagaatacaaaaatgatgcagactttttggaaaacaatcttgactgctcttcaaatgattaaacttagtttccatatggcccagcagttccactcccaggtatatacccaagaaaaataaaaacctatattcacacaaaaacatgttgatgacagtttatagcagcattattcataatggccaaaaggtggaatgtccatcagctgatgaatggacaaacaaaatgtggtgtatccatacaggggattccttttcagccatgaatgggattaatacatgctc

SEQ ID NO: 219548 - DNA, 330 bp, Homo sapiens
caccacacagtgagcactattctaaatactcggattgaaaaagtctctctgccttcaagaagttcaaaagagcaggtgattcacaaatgacttgcattgcattcacatatgggtaagaacagatgacatgggagaatcccactctctatatatctagaccttaactccatccacagcccacctaccttggaaagagggactcagctgggtgatgaatgaaggaaatgtttggccacacttggagcaatgtctttaggaataatacagagttgccaaaatacctgtcaatgattgtagaaacgtattgagtgggaagggagacaccgcgtt

SEQ ID NO: 219549 - DNA, 449 bp, Homo sapiens
cctgtggggttccctagaggaggcatgagctgactctgaagggcaaactgcagttggcctggcaactctggagaagagccacccagcataggagacggcagtgcagaggcacccagggcctgatgctgggagctcagagcagctgggggtgtgtatgcctgaagaatggtcgtagatgacactggagggtggattagatcaaggaaagccatttgcagtgcgggagagttagtgcctaccccagagtctggagccaccgtatgtgatcaggttcacattttggaaagatcactgtgggaacaatatagaaagaagatgatttaggatgaggttagatttgggatccagagatcagttaactgtccccacagttagccatattaaagtggttaaggaaattgactgccaatctttagtttctttatcaataaaatgaataattcctatga

SEQ ID NO: 219550 - DNA, 574 bp, Homo sapiens
ctagaattcagcggccgcttaattctagaactactatgcagccattgatggtatactgccctttaccttgcctagtcaccctcagcatgtctgactcgactctaagggacctcaagggtgaggtcccttaaagcaagagtttcatgatctccagtgtgttctgagactcctgcagtgcccagcgccctcctcagtgcacaggtgacagacccctacttccagatttcccaagaacccttcacatggccactgtcaggctggataaaagccagctacatctctctgctgggaggcgcacagtgcagtatggagttggcgtgacttgtggttttgcccacatcataaccaagtccctggcatagtggaattactaacaatgaagctgtatctcacatttgtgattttgtttgaaaggattctgctcatcagctcatccattttcatcaagtatctcagcgtgccccacgtgtgctaatgtaaagcgtacggattaaattctaataggatcagcaacatacccgcccagggacaaaaaaatctagcccgtgtggtcctaaggcacatgcattatgtt

SEQ ID NO: 219551 - DNA, 521 bp, Homo sapiens
tatattcttaattgaaagactttaatgaaatcacttctccccaaaattaatctttgtaactagtgcatccaaagtaaaacccagtaaggtttgatttagatattgacaagctaattctagaatttatgtaaactctaaaaatattaaaattcagttaataatttattgaggaaggaaaaatatattacaggaaatataagaattaatgcaatgtggtattaacaaagtaataaataatcaatgaaatggaataggtagactacagtaaggaaaatataagaacccatgatatgtaagaaagctagtattatagatcagtggtgaaaaataaatttgccaataaatgagagtgagaaaactggctatacatatggaaaataattaaagtgattctttaccttatataatatttaacaatcaattccttggcaatcaatatttaaatgtaaagccaggcaaaaattacagaaaacccgacagtaaaacaaagaaaatggcttgcacatgtgctttataaaatg

SEQ ID NO: 219552 - DNA, 569 bp, Homo sapiens
caggatggttgaaacagaaatgaccagcaaaactgggagacgaggctgagccacaggccccacagggtgagcccagggggccactctcctagcatctccctgcggcatttttggacaggataccagcacccgccatcttcacagcctggaccagggtggcagaccctctgtggctcccgctggcttcagaattaatgagccggctccctggatccagggcccaggctctgcccacttctccagctgctgaacaaacctcccttgcggttccctaaacgggctgagctacttccttgccacatgctgagcatttgtcgtgtattattagctcagctgggaacaccagggtgagcttgtgtgtgtagaaaatatttctttcagaaaacacataaaacctgaatgtattacctaataaattgttgtgaagccggtatccacagaatccactgaggccaagactaaggacattttcaggccgggcgcggtgtctcacgcctgtcatcccagcactttgggaggccaaggtgggcagatcacctgaggtcaggagttcaagaccagcctggaca

SEQ ID NO: 219553 - DNA, 402 bp, Homo sapiens
aaaaaaaaaagtgccctgctagaagagtgttttctatagtgagcattgagtgaaattttccccgtttagaggtaatattctgttttcaaacatttctctatatatgtgtttttcgtgtgtatttcaaagaaaatacttgaataatttgtcctgtcctgaggttttatttgtttattttgctttaagagttgatagcttttaggaaagcagggccttaggaggaaagtcgtcttttagactgtgtcctcaggatagattatatgagagaaaagcaacttaggatagagaaaaccctgggttgtgtaccttttgagctaaaataagtcataattcatgctatgtattagtcagcttttgctgtgtaacaaactataataaaatctcaggggcataaaacgatac

SEQ ID NO: 219554 - DNA, 417 bp, Homo sapiens
agtgctgggattacaggcatgagccaccacacccagtctaatttttaaaaattatttaagtcagaccagtggcgtgtacctgtagtcccagcaactccagaggcttaggtgagaagatcctttgcgccaaggactttgaggctgcagtgagctatgatctcaccactgcactccagcttgggtgacagagtgagatccatactgtgaaaaataataatacataaaaaattaaacagggcgcacagtggcccatgcctgtaatcccagctctttgggaggataaggaaggcagagtgcttgaactggggaggcataggttgcaatgagccgatacagtgccacttcacttcagcctgggtgacagagtgagaccctgtctcaagaaaaaaaaaaagtatttatattactttagtgtcg

SEQ ID NO: 219555 - DNA, 404 bp, Homo sapiens
agactggtctcgaactcctgaccttaggtaatccacccacctccgcctcccaaagtgctgggattacaggcttaagccaccatgcccagcagttttgtcattttaaaatgagtttgttggccagggacagtgcacacctgtaatcccagcgctttgagaagccaagacaagcagatcacttgaacataggagtttgaggaaagcctaggcaacatagtgaaaccctgtcactaccaaaaatacaaaaaattagctgggtggtgtgcacctgtagtcacagctacttgggaggctgaggagggaggatggcttgagactgggaggcagaggttgcagtgagcttgtgagctcagaccactgcactccagcctgggcgatggagccagaccctgtctcaaaaaaaa

SEQ ID NO: 219556 - DNA, 426 bp, Homo sapiens
cttctttccgggcccgtaagggctgggttccatccaactaagggtagcggtgagacccgagtgcagattccccgagccttcggggcaggaaggagatcttccaccagttctgttctgcaggtcgggagtgggctgaggagtggcgtgtgggtctccggaagctcgtcgcaggccatctgtgtgactccggtgcgagtggagtcatctgaggccactgctatttcccaagagaagagccaggaggaagaaagaatggctgttgggcttcttaaagccatgtaccaggagttggtgaccttcagagatgtggctgtagacttctcccaagaggaatgggattgtctggattcttctcaaagacatctgtacagtaatgtgatgctagagaactacaggatcttggtatcactgggtaaggatatcttc

SEQ ID NO: 219557 - DNA, 801 bp, Homo sapiens
tgtctgctgtgggcccagcagctgcacagacccctcttgttgggagacaagacagggctctttctctcccgtgacctcagcctcatctccaatcgtggggaagagagaaactgaaattcttcctgtgactgaacacatgagaatgcaacagttacttggggtaacaggtttcctgtgggtcctgtgtgaagagtatgcattcattccagtgtcggggaggggagaagaatgaggaggaggcagtcccatgtggatgtcagtgtgatgattaggatgcctgatgcttccgaaacaagaatacactttacgaaaatgcccattgaaaatactttttcctttctactcttgtgctaagagtgcctgtttggaccccatggcttcgtaatgcaatggcttttacccttgtcccacggcccccctgcccaactcaagaaggtgatgaaataggctgcagaagttcccagccagggtattgtgaagatgaaagcaaagatatggcaagagctcagaagagtacctggcccatattgaagtgagcatggctcaagagctttcagaaatcttttaccacacgtgaagaagatgggagtatggccattaccatgtattagaaccggaggctccaactctggttggggatctctctgggtctaagatgcaggcgttggaatgggactcctgggtaaatggatggagtgacgtggggctttaattgcactggggagttggtattcattaagcagtcgtcccaaatatgggccccacaaatgggccggggcagattctcccacctccggggaa

SEQ ID NO: 219558 - DNA, 802 bp, Homo sapiens
tgtctgctgtgggcccagcagctgcacagacccctcttgttgggagacaagacagggctctttctctcccgtgacctcagcctcatctccaatcgtggggaagagagaaactgaaattcttcctgtgactgaacacatgagaatgcaacagttacttggggtaacaggtttcctgtgggtcctgtgtgaagagtatgcattcattccagtgtcggggaggggagaagaatgaggaggaggcagtcccatgtggatgtcagtgtgatgattaggatgcctgatgcttccgaaacaagaatacactttacgaaaatgcccattgaaaatactttttcctttctactcttgtgctaagagtgcctgtttggaccccatggcttcgtaatgtactcccagggaggaagaggctacagcactggcgcactcccagcaatggcttttacccttgtcccacggcccccctgcccaactcaagaaggtgatgaaataggctgcagaagttcccagccagggtattgtgaagatgaaagcaaagatatggcaagagctcagaagagtacctggcccataagaaaatgccagtgttggagaaaatgggagaggaagctggaaaagcctgggggagttatcatcagtgatacatgtctgaccccaggccttctctagaagaatggcaaaaggaagttctttaaacagaaaggaaataataaaatatggaccttcgaatgttaggaagaaagagaaaatatgagaaatgtttatttataaaatgtgtgcaatgagcaaaaatatggttaaagac

SEQ ID NO: 219559 - DNA, 527 bp, Homo sapiens
aggctgtaggtcaagatcaaggtatattacattataaaccgggtgagagtgagctccttgtcttgcatctttctcttcccttctgagtagggtgcctagtatgcagcaggtgctcaataaatactgagtgtaggtctaagagtgagaagttgattggtctgcattcgaatcccctccatgcctgatcttggggcaccccaaatgagaggtcttccctgtctgggggcttccttaggtcatttcatctggcatctactcgctttgggtggttaaactcttacaatgcagcaaactgctactgtgcccaacttgtttactgcagagcagcctggaaagacttgagtgaggtttgagctgcacagttctaagagttatttcttcactcagaaaatatttcctgagtgctgtctctgttcttgtgattgtgtcagacgtggtatgcgggagggtcacatgagcaaatgtgagtcaatgtccctgtcctcaaggtactaacagtttagtttgggagacaacacactacacaa

SEQ ID NO: 219560 - DNA, 263 bp, Homo sapiens
ttttttttttcactgtaaaagatcaatattctttctagtcaaattccagaaataaaaagaagccaaagaatgagttcagtgagatcctggattttccctttctctactttttctgcagaaagtacgtttttgctctactagttgttattagaaagaatatattatgtaaagtgatggaaactacaattgatttataagagtttttgttatttctgataatttattatgcccctgagagtacaaaactacttaaaaatgctttt

SEQ ID NO: 219561 - DNA, 514 bp, Homo sapiens
aataaatctgtatcacaacctggataaatgaattttatacaaaaactcctcaaagatgtgaagtgtgtggcagcctcctgttttgaagcgatttgaatatctgaagtatcttcagttgatcacaatttagtatttccaatttaatcactatgatgttccgctacctggactttgcaggtaaaggggcccaagcttgattctcagattaatcatctgaaaaaacagttaattctcggtcgggcgcggtggctcaaacctgtaatcccagcactttaggaggctgaggtgggcagatcacaaggtgagaagttcaagaccagcctgaccaacatggtgaaaccccacctctactaaaaatacaaaaatagccagacgtggttgcacacgcctgtaatcccagctactcaggaggctgaggcaggagaactgcttgaaccctggaggtggaggttgcagtgggctgagatcgcgccactgtactccagcctgggcgacagagcgagactccatctca

SEQ ID NO: 219562 - DNA, 669 bp, Homo sapiens
cacaaatatgaagtttttttgtattaaaatacaggttaacgaagagatctaaccagatagttgcttaaacaagaaagatcttcatttttgtcttttagtgtcagtttcagtatacacaatccaaatttgatgtggtggctgcgttgaagtcaggaaatcagactcgctctactatctcaaaggagagcatatctcgtcctttgaaggaagtttcacacattaattttattcattccattggtgaaaacttgtcactggccatacctagatgcaaacagcacttggaagcataatctttagctgaaggccgtgtgcccaactaagacttacattactaaataacaagcaggtgtcttagtcaactcggactgccataaccaaacaccgtatacaatatcacttaaacaatgaatatttatgtctgcagttttggaggctgggaaatacaagatcagtgttccagtagatttggttcctggtgagaactcttttcctggcttgcagatagccacctttttgttgtattctcacatggcagagagggagagttttggtttctcttcctcttcttgtaaggacactaataatcatgggggctccaccctcatgactttatcaaaacctagttacctctcaaaggctgcacctccaaatgccatcacattggct

SEQ ID NO: 219563 - DNA, 475 bp, Homo sapiens
cagggcaggagagcagaaaccatgttacctaccatgaattaggaaagggaaattgtgaaaaaggctctgctctggagactggagaaaaggattctataaacttagttgggtagggaaggagctagaatcccagtaatgaaactgtatgcttatggaagtatgtggagtgatggagaaacaaatgctgtaattattcatcattcatcactacatttgaaattatctgaggaaaaaggaggaaataacatggataacatgtttttctctctctcatacatacacacacacacacacaattgtaatggttattgacttcacaatccaacttcatcttctatatgtttaatatgttttatccacctggataccttaacagaaaactaattctggatatggaactatagagtcaataagaaagacatttttaacatgctgggatgaatgaagttctaataaactactataatcacaccta

SEQ ID NO: 219564 - DNA, 499 bp, Homo sapiens
ttagctgccgaagatgttttgaatgtgctctgacatcttgtttcataagaggatctcatccgggaaaagtgtttaaaatagatttctgtataaacctgtattttaaatatacttgaagtaaattgcaggacattatgttaatgcattaacgttaccttcgggtatctgagatacacataactgcccttgacttacccactgtaaatattgggagttttaaaagatcattaggttttcgtcaaatggagtacacctaaaaagtctacaaaaacggaagaaagtaattgatagaaggttctccaactgtggccaactcaagtcccagtgtgctagtgagagagcagttgggcttccctgtccccacagctgcctgtgaatttcggcccttgaagcagggagagggggagcccgaggccgtctccactgtgaatgtggcccatggagatgtctcgctcttgaggagaaaaagtcacagccaggcagcaggaggggtgaacat

SEQ ID NO: 219565 - DNA, 146 bp, Homo sapiens
gcctaggaaaatagctacccggaatctaattttagtaatgtttttgtttcaggaaaaatcgtcttatctaattttacgtaataggggttcagcgcagtagagtagttgatatcatggtttttccagccagacaacctgggttcaga

SEQ ID NO: 219566 - DNA, 303 bp, Homo sapiens
tggggacctctgacttacttaaagcaatttaaaaactcaccagagctcactatttaaagggacccaacagcaaatcctctaataaggtaacaggagtccctgcttccccgcgttggtctcaactttgtcttctgcattgtagctggtctctaacgtgtaggagccagaacggagaggtctttccttagggcacctgtagagtccctcctgaatcaaggcttccatgtggacctttatttttattttatttttttgagacggagtttcgctcttgttgcccaggctggagtgcaatggcgcaat

SEQ ID NO: 219567 - DNA, 178 bp, Homo sapiens
agagtatacttcagaaataatttagtcagtaggtttatgtctaccaatatatatcctatgagttaatataagcagttcacactaacaactgtaggtgatgtatccttcttttagttgctgatactgtgagagaataaggcattttatttaattaaagaatgagctaaaatagcaatgt

SEQ ID NO: 219568 - DNA, 444 bp, Homo sapiens
aaaatattttagattgtggatagattttgttaactgtcttgttaacaaaaagattaaactaaaagtttttttcttttactacatataaaatggagaaaagaaggtatgcctacatttgaaccaaaatattgtagaagagagcaattgcagcttgagaaaatctagattcaagatgtttgagatgacatgctgcagaggagggcacgcaggacagagatctacagccagacagcagagagccagctaagaatgcaactgtgagccaggacacgtttgtggaacatgttaacacttcctggggatgtctatagtcattgttaaagaagactgtgataatttactaaatactcaagcaatgataaggagcttcaggcttttataattgggcattaaaaaggattgtggcgatgagatgataaccttgaagaattttgtattatattt

SEQ ID NO: 219569 - DNA, 760 bp, Homo sapiens
tagccgggcgtggtggtgcacgcctgtaatcccaactactcgggaggctaagacaagagaatcacttgaacccgggaggcagaggttgcagtgattccgagatcacaccactgcactccagcctgggtgacagagtgagacaccatctcaatatatatatatatatgtaaataaataaataaagttttacatcactttttttcttgatcaaagcaatgctaggtaattaaggacattgttggcaataacagaaatgtgtctatgaaaaggttcttaagaaggtgactgtaacctcacattctcctttcattttctcccccatctctgcttctctctagggtgaacacagttggtctgggtgggattggggttgtgctgtgtggggcagaggctgttggggattcgtgatgggaattcctaatagtgacccttgggtcccaggaacaggagacacgggccagtcaaaggcatgggaagaagctaggagaagttaggattcgagttaaatccagtgccaacagggtgaccagttgtctaggtttagccaggactgagggctccctgggatgtgagattttcaatgtccacactcagaaagttctgggcaaatggggacaagttggacacagaagcagaaaaaaaatcaaggagggtctgcagtggaaacgggcattgttcactctgcagaatctgtattcttgctgtcaacaatgccccgaacttcctctggaatctgctcctcacccttgagtggctctca

SEQ ID NO: 219570 - DNA, 493 bp, Homo sapiens
gtagttatatgagaaagagaagacagggtggacattaggaaccttggtcactcacagcaagttgtcggactttatcttgagataaaaatagggttgcagaaggacccatttgtaaatttgatagtcacctgctgacaaaggcctttgccaggcattcctgcagtggaggtgggctttgcagagggggctcactgaggacctgctatgtgccaggcactaggctgggtgcttcacttgcctcattcctcaccacaggcctgcacagtgggacccatgttcctccttagacacaggaggcttaaagatgtgcagggacttgcccaaggcagagcattcgaatccacatctgtgtgattgcaaagcccatgttttctttccacagctctggccatgtcagcacacaccatgaatgctacagctgctgcacagacacctcactttgcctcctgtgtactgtgtcataaacaaatgaataaactgaatttgtacttta

SEQ ID NO: 219571 - DNA, 788 bp, Homo sapiens
tctttttaaaaacaaatcagcccacagatatttattgaaaacctatgggagaagcattgtcctaagtatatatggagcttacattctaatagagggaactaaaaaatacataaggtcaaaaggtaataatttaagtgactcaaaatgagctgggagctttattcagctgatgtgcactgggagcacctgaagactgggtaactctccaagttaaagcaggggtgggattttatagggtgaggagaagatgggggtacctgtccttggagattggttcagttagtaattttcctcattggctgctgtaaaacttgctggtggtgaggtaggagattgtttttgttgttagtcctctgctcatgattactgggccaataccactgcaatgactgtcagaacaattcttgtgaaagttgtttttataagccttgtagtttgttgaagttgaggttcaagggcagaagtagggagaaaaagaataaagggaattaaaaaaggaagaaaggcaatattaaaggcaattttgtttgtttaacacaatctattcaaataaaatatctaatgatttgtaaattgagttaacaaagtaatttcagggaaacatggaagagagtctttagggaggtatctttcaggaggcgatattcaagttgaaacctgactgttgagaaggagaaagccatgtgacgatatgggagatttagcagctgcaaatgctctgaagcaggaataagctcagcatgttcaaggagaagaaggaacaagagaaagagacatgtgagacaaag

SEQ ID NO: 219572 - DNA, 285 bp, Homo sapiens
gataacaaaaacatgtctacttaaagaactatatataaatgctcataatagttttaccagtaatagtcaaaaacaggaaacagtaacagtcaaaaacagaaaacaactcaactgtttattaacaggtgagtgaaaaaacaaaatgtgatacatttatagaatagaatattacttatcattcaaaggaactgctgatatatgcaacattgtgaatgaatcacaaaatcataatgctgaatgaaaaaagctagacacaaataaaaaacacacaaaagtaatttacag

SEQ ID NO: 219573 - DNA, 488 bp, Homo sapiens
agtagggaccccaggaggccactgtagtgttggatattcctggatcagagtttctcaaatcattctccacaggtaatgtctattctccaagagagttttccttggcctgtggccaggctgctcaaatagaatgcagaaacaaagaatttgcctgaattctgctagccactctccaaggtcttctcctgcgatgggtggagggactttcagggcaaccctgttctaagtaggaggtgaaggtgatatccagacaaatccttcctgggtatttgctcgggggaacttgggactttttggcagtattgtctatggctctggctcattaattcagccctcgtgttcccgtatctgcaagggcataactgcagtcccctcagttctctgggtaatgtgactctcactgcaaacctcaacatggaaagctcttgctaaggtgggaaggtctcagtcctccaaaggaaacgaagttgtggcagcctttttactag

SEQ ID NO: 219574 - DNA, 497 bp, Homo sapiens
gtcagggaacagtggctcatgccagcactttgggaggccaaggtagtaagatcacttgaacccaggagttcaaggccagcctgggcagcagggtaagaccctgtctctacagaataattttaaaattagctggtggcatgcgcctgtggtcccacctcctcgggaggctgaggtgggaggatcccttgagcccgggaggtagaggctgcagcgagctgagatcacaccctgcactccagcctggcagacagagggcgatcctgtctcaaaaaaaaagatttaacagacaccacctactgtccccagcatcttacagaacaaaagatcggcggggcacagtggctcatacctgtaatcccagcactttgggaggcctaagcaggctggtcgcttgagcccaagagttcgagaccagcctgggcaatacagcgagaccccatctcaatttatattatttaaaaaataattaatgtaagagaaattaaaacagattttta

SEQ ID NO: 219575 - DNA, 387 bp, Homo sapiens
tatgtttaacattatttatttatttttaattttttttgtagagatggcatcttactgtgttgcccaggctggtcatgaactcctgggctcaagcagtcctcctgcttcagcctcccaaagtgttcggattataggcgtgagccaccatgcccagcccaaatttaaatatataactaaacacatagcagctaacaccaagcctttaaaaatatcattaataggccaggcgcagtggctcatgcctgtaatcccagcactttgggaggccgaggcgggcagatcacctgaggtcgcgagttcgagaccagcctgaccaacatggagaaaccctgtctctactaaaaatacaaaattagccgggcatggtggcacatgcctgtaatccca

SEQ ID NO: 219576 - DNA, 476 bp, Homo sapiens
gaactgaagtcagaaccatttagtcatttatcacacaaaccattccatgtaaaattgaaccttgtcagctaaacacttacttggtttactagttgctgattacacagcagtttaattgcagcacacacacataactagactgtgtattgaagacattgcttttgctgtatcccatatttttcttcactttgcctaaaataaagcctattatttatagtaatagtctaaaactttcaataaattgataagtaaactaattatcaagtatttctatgtcggctttctgatgcctacagttttgttaagaacaaacagctataaattcctagccaaaaattcccactggtctaaaatttgtatatggcctactaaatacttctcataaattatgtcatgacagcatgttatttctacttactgaacatattactgtactcacactaacgtataattttctttctttaaaagatgagaaa

SEQ ID NO: 219577 - DNA, 328 bp, Homo sapiens
cgaccatggcttcctgtgcaagcttatctgcctccatggcttctgatactgtctaaagactaatattctgaaatgtctgtctacatcccaagcccagttacagaatagtgtatcagtctgtgcttgctgagcatctttgcctggatgacacagaggcccctcaagcctctcattgtcccaaactgaatccatcttttccctcaaacccattcttcttgcattccctttctatgtaaaggctccacaatcacctagttcagtagaaatgtaggcttttgtcttcctaactacttcccgtctttctccctcttgtccagtctgtcgacgc

SEQ ID NO: 219578 - DNA, 526 bp, Homo sapiens
agaccccatatctacacaaattttaaaaaataataaattagctgagtatggtgacgggtgcctctagtcccagctactcagtgggctgaggcgggaagatcacttcagcccagtagttcaaggctgcagtgagctgtgatttcacctctgcactccagcctgagcgacagagccagagccaggaccctgtcttcacaaaagaaaaaaaaaaagaaaagaattttcattttaggggaaaaaattgacttgggtgaatgtgggtaaagataaaaggggacattgtgttttagactttaggaagacttttctgaaataaaggagaaagtgttattgtaaacatacgctgaagctgttctgtcttgtcagtttcctaaatgacattggatcaggaattatttttctgtatatacatatatttttaagtataaattgtatatttatgttgtacaacatgatgttttcgtatatgtatacgttgtggattggctaaatcaaggtgtttatacattacctcacatacttgtca

SEQ ID NO: 219579 - DNA, 182 bp, Homo sapiens
tttcgagttctttcttattctccagggttcctatcactgtgatgtgtacataaggggcagctctgaacttttattttacaaacaaacttcctgacatgggccggtttggattcttaactggggctcctatcatggatggaactgagtttgggatggtaagtgctgtatgcctcccagcttcg

SEQ ID NO: 219580 - DNA, 461 bp, Homo sapiens
ttcataggaagtagttgattgagccaggtgtagtggcttgcagctgtaatcccagtgtggatgagggggaaggatggcttgagtccaggagttggaggctgcagggagccatgatcaagccactgcactccagcctgggtgacattgtgagactctgactcttagaaataaaaaagctgaccaggctcagtggctcatggctgtaatcacagggcttcgggaggccaaggcaggtagatcacttgaggtcgggagttcgagaccagcctggccaacatgatgaaaccccatctctactaaaaacacaaaaaattagccggccatggtgggagctgcctgtaatcccagctacttgggaggctgaggcagaagaactgcttgaaccccagaggcaggggttgcagtgagccaagatcatgccatttcactccagcctgggcaacagagtgagactccatgtc

SEQ ID NO: 219581 - DNA, 405 bp, Homo sapiens
tccctctgttgtttaatttacttacccatttttatctctattcctctcatatttatttcccttcttttaaaaaagtatctttataaaatatcgttgtttttcctacacgttttttatttataaaaatccaattgtcccatttttctctttttttaaaaagatccagctgtgatgttttatgtatattaaatccattacttttaactgtttgatcatttctttgacatattactaaatattggaattgctggtttgttggctatatatacacttgatttgactaagtactgcacattgctttccagaatgactgctctggtctacgttcccatttgcagtatgtgatcccatattgctgctaacacttggcattatctagcattctacttcttgctagtctgataa

SEQ ID NO: 219582 - DNA, 402 bp, Homo sapiens
ccaaaacttcattaatctaccaaacctccttttcctcagaacaccttttcacatcctgagaatctagcattagaaacagtctgggtgctgggcccatccctgccacaaatgagaaccaattcctgggaatgatcatgaaaccttccatgcacaagcctaagagagagagagagaaagaagtgagcctttagagctttacacaggaaaggacctgaccagatacctagatcataaatccaagcaaggggcacggcgatccagaacatagctgtggaggtgggctgctccgagtggcctttgctgaagtacacaccttgcagagcctgctccctcattggttgaataggatccatgatgtctgtcctatctccgttacaggattatttggggcaggtcattgag

SEQ ID NO: 219583 - DNA, 227 bp, Homo sapiens
ggttctgcgtgtggcaggtgtgctggactctacggggcgtggctgggtggagctgtgtgattctggggtcctgcgtgtggcaggtgtgctggactcttcggggcgtggctgggtggagctgtgtgattctggggtcctgcgtgtggcaggtgtgctggactcttcggggcgtggctgggtggagctgtgtgattctggggtcctgcgtgtggcaggtgtgctggact

SEQ ID NO: 219584 - DNA, 435 bp, Homo sapiens
ccctgtgttgcccaggctggtcttgaactcccgtgctcaagcaatctgctcaccttggcttcccaaagtgctgggattacaggtgtgagcgactgtacctggccaactgtatgtcttttgattagagagtttagttgatttacaatcagtgttattattggtaggtaagcactactcctaccattttatttgtcttctggttgttttttggtcttctcttccttctttccttctttcctgtcttccttttagtgaagatgattttctccaatgttacgctttaatttctttttattttttgggtgtccattgtacgttggacatgcacacaatggacacacataaaacacaacaattagtattcggcttgcaaatactatctcgtaacccattattttaaatggatgacaacactgattgcagaaataaacaagc

SEQ ID NO: 219585 - DNA, 674 bp, Homo sapiens
ggattaaagcctgagatactgttggatctaagcactgcatatgtacattttgagattttttttctccagtcattattgaaggaaaaaatttagtctctatttttccattgcaaatgttctagaaaaaaactacttataaatgttaggtatattttagcagtgctgtataataaagacatattactgctgctggagaacttacatttattggttaatacttaaagggtatttttccataaataaattactgcaatcaccattaatgagtatttcctccaaatgattcttttttccccaagatagaaactagctctggaagtatagtaatacacattggtcatataagtttcatttctgtttccattccttgccaaaatctcctttgccaatggccctggctcttcttttgtaaaaataaccctgtagactccatttaattgtcacattggcctaaagccatcaagggcagttagcctcataccaagctgcagccatctgtcagaatatgctaaaaatcaatgaagatggttacttgcactctcctgccccggcatgattcctccacacaattctgatttgtctttgtgaactgaagtggtcatgttaatcccaacaccaggttttctctagtgttgataatcacagcaaaacctttgagtaagattcattttggt

SEQ ID NO: 219586 - DNA, 408 bp, Homo sapiens
gcccctcatctcgctagtcatgtcacagcagcaggaggaggagagccggtcgggtgatgggctggggtgggggcagggaggtgagagcagggaaggcaggagggtggaggcgatgatgaacttattgtgagttataccaggagaagtctctccggaacacccctgaggaaatgttccacagttattcagaaagatgagtctggggttctggaaaaggaattggagtggagggagatgggatcgaggtggtgagcctgaatctagccattcaacagatatttgaatcactaccacagaaaaagcatgagacccgggagagaacacaaaaatgaccaagactggcctgtcatggtggcttaggtctgtaatcatagcactttgggaggccaaggtgggcagatcacttga

SEQ ID NO: 219587 - DNA, 462 bp, Homo sapiens
agataaggttacattgtatttgcatttccatattatacatatatattatacatgtatgtattgtatatgtatatatgttaaaggaaggcaggaacttcctcaactacctacagaactcagcgttcaagttaactcattcctcaggaattctgaatagccaagatcttttatgaccgagaagaaatacgccaaggacacgcctgtaatcccagcactttgggaggccgagataggcagatcgcctgaggtcaggagttcaagaccagcctggccaacatggcgaaaccctgtctctactaaaaatataaaaattagccaggcgtggtggtgggtgcctgtaatcccagctactcaggaggctgaggtaggagaatcgcttgaacctgggaggcggaggttgcagtgaactgagatcgcgccattgcactctcgcctgggcaacaggagcgaaactccatctca

SEQ ID NO: 219588 - DNA, 601 bp, Homo sapiens
atatccaacagtctcagaataataccaaagctactactaacaatgtgagactgaaaacaggcagccctttttaaaaatcagagtaaaaaattctgaaaatgaaagtggaaaggaaccccacaggaagggtctgtgctgaccccatgtgacagtgtggccgtttgcattactgctggaattttgaagactactacatattccgtcagtgtcaggattttgttcttcagtgtggtacttttttttttttttttttaagatggagtctcactctgtcgcctgggttggagtgcagtggtgtgatcttggctcactgcaacctccagctcccgggttcaagcgattctcctgcctcagcctcctgagtagctgggattacaggcatgcgccaccacacctggcttatttttgtatttttagtagagacggggtttcactatgttggtcaggctgttcttgaactcctgacctcgtgatccgcccacctcagcctcccaaagtgttgggattacaggcgtgagccaccgcacccggtagtgtggtacactcttaaaatcatagttcctgctgtctgggagtttacatatgtctacagagtggaaga

SEQ ID NO: 219589 - DNA, 759 bp, Homo sapiens
cctcttaaatactaatctgttcacctgtatgtgtctctgaagttttccctgttctttagagatatgagaaaaataaagaccctgtagaaagtggctccataaagctataaagctggtcactaatttattccatgtaaggactgtattttattctgagattgtgtccttcttactttttaacgttaaaattttcttctgaaatgatggtgatagtgtatggtagtgttattttactattattactttgcaaagaagaatatagcagcagccccacattggtcttcacatttgtcggggcgggggcaggaactcttggcttcagagaacaatcacctcaaaaatttacttctacttaacctgttgaggaacaacgtaaattgtccaaatgggaaatagtaaaaatatttgagtctgacctagagcaatgaatggagaagagaaaggctttagataatctcttcaatctaggggattgagggcagaggaaaattatctaagagaggatttggtggacggaagccagcagaaactgttttgctagaaaaccacagaaaaaattgtggtaagtgctgaaggtatgggaatgaatctctcaatccaaaggtttctaactttattaattaaaaaatattttcattaggaggcaatatacttattatttagagctatgtaagaaactatattaatatattgagaattacatgatatccagagaggacaaggagtagacagaagatgatgagagaaagtaatgaaaag

SEQ ID NO: 219590 - DNA, 339 bp, Homo sapiens
gaagttcttagttaagaattcttactagattgtctttccaactctatggttgggttaaaataaagaagccataggcttcagaaactagatatatttgagttccaaatctgtgtctattacatgttaggtatgtgaacttggggaaaacattaagtttgttgattctcagtttcctcttctttaaaatttgcagatattatcagtatcatatgtttatgaggagaattagatgacataacatatgcaaagtttttgtctctagtgggtacttaatcaatggtatttttcttcctttttccattctatgactctagaatggaaaaagttcattctagaacc

SEQ ID NO: 219591 - DNA, 512 bp, Homo sapiens
aaatgaggtgatacatgccaagtacttagaacactgtctgctacagggtaagtactcaataaatatcaactaatattattattaataatagcaagagtattataaaaaacactagcttcccttatcaatgacaatcattattaatattttcttatgtattactccggaaatgttatatgcatacataaatatatgtatgatatacttatggtttttgaagagcaaatggcagcaaattacgcatgttttacctttttcattcaacaatatgcttagagacctctgcctaacagctcatgcagctctaacgtattattttaatggctttattgtcatggcaataccatgatttattgactagtttcataatttttggccagccctgcccccaccattgataaatatttccagttaatttgccattcaatgaagtttgttgctgaatgagtgtgctcatcacagatagttctgtcttcctcggtagaagggagcctcaacttactctttaaacc

SEQ ID NO: 219592 - DNA, 385 bp, Homo sapiens
aaatactgcatgtttacacttatatgtggaatctaaaaattttgaacggatagaagcagtgagtagaatggtgggcgtgggagtttgggggatctggggagctgttggtcaaaggatacaaaggtttagtttgacaggaggagaaaattttcgagagacttgttgaataacatggtgactccagttgacccacaaacaatatgggtttgaattgtgtgggtccacatacaggcagattttcttctgcctctgacaccccgagaaagcaaaaactcctcttcctcttcctcctcctcagcctactcaatgtgatgacctttatgatgatccatttccatttaatgagtagtaaataaattttctcttctttctaattttgttatta

SEQ ID NO: 219593 - DNA, 744 bp, Homo sapiens
  misc_feature (738)..(738): n is a, c, g, or t
agtgaaggccgggtgcggtggctcacgcctataattacagcactttggaaggccgaggagggcggatcaccaggtcaagagattgaaaccatcctggctaacactgtgaaaccccgtctctactaaaaatacaaaaaattagccgggtgtggtggcgggcgcctgtagtcccagctactcgggagactggggcaggagaatggcgtgaacccgggaggcggagcttgcagtgagccgagaccgcgccactgcactccagcctgggtgatagagcaaggagactctgtctcaaaaaacaacaacaacaacaaaaattaatgataataccaaatgttggcaaggatgcagatcaactgcatccagtggaatgcaaacttgtacagatactgtagaaaatatctggaggccgggcgcagtggctcagcctgtaattccaacactttgggaggcagaggtgggtggatcatgaggtcaagagatcgagaccatcctggccaacatggtgaaaccccgtctctactaaaaatacaaaaattagctgggcatggtggtgcgcacctgtagtgccagctaccagggaggctgaggcaggagaatcgcttgaaccagggaggcagaggttgcagtgagccaagacggtaccactgcactccagcctggtgacagagcaagactctgtctcaaaaaaacaccctacacatggcgccggaattcgagcttactggcccttcggcctgngagggg

SEQ ID NO: 219594 - DNA, 588 bp, Homo sapiens
ctctgcctttggtcattcctagtatcttcagatcattgctttaaataattttatacagttttataattattatttgtgggaaaatcactcaattttatcatgctgctattattggaatactcacccttgatacgagcattttttttttggctgggtaatacataataccctagtgcttttcatattaacaaagagtagcacaagagctccttttagaaggttttactaaccttcaggccaagtaagttatctctcctttgagcttcctaggtaccctgtgcataatttcttcaaagcccatattctgtattcatgtctgtgtcccaggatgagcacagagccttgcatattataatcattgaataaatatttatggaaggaaggagaaaagaaggaaggaagaaagaaggattagagggaaaacagtaaggagatagattatgtccactttgatgtggacatggtaggaactgtaggaaagaaagacgggcaataaaacaaggaggaggtgggggctgcctaagagatcacagttcttattgtaacttgctttctattcatcctgccctccctttcataccctagatt

SEQ ID NO: 219595 - DNA, 603 bp, Homo sapiens
gtttcaacatttcaacatttctgaacatctgaagtcccagctacttaggaggctgaggtgggagtattgcttgagtccaggagttcggggccatagtatgcgatgctgattgggtgtccacactaagtttggcatcaatatggtgacttcccaggagttggggactaccaggtggcctaaggaggggtgaatcagcccaggtcggaaatgaagcagaccaaaaactactgtgctggtcactagtgggatcacgcctgtaagtagtgggcaatatagagacctgggcaacatagagagaccctgtatgaaaaaaaaaaaagaatatataaaaaccaaacatataatctgcctccatcgctacccattaatctgttatgcctctgtctgtatgcctcatctccatgaatggtaccactaattgcctagttacccagagaggtcacaaaacacagatttacaaaaatctttccctcctcctcaccatgcacaatcaatcattaaaatacctcagagctttgagatattttacagatttgagatattttactgattgattaaatatgggtggtaaggaagagatattgattgaatattttagtgatt

SEQ ID NO: 219596 - DNA, 220 bp, Homo sapiens
cacatctgcctgtcttcttctgagcctccaaactgttccaacgtctgcctattacccagttcaaaagtcacttccacattttcaaattatctttgtagcagtacccccatctgccaattatctgtattagtccattttcacacttctacaaaggtactacctgagcgccactgcacttcagcctcagccaggggaacagagcaagactccgtctcaaaaa

SEQ ID NO: 219597 - DNA, 419 bp, Homo sapiens
gatgggacccctacaaaaataccacttgttgaaatattgagttagatatggaagggggcagtatggcataatgacttaaggtccagtttctgtatacaagtcttagctccatcacttcttggctattttaccttcagtgagctacctgactttagttgagcctcagttttcccatctgtaaattgggtatatatttcataggattgtttgataaaatgtaagataaaatgaaataactttgtaaaatgcttattacattgtctggcacatggtatttcctcaataaatagttgacttttattatgatggcctgtgctttgacctgtttataagtttttgctgattcattagatacattcttgcctccttcccttgtaatagtagaatgtatctcagtacaaaagctgaatggagtaaat

SEQ ID NO: 219598 - DNA, 370 bp, Homo sapiens
ggtcgaccccaggacgcagaggttgctgggactacaggcatgtgccaccacacctggctaatttttgtatttttattagagacggggtttcgccatgatggccagactggtcttgaactcctgacctcaagtgatcctcctgcctcggctttcaaagtgctgggattacaggcatgaagcactctgcccggctcactatctttaaaattgaaatatattcttttaattattttaacacagaagaacaataacataatgagtattactgaccattacatgattattactgaaaatcattttgttgccatggcagagggtgatgtaaaaaaactatccattctgggtgtcaaaggcactaagaagtctcgaa

SEQ ID NO: 219599 - DNA, 769 bp, Homo sapiens
aggacgtgtgggctgcgtaggctggaccgcacaggctgagccatagagaggagccatgtgtttacccagcctgagcagagcaggggtttggccttggctctgggtggaagggaattggggatgcagaggtaatctggaggaccttaatggctaggctgagtgggaggtttgaatttaggcattgtacactgtcagaaattagagctggaagtttgttttttttccccaagggaataaccctgccaggcttttctagtgggactaatgcagatgggtgctgattgtcaggtgtgggttatttattattcagcagaggttgcctggccttttgttctctctccacttccttcgggtaccagccaccttttcttcatcccctctgccctggagggtcagcagggcaagggacataagtaaaagctccagctgttgtggtttttcttttggttcttttgtttgtttatttacttattttttagagacagtggagtgcagtggtgcaatcatagctcactgcagcctcaaactcctgggctcaagccatcctcctgcctcagcctccttagtagctaagattacaggcgcatgccaccctgcatggctaatttaggtggttttaattgtgttatttaagaggaagtggcagagtcatttgaaattaatggttgagaagaggtttttaagtgaagggcagattttatctgtgtatcatttcagggtacctttattgcaaaatgacagaaacttagctcagatcatcttaggtaga

SEQ ID NO: 219600 - DNA, 461 bp, Homo sapiens
ttttgttttaaattctactttttaaaaaacatttattagcttgttccttttctacttcacccctcttccttcctccaaccccaaatagcctaagacaatggagtcatatagcccaacacttggtctatatacagcagtccactttctaggcaaatgcagttttaaaactgtgccataggccaggcactggtggttcatgcctataatcccaccactttgggaggccgaggcaggcggatcacaagatcaagatactgagactatcctggccaacatggtgaaatctcgtctctactaaaaatacaaaaattagctggacgtggtggcatgtgcctgtagtcccagctactcaggaggctgaggcaggagagtcgcttgaactcacgaggtggaggttgcagtgatctgtcacgccactgtactccagcctgacggcagagcgagactcccatctcaaaaaa

SEQ ID NO: 219601 - DNA, 327 bp, Homo sapiens
tgtctcccaacagtgaactactattccacagtctacccataaccaaagtggggtcattaaactttattttcctgtccaaaagtaatgaagtctctctggcatttccattaaatgtaagaatcagaactggtgtcatctcatcaggctcatcttcctccaaccaagatgttctaacccaaactgaaaatcttgaaatatctgtttaagaatctttaatggcttcctattgattaagaaataaatctaaacgcctcaaccaggcatttcgaaggcttccaaaatctgggaccattatgcatacgaaattgtatcatttaccattcttat

SEQ ID NO: 219602 - DNA, 795 bp, Homo sapiens
acccagtcaatggtattctgttatagcagcccgaactgactatgacactactctattaagaaatgctgaaatgggttttcagaaattgtggtatataaagttggtatctaccctatgacagagccatttcacatgtaggtccttagtccacagaaataagtataaatcctgatagggagcgatttgtaattgtcccatactggaaacaactcaaacatccatcatcagaatgaataatttggggcatatttatacaacagtttataaaacaatgaaaatgagcaaactactgttacacgccacatgggtaaatcttacaatcataatgttgagcagaagaagctcgacagaaaagaaagtatactgactgattccatttacatagagcttgaaaaaagaaaaagcccaaacagtcaaaactatcatgttagatatttggagaagagagcagcggtagtgattaggaaaggccaggagagggcttctattttttgacatgggtggtagtttcaggatatgctcacttgatgataattcatccagcagtacgcttataatttatttgtttttctgtaggtatatacaggttgagcatccctaatccgaaaattcaaaatgctccaaaatctgaaacgttgtgggtgctaacgtggtgccacaagtggaaaattcggcacctgaactcatgatagcatgagtgacagtcaaaacccaataaaaactttgatttgtgcacaaattatataaaattaccttcaggctctgtgtacaaggtgtatatgaaacataaataaa

SEQ ID NO: 219603 - DNA, 638 bp, Homo sapiens
gaggggggagggatagctttaggagatatacctaatgctaaatgacgagttaatgggtgcagcacaccagcatggcacatgtattcatatgtaactaacctgcacattgtgcacatgtaccctaaaacttaaagtataataataataaaataaaataatatatatatagtgctacactcatagtggatggtcattaagcgatagatagttgttcaaccatccaatcctttctttgcagcccaagaaatagctaggcactgtcttcatgtcttgaagcaggattctcataaaggatgcttcagtctcacatggcatggaaaattctaactagttatgtataaacactaattttgggtgttttgaatcctgaatctgtcacatttttgtgtgtgaccctcccgccaaccttggacaaattacttggcacctctgagcctccatttttgcacctataataactcaattcctgctgtggttatgattatgctgctatttctggtaactactccaccttctttttcatttcagatcaccaaccacttctccacatgatccctttgctgtgtctagagttaggtatttctcatccttagccattggctggtaaagtaccagacaaatgttattcagtaaatact

SEQ ID NO: 219604 - DNA, 217 bp, Homo sapiens
taacggtgacctgagtgtagtgaccagagtttgcaaaaggcacttgtgtgttgtctttaagacccaaagttactgtgctgccccactccaagaagggcataaatgttgagtctcccaaaggcaggaatctttgttttgttgactgatacatcccaagcacccagaacaatgcctggaacatagtaggtactcaataaatacttttagaatggatgaa

SEQ ID NO: 219605 - DNA, 420 bp, Homo sapiens
gaatgagggtgatgtgcataagagattgtgcagctgaacagaaggaacaccgagtcggctgcaacttcagggaccctgccttggttcagcccagggacctcggcccagtcactaacctcctgatgcctgcatgtggcagcagctggaccatagtatttgtgtttgctctctctctctcttttttttttgagacagagctttactttgtcgcccaggctggagtatagtggcacaatctcagctcacttgcaacctccgcctcctggttcaagtgattctcctgtctcagcctcccaagtagctgggaatacaggtgcatgccactatgcccggctaatttttgtgtttttagtggagatgggatttcaccatgttggccaggctggtcttgaactgctgacctcaggtgatccacccgct

SEQ ID NO: 219606 - DNA, 158 bp, Homo sapiens
aaggaatgaggggtaaaagaaaatcaaattagatattgtcagctaaagacaatttgaaaaggttaactgcagaactcccaaattggatctatttgagaataatgaaaaaagttggtaggaaatttagtggttatctggttcttcttgtctgaggcata

SEQ ID NO: 219607 - DNA, 444 bp, Homo sapiens
cttccttttagctctcagcttgcctaggtaccctgtaaggtccagtgacaagtcacctcctctgcatgtccatagcaactgccccacaacgtgtcattcaacaaacattcatggtgcacccactacacccctagccttgtgtgtacaacactgcccctcaccatatctcatttaattagaataagccccatatccacaggtccatgcatagaaaacagcgctggaaaggcaccactacatctgacgaaactgaactgtgttcggttagggggtggaggggagtggttggcattttcttctatctactattgtgcattttgcaagtgtcaagtgaacctgttacacttccacaatgagggaaaaatatcagtgttcttttaaaataatgtttggattcctaatttaaataaaacgaactctttggcagctccctgctcctagcac

SEQ ID NO: 219608 - DNA, 451 bp, Homo sapiens
aaaaaaaaattgtggaattagatagtggtgatggcttagctgatgagggtgttgttcctggtgggagggggccctctcctgccctgctcatatctgcctacttaccataacccctggaggcctgtggtgccagtcactgtattcctccattcctatagttcctccaaactggaacttgcatctagaatttttaacagattcaactcctagcgtttagcaacagaactgcctcataatcggtgttgagttcttccaccaggaactatataatgcttgtttgtctctctttgggggaagctaaaaagttaatgatcattgatgagatctgtcttcataaggagttgcaaaatggtgataatgtaattaaaaaaaaaagatagtggtgatggttgcacaactcttaatatacaaagccactaaattgtatgctttgaaagggtgaattttgtgg

SEQ ID NO: 219609 - DNA, 204 bp, Homo sapiens
gcctaatgggcttacctgaattaaactcaaagaaatcaagcaatcttcctttttgttgatgtcctgtaatatggaccagctaccactgtgccctcaagtcatactactttttctttctttctttttttttttgagacggagtttcgtctgtcacccaggctggggtgcagtgagccaagattgcaccattgcactccagcctga

SEQ ID NO: 219610 - DNA, 503 bp, Homo sapiens
taccttaaattcatctgcaaatttaatttcctttgccttgctgcatcacataatcacagattatgggaattaagatgtggacatccttgttagggaggtggatgtagttgttattctgcttactgtatgtatgttaacactctcattcttattatcttactcttcatagtattattataaaataggtgtcattattctctttttataggtgaggaaactcaggcccaggatttgctccaaagaaactagtttactacaaagtaatggatacatagacactagagccatactgtttgtatttaaatctcagcttccttttttgtatacctgaatttcctcatttcctaacatatttatttataaatctgtagtgtgcatcaattgcccaggaaaataaagcccctcattgttacattttaaagttgttttattttgatatttttatttctaatcaatacttttccttattctaatattacaagcgtattttatttcaagtatat

SEQ ID NO: 219611 - DNA, 320 bp, Homo sapiens
gcttctgggaattcacctgctgcctcttggttggcagaagctgcttctcatgttatcttgacatttaaaaagccaaacctctttctaaaattatcaaaccatcccttgctggcattaaattctccagctttagatccttcaccttccttttgctttaagttgtcatataatgacactgctttttctggaatcacattggagtctacagctatggctttttttcgttagacccagggacagattggaaaggtatgcctttcttacagcaaccctgcaccctcataaaagctgaattttcaatttgataaaaatgtattttg

SEQ ID NO: 219612 - DNA, 447 bp, Homo sapiens
tcttcagagagtgcggctggaaacgcaacgttacatgaaatgtttccaatttgctttcagccaaattacctcttttgctttaaagggcaaacttgttttctttgattatgatgacacccatcatttcttgacagctcatttgggtgaacaagataaagcccgtggaactaggattgaggggaaatgcatctgactctgacgacaaaaatgactggagaatctcttttccttgaatcctaatatgatcatttcatgtcctttttaatgccaccaaccttaatatttaaatcatttccaacttaagcatctccgtttaaaattcctgccctgagagtgaagcaaattgttaatggatgggaaactttaattggatattccctttatttgtcattaattctgctgatgaactttataaatggaaatatatctttatcatgcaaattatac

SEQ ID NO: 219613 - DNA, 356 bp, Homo sapiens
aaaaggagtatgggaagtttggttttttgaggggtagcaggatagggcagggcagctgttgaaacacaacagagcagacagagcacataggactgatgggattgagtatggaaaatgaaaaatagaaacagcatggagtgcttaaaattaaagggaagaagttgagatggcaattagtaactcctcttcggcaagcagaagttaacagacatgaggaggtgatgacctcccaaatatcaaaaactcctggggtaagctgcatgtgaaaaaaaaaggatttagtgatctttaacaatatttgttaactatttgactctgtacacaacattgcattaaacagaaagtagaattttaaa

SEQ ID NO: 219614 - DNA, 298 bp, Homo sapiens
gcacctgtgagacacttatgcaatgtccaggaagcggctgggaattccaagcttgctgctgagcagcactaagtgaaatacgctggctaatgtacaggcagggatgaggctcccgggaggacgcccttctcccttgctgaaactgattcagcaaatcctgttttcttctgtcattttacctaacactttggcagcggatggcactccctccctcctcctggccactgccacataacaatgagcttgccagctccccctcctacattcagcctatatacgctgcacatcccaggacttg

SEQ ID NO: 219615 - DNA, 543 bp, Homo sapiens
ggtctttcagacatcaaggaaggcataagatcacttcccagtctgagaaggccatcatatttaaaaatgaagaaaatgccaaaacaggttcataaaaatggtggtctatttctgctgcaaccctagtatgagatggaggaaggactgtggagctgatggaccaggaggtagcagagttcttgattgaactctgcacactcagaatctgcactgacgctagatttgacaagagaataagggaagaagggagaaagaacaggactggttattcaggttttaaaggatttaaagattgtgacttatacacatctttaaaataaactacttaccaagacttgaggaacatatagcttgggcagctgtaacgtttgttcctctcccattctttcccaacatgctgcttccccttcagttatcaattgacttggacagagtcctgttttatttgaagtcaaaactggctgcataccctcctaatctcaataatctgaaataagagaatttagtgagcctgtgggttttgtgtgtgtgtgtgctcatgat

SEQ ID NO: 219616 - DNA, 607 bp, Homo sapiens
caccagcttgagataaaagaagacaatagatcctaagtcttccacttggttccctatgggttttgtttgtttgtttgtttgtttgtttttggtagagatgaggtcttactctgttgcccaggctggagtgcagtggtgcaatcatagctcactgcagcctcaaactcctgggttcaagcaatcctcctgcctcaggctctggagtcactgggattacaggcgtgagcgactgtacctggcttcgatttcctgattaaattattctctctgcagccagtttctttattccagcctgagtcattttcttgccctgggtgacatttttccgtcttggacatctgtcgtattgaaagcaagtcacttcatttatgtctgtcctcgacttctgtttgatacacttcccatgtctccaagtcacggtatttctgaaacaattcatattgcttttcattactaaactttttttccaaagtactcctctgcagccttcattcctgatatctttaaatttatctagaaggtcttatatgctagatctacatctcctttagacacttatcattaacccaatttagggtaacagaaattgttttttacattgagcact

SEQ ID NO: 219617 - DNA, 834 bp, Homo sapiens
ctctctgggtgcagtagctagaaggcttcaggtaactccaaagccaacactgggtgaggcaacacacgccgcctcaggactcagcatttctttcaggctgcgttttcgtggcagacctacccagattgatggagaaagtttggctggcggataagaagtaacgcggaagatgtgtacgtgagagcgatttcacttcactcactttctcatttaaaggttggatgttttacagtggtatacatgattctccttctgtaatcaagagtgggaagtcgcttcccccaatccccgcgcagcccttcttctcccgccttagccatgcaaaatacctagaaagaaaacactaaaactgaacttttttccaaatacagcagtagctttgaaagcattctttgctcctctgttaacagcagaatgtaattctgaccactgcactgatggtttcttaatcatgcagtatgaagatcagcttcaaaataagtcttatgaatgaatgaatgaaagccagtgcagttagttcatcatgactgcagacattagaggactttgaaacaacctttggtgtacattgtactgtttttgttactgatattgtatgtattcatatgcattgtggatcatgcaccatgaaacttgaaaattgttccaacatctcaatggccacaacagtttggtagcttttgcctgtaaacgttgtatgtaaacatttgaacgtgttatactaaattactaaactcattttttactaaaatcatctggttcgacatagtaagtaacgtgcagtaagccaccacgtcgaaatgaaaaaaaaaaaacagattatttcccatcaaa

SEQ ID NO: 219618 - DNA, 179 bp, Homo sapiens
tatgtatcttttttccaaaaactcatatgctgggtgtggctgagtgaaattctatgaaattctccatcagaaattgtgtgtaaaaagtgagggaatattggagctgtaatatacagcaagatacagtgaaagggcactgaaccaatagccatagactcactagatgttagaactgaaga

SEQ ID NO: 219619 - DNA, 441 bp, Homo sapiens
acccttctctttagcctagatgacttccttgtaaaatcctatgcacttactcattcggcaaacatttactgagcacatacgtaccaggcagcacgtaaggtattaaagacaccactgtgaacaagcagatgagatctctaatgtctggttccataaaggaagatcttttcttcttctctcttcaacctccatagaaatggaacccactaagtctaaaataacagaccgaacatatggcttcctttaactattcccgatggcagcattttacttggttaagatgagagccagaaatatttcgtgtcctactagtgacaaataatgtggtttcatggataaagcactggtttcagtctagagatctagtttcttacttttgctatcttttattacttaagtgtatgaagaatcaaataaaagccacctcttcagagaccttgt

SEQ ID NO: 219620 - DNA, 539 bp, Homo sapiens
tcaggggacagcacaagatttcatgatgctactcagaacagtgcacaatttataacttaagaattatttctggaatttttcatctaatatttttacactgtgattgacctctgctaactgaaaccactgaaggtgaaacctctgataaggaggagactcttttagctttaatttatcatttccttgctcaaaacatcttcagtgactaacaaataagactcggtgttcagagtcctctcgcttcctggctcaaggcttctttctagcctccttcctcactgctggccagtaaccattctctgcatcctcaaaaggagtagtttcctgccctgtaaacacatccagagagtttctccctttgcgtcttcgctgatattgatcctgcctgcctcttcctctcttgtgattcctcttctcacaaatgaagggctcctcccagataaacctactcattcttcacaacatcccaaattttacattcccctggagccttcctaggtattttctatattatctcccgtcctcattccttcctggat

SEQ ID NO: 219621 - DNA, 449 bp, Homo sapiens
caggttcaagcaattctcctgccccagcctcccgagtagctgaaattacaggcacatgccaccacgcccagctaatttttgtatttttagtagagatgggttttcaccatgttggccaggctggtcttgaacttctcatctcatgtgatctgcccacctcggcctcccaaagtgctgggattacaggtgtaagccatcgcgagcagcctgaaacatcactttatgaggaccccatagaattttagacctaaaaggaattttaaaagatgatctagttcttacttttaaaatgaagaaaatgaggcccaaaagaatagtaacttaagaagtctgttaatgcaagaacaagaactagcaaagctctcttaaatgaccacttcagtcttcactgcaaagtctgacagcccaaacctcaggtcgacgcggccgcgaatttagtagtagtaggc

SEQ ID NO: 219622 - DNA, 413 bp, Homo sapiens
atctgctgtagacaggacctctcagtgatgcatgcagtcactgcccagggtgcagctggggaagtcacataccgtttcaactcaaactggtacactgcaattcagttctcataaccatctggagttagtgcagaccccataagttaaagagtatggtctccagcaagatggtcctcgcttcatactcagaggctgcaaatccctgagcttcccatgacgttcctgaagctcaaaaattcactagaatgacacagaattcaggaaagcattatacttacagttttattgtagaagatacaactcaggagcagctgaatgaagagacacacagggcagtttctgagagggtctcaaacagagcttttgtgctctcttcttgtagaataagggcttgtcactattacctggaaaaa

SEQ ID NO: 219623 - DNA, 184 bp, Homo sapiens
agtcccagctactcgggaggctgagacaggagaattgcttgaacctgggaggcggagctagcagtgagcccagatggcaccactgcactccaacctaggcaacagagaaagactccgtctcaaaaaaaaaataaagcaggataacaggaaaagctattctgcgttccccagtcctgggtactgt

SEQ ID NO: 219624 - DNA, 269 bp, Homo sapiens
gccaaagctttcagagttcctcacatagatggtgggcaagggaaaacttcacctggtaaggatgaaagaaatctaagaatctttcaatatgcctatagtatcctcaacaacaaaccactccaattgcttgcagactgcactggcttcaacccaaccaaggttcttctattcagccaagtttgtgttggaaatgatcatcttccttttgtatttgatggtcaatttcacattacttcggcaatgcttaaagaaatgcttttttttttttt

SEQ ID NO: 219625 - DNA, 461 bp, Homo sapiens
tttgaggagtagggtttgggggaagagtatatgctttttttttttaacttttaaaatcttcacttagatgttacattttaaaggtaaaattgacaaatccactgttattgactgatattccaaataaggctgctttcttcaatggtttgttttgtagctgatagctactcccgcctctgttccaggacttctgctatagcacttacaacattgctttgtaattattctttacatgttggtttaccgccagacggaaacctcctggaagacaggatagtactttgttcgtatttgtgccctagtatgcagcatggttaatcctattctgtaggattctgtataatcctacatttacatggttaagaagaggttcactactccctcccaccagtccctgctccaaatggggctgtttggtacaccaagcaaggccagagtcctcccaggcacattataaatag

SEQ ID NO: 219626 - DNA, 445 bp, Homo sapiens
cccgaacatgtcgatgctagtttcgttaagctctagttgctgaatcccaatatttataatcaaagcaggcctttgtcattagccttaggtctttatgtaaggccaatcagccttacttccttacgtaaaatagacctttgggtttagaagtacagcctccagcatataatcagacctagatctttgtgtgaggtcattagcctttttgtttggaaagtatatcatttgaaaatattttggccattatcctttttttttttaaaatagggtctcactctgttgccaggctggagtgcagtggcacgatcttggctcagtgcaacctctgcctcacacccggctaattttttgtatttttagtagagacggggtttcaccgtgttagccaggatggtctcaatctcctgatcttgtgatctacccacctcggcctcccaaagtgctg

SEQ ID NO: 219627 - DNA, 378 bp, Homo sapiens
gtctctggggttgtggggaaggctggtagcttgagagcctcctccttcaactctgtcaggctgcatgcacattggaaggtagcttttcaggttgtggtgggtggtggtgaagcagagggatgcaaagcagggtacgtggagggctgtgccttggtcattcccaggaagcaaagcgagcgtcaaaaaaagacagggtagttgggccatggcgttgcagagtgacagtgaaccaggaaccagaagagctgacttcagaggaggctttaggcgctcctgcatgttgattcttagagaactaaagacacagttgcatcttaaaatgttgagacttacacgtatacacaataagaatattttctttggctgcaaatgtactat

SEQ ID NO: 219628 - DNA, 501 bp, Homo sapiens
gaaacaacagatgttttgcattgaataaatcaaactttgtatttaagagtttaattgtattttattgtcaaaagctttcataatagaaagcacacaagaatgtaatattacggtaattaaaatagatgtaaatggttaagctcaccaattaaaagacagagtctccattgagatttttaaaaacacaaattgtgtggtcgacagacacacaaatcaaaaggatgcaagaaaatttcaaaatctaaggatgagaaaagaaatatcatgccaatatgaagcaagtgaaatctggaataacagtcttgaaaactgtagggaaacaatatcttaaagaaaaatattctaaaccaacagagcaagatgaaagacccatcatgagcacataggcctctaaaatgtagcctccaaatacatatatataatttataaaactgtgagaagcaacacatatagcagcaattataattagagatttttaaacacctctctttaaaaaacaca

SEQ ID NO: 219629 - DNA, 400 bp, Homo sapiens
atctttggcagccttttccatgatgttttcttcccaggggtttgtgtagcttgtcttcaccacttgccgtgagctctcgaggacagaggatttgtctgtgttagaaacatctggttcctgccgggcacggtggctcatgcctgtaatcccagcactttgggaaggtgaggcaggtggatcatttgaggtcaggagttcaagaccagcctggccaacatggtgagaccctctgtctactaaatatacaaaaaaatgagccgggcatggtggcgcgtgcctgtaatcccagctactcgggaggctgaggcatgagaattgcttgaacccaggagacagaggttgcagtgagctgagatcatgccactccagcctgggtgacagagtgagaccttgtctcaaa

SEQ ID NO: 219630 - DNA, 590 bp, Homo sapiens
agtaccacgttttatatggaatctctcaaataagcaacatgtgctatgttcctcaaaagagaaggctaaagtactatttttataaagtccgttattaagatctgcggggaatgctgagatgttgtgagaatccttactcattacagtattgggacacaaaggttcaggtttgtcaaagcacagtcaaatgttctttgctgttcagttgttattactattttaccagagtagcttggcagaaatgtcatcttcaggtgcaggcatctgtatatatctgagattatatatctgagaaatcacttactttgataagaaaatacagtttagaaggtggcaatatggagggtattttaagaaaattgatctcacagttattaccctctctgtgcttttcatccataattcaatagcataaacttaatgtttttaagatttgcaaggatccttagaattaacttcttagagaagtcattctttaaaagggtttaaataagtataatattaatcaagtgttaaatttggatggaagagaagacgattagaaactggcaggtaatttccctaagtagggctattagaaagagtaaagg

SEQ ID NO: 219631 - DNA, 588 bp, Homo sapiens
aagcttaaaaaaaaattgagataaaggaaattgattttcatttcaatgtttgactgtaaaatctgtttggataacattttgtaatgagctttttgtcatgtgatttgcttgtcttcaacttgaaattatgtgaggcacatttgtttatttgttgttaagaaagtgatttttttttttttttgtcctatgtgctgtgatctagactggtcaccggggtcacttatgaggcaccacaaagagatctgcttctccgtgcccggagcaggcagcaggagggagggcaggaaacaggactgggttgctttggaaaaatcatcatgacaagaagttgacatgatagacttgtgaccaagaagccaaactgaatatttaaaagctccttacttgctctgacattgaaaccaaagctgattttatctgcacaggttgcttaatatttaaaaaaaaaaaaaactgtacttaatctagagcaatatctgtatggtcagtaaagctgcactttgtgtatttcttaacagcttcagatctgtcacttttaatttgtaccataaaaaataaataattgtttgacatgagcttctaggctaa

SEQ ID NO: 219632 - DNA, 587 bp, Homo sapiens
tttagttgataatttgatactagaggatgggagtgagataaagagtagagattgatttgggaatcattctctgagataaccttagaaatcatggaatttgagatcctagggaaaaatctgtggagaaagaaaaggagaacaagaacacaatcatagagacctatatttagtggatggtaggaagaggacaaaccaaaaaagggatgatgagaagtgggagtacaagattacaaaagcactgtcacagaaattaagagaaaaatgttctttaaaagatgggacatttggccggtggcggtggctcactcctgtaatcccagcactttgggaggccaaggtgggcggatcacttgaggttaggagttcaagaccagcctggccagcatggtgaaaccccatctctactaaaaatacagaaaaaagttagctgggtgtggtggcatgcgcctgtaattccagctactcaggaggctgaggcaggagaattgcttgaacccgggaggtggagattgcagtgagctgagatcatgccactgcactccagcctgggcgacagagcaagattagattctatgtcaaaaaaaaaa

SEQ ID NO: 219633 - DNA, 341 bp, Homo sapiens
tcccctcctaacccccatcctctctacctcttcattatcacaattttcttcttcagatctgtatacccttctttccccgacctacccactgtttttccaaagttcggcccagtactaaattatctaccatttaaattctgcataacccagagaagttcagttattctctccctccctcaattctctgcagtccttcctttcttctcttgaaatacttggggccacgtgcggtggtatatacctataaccccagcactctgggaggctgaggtgggaggattacttatctcaggagtttgagaccagcttgggcaagatagcacaatcttgtctctactgaa

SEQ ID NO: 219634 - DNA, 601 bp, Homo sapiens
attgtcctatgaccctgccaattccccctctgtgagaaacacccaagaatgatcaataaaaataaaataaaataaaataaaataaagactaggtgaacagcaagttttaagtgcctcctggcttttagattcctaaaagggcccctaaagaatagtttcttacaaagaagtaaaatcctttttgtaattaattggttcattaatgtgttccctatagatgtagtgacaaatatcagggatgttaaaccccattgttttaagtggcccagcagacttggcctattttgtcaacctatgcataagataagtcctcctttcacagtcttcaaattaagaccctagcttgacaagccattctttgccaaacactctacttttcgtctggtgtgacttacagtttatatgcctagatagctaatactaattgtgccaggtatgaaactaaacacttgccatttaatgacatgcaacattcctaggagttagttgctattgtcaccccacttcacaaatgaggaacttgtgcttagctcaagcagatgcaacttgttaagacgcagaattgggatttgaatctaacagcaaagtccaatttagaaag

SEQ ID NO: 219635 - DNA, 523 bp, Homo sapiens
acacacttaggggtgattcaagctttgcctcttactaactgtgactttaggaaaattatttccttgggcctcagtttcctcatccgcaaaatggaattataaagtagcttcctcgagttgttgttgctgttacaggattggcacacacagtttgctgccgatcctaagccatgcagaggactaatcgatccacacaatcgttcccgctaagcctagatagactcaatgtggtgctccacactctgatcaattagtgcacagcatgaaaccttcagggcatcactggccttgggccttgccaaatcatgggcatcaaacttcattacaattagatgtttttagcctcttttaagaatgaagaatctgcaattgcacatcactgtggttcaaatttcattgcactagagaagtgtgtgttggccaatatataaatgtacatatcttctcagcattatttagaagatgacaatgtgtctggggatatttcatctgcagaatctaataaactcaacatcattagata

SEQ ID NO: 219636 - DNA, 517 bp, Homo sapiens
caatctattcctaaataaaatgactaagtgaatgatgtttcccactggtttcccactgaaaatcttgcagaacttttctgtgcaccttttggaccttatagaaacaatagataaattctaacatacagagatttaacacagaaagcagatttaacatttttttttaatattaggcagggcgattgctgaactgccaataggtttacactctatttacaaacatgattttgttcacagagcatactagaagccagtttttgacttctgtcttcttcagatgtatcagaaaggtcaatggcatggctcatagaggaatgtcaaatagtgaccaactggaaaccatgaaaagttcaataggggtgggaagagggtgaaggataaaagactacaaattgggttcagtgtacactgctcaggtgatgggtgcaccaaaatctcacaaatcaccaccaaagaacttactcatgtaaccaaatagccacctgttctccaaaaacttatggaaataaaagaaaaa

SEQ ID NO: 219637 - DNA, 1219 bp, Homo sapiens
aatacttttcaatattttgtcagtcttctaggcaatgttttgaaaagttgtacatacttgattgtggaagtgtatgagaaagagaaacagaaaaaagaaaacactgacttggaaatcaggagaacttgtaaccctggttacatataaatctattataattagttagtggaccctccattgactaaatgtgtagtagacagactaatatgaaggagaatctgccagttctggggctatctgttgatttatttattcacctactcatagttgctctatgttgtgagggagcctaatacacacaggctgcattggattctgtgtcagttggctatagtctggcttcagacagtttggacactagaaagcagtggtgggagacagaagagcagaggaccccctacattgggctccagtcacatcacctccttctgctgttcctgaagcccagaagcaacaatagcttgcttctcacttcaccatctttgtgggatgctcatcacccacctaaccatgtcataaggaattgcactctaagaacttaacgtagtcatggttttctggttagaccctgcctgataccaacaggggtgtctcaaagctgactccaactgtttcacaccagaagtctgaaacatcaagaagcaggattagaaatgaagccatccaaagggaagtccattttgtgacaaaagtgtgaagctcagttttggcttcactgaatcagtggtgctggaatatagggtgagccatggcccggccagaaatgtttttttttttttccaaccgctaattactttgaagaaggactttatgtagccccaaatgttaaaccaccaccacccggaacccaaaaaaatttccggtagagtttctttggtaagcccaaacattggattcccagggattggaatagagcctggggaggcttttaaaaaaaagggttcctttcggtcaaaatttgggtccatatgggtttgaaagaaatttattccccctacccttaaggccagggtggtaaatttggattcaaagggtttttcttaaggccataatctccttacacttatcgggaagaatatcgcataggttttattagtcattatgtgcactcttttttaagggacttccttccatgagagggtctcatatgtctatcacacttctctcgcgtatttgttcatctatgtctcgatttcttttctcatctcgcgtcgcgtct

SEQ ID NO: 219638 - DNA, 1148 bp, Homo sapiens
gggctggggtgtgtttatttgggtatatacaatgagtcatggattaaaattgcttccagcggatagatacctaggtgttccacagcattactgaacaagctgtcgtcatttccccattacctcagaagacccccttaattacttacttatattaactgtagaacgtatttatgcataccaggctctacctctgggctttctattctgttccagagacccagtaccagaatatttaaatcactgtggcgttaaatacgttttaatatctgatagggccagtttctgcgcattgcacatttttttttcccctttcaggaacgtgttcaggcccgcggcagggggcgggatcgcgcctcctcctcggctctggttccagccgagcctctcggacgcagagatggaaatcccgaagctgctcccggctcgcgggacactacagggcggcggcggcggcggtatccccgcgggtggcggccgagtccaccgaggccctgactcgccggctggccaggtccccacgcgccgcctcctgctgctccggggcccccaagatggcgggcccgggcggcggcgcgaggaggccagcacggcatcacggggccctggcccaagcctgttggcgccgaggaccgatcaacctagcggcggcggcggcggcggcggcgacgacttcttcctggtgctgcttgacccggtgggtggcgacgtggagaccgcgggctccggtcaggccgcagggcctgtgttgagggaggaggccgaggagggcccggggctccaggggggcgagagcggcgcgaatcccgcggggcccactgcgctaggcccccgctgcctgtccgcggttcccactccggccccgatctccgcccccggccccgccgcggccttcgcgggcacagtcactatccacaaccaggacctgctgttgcgctttgagaacggcgtcctcaccctggccacgcccccaccacacgcctgggagccaggggccgctcctgcccagcagcccgggtgtctgatcgccccgcaagctgggttcccgcatgccgcgcacccgggtgactgcccagagctgccgccagacctcctgctagctgagccggccgaacccgcgccagctccggcgcctgaggaggaggcggagg

SEQ ID NO: 219639 - DNA, 429 bp, Homo sapiens
tattgtgtgtgtgtgtgtgttttctttttggcagaaaatcttttactgaaataagactctatgtaaggattttcagtaattaaatgcttatcataatcctcaactggaaacattctcctgctggaaaccaaaacaaaaaaaaaaaccaaaagaggaaaatggggcactagttattatcacataagaggcaaagtaactttttcttgaattcaaatgttgaatataaacttctgttaatgatttacacagaacctttgcaagtaaacctagaatcagaaattctattaaaagaatggtcaactaattccattagaaaaaggaaggtcatcaaaaaaaattaatgaaacattctctaccatcattcacaagggtgccacgttttttcttgaatatacaatgacttggagtcccactggaaagttgggaaaa

SEQ ID NO: 219640 - DNA, 289 bp, Homo sapiens
acacctgctcaccagcgtgttagtaacacagctgacctgctgatctccaacagtggaccgcctgcaccttcctctctctggattgggaattcaggtggagaaaattggtgttatgtgtgaacttcctaaatccaaaacaacttcaatattcagaggaaacccttcacccctctttattctaagtatcctccaacatgtgcacacacacacactttcctccctgtttgaaatttcccaacctctgctctcttcctctagagatcttggacccctactgtgtcaagctgga

SEQ ID NO: 219641 - DNA, 444 bp, Homo sapiens
gtctttgcctgtagtttggttctttgtgggagatggttgctcccttcagtggcaggagatgatctgggacttggtacctcccaagctcacttggcaccctgtacagcacaggtgccaaacaactgtgagtggcaagtggagttttgtttctgcctctgtccctatgatataacaggtccttgtcagtggctttgacccctgtctgtggctctgtgtggctggttctgagctcgtgcctgtcgccagcccaggtcttacctgcctctcagtgtgggctcatggctctggactctgcagacagtgtcccagggttttcctcctttagtggtcttgcagatttaggatgtcagcaggatcttagaaattccttgccttgcagttgcaatgagtcgagatcacgccactgcactccaggctgggccacagagagcaagactctgtctc

SEQ ID NO: 219642 - DNA, 472 bp, Homo sapiens
cagtcgtggtgactcacgccttgtaatcccagcactttgggaggccgaggcaggcagatcacctgaggtcaggagttcgagaccagcctgaccaatgtggtgaaaccccgtctctactaaaaatacaaaatgtagccaaacatggtgtcccgcgcctgtaatcccagctactcaggagattgaggcaggagagtcgcttgaacctgggaggcggaggttgcagtgagccgagattgcaccattgcactctagcctgggtggacagagcgagacttcatctcaaaaaagaaaaaatttacatgttttatctttacatatctaatacctattacaacacataattgcgtaagatgctgtaggaactgacagaggagcttaggactcctcatgcctataagtcaataaaatctctaccatattgagttaaataatgaaggaatggattgcttcatttaactgaaaaaacagagat

SEQ ID NO: 219643 - DNA, 373 bp, Homo sapiens
ctttgtcaccttgtgctcaaataccctggctggcttgtaacaagaaagaattagggcatagctcagatacaaaagtggaaaaagaaacggctataatccatggggaagactttctatttcttagtctgtctcctgtcccaaatagctcagctctcctcccccaactcgtgtttatgtgttaaatttctttctcttgtagcagatgccaccagaccgacagtccctaaactaggtcagagagagtgatgaattgacaaagtccctcaggctacatcatccgcgtcctcacttcgtctccagttccctggcctgctttccctggcgtcttagggtggcccctgttccgagaaccacagaggcctagggggttcct

SEQ ID NO: 219644 - DNA, 429 bp, Homo sapiens
ctaagtatagttactgctgcaattattgtagataggattgttttttggttttattttcagatactttattgttagtatatagaaatattacggaatttttttatgttgattttggatcctgcaagtttaataaatttgtatattctaataattttttgtgaggtcctaggtttttctatacttaagattatatcatctgcaaggaaactataatttatcttcttcattttatttaagattgctttgattttattgaatattttttctgtcttggtcattttgtattatgttcagtaagatcgaagaaattgggccaggcgtggcggctcacacctgtaatcccagcactgtgggaggcggaggtggggggatcacgaggtcaggagatcaagaccattctggctaacaaggtgaaaccccgtctctact

SEQ ID NO: 219645 - DNA, 387 bp, Homo sapiens
gctgggtgtagtggcaggcacctgtaatcccagctactggggaggctgaggcaggagaattgcttgaacctgagaggctgaggttgcagtgagtggagatcgtgcctgggcaatacagtgagactgtgtctcaaaaaaacaaaattaccaagtatatcttacatagaaaatgagatctacattatggatttctgctttgtgacagtgcctaggaatgcacggtggttaaaaaaaaaaaaatctgctggctgggcgcggcggctcacgtctgtaatcccagcactttgggaggccgaggtaggctgatcacctgaggtcaggaattcaagaacagcctggccaacacagcaaaaccctgtctctactaaaaatacatggtggcgggtg

SEQ ID NO: 219646 - DNA, 390 bp, Homo sapiens
caaattcagggctttcctcctgagacttgttacacattactttaaaataattttgatatttttgataattttgatatacataatataaaataatcagtacacaatatgtttacttgaaatgtatttctttaagaaattaaataggaatataaaggaaatttgcctttagggggtttggtaattatgggacagttgattaattgtggactaaattaatttaactgaacaaaaggctagaaagagcctcatctgtgatatatctctgcacgactatcactgggtaaatcagaagattctgtcatagcagatatggagaaataaaaattgttgattcttaataagtcatcttaagtttttctgagattgtatactgaaatcagcagttgttta

SEQ ID NO: 219647 - DNA, 288 bp, Homo sapiens
cagtagatatggggacctacttgagggtgaaggataggaggagggaaaggatcaggaaaaatacctgtgagatactatgcttattaccttggtgatgaaattatctgtacatcaaacacctgacatgcagtttacctatagagcaaacctgtacatgtatccctaaaactaaaataaaagtttaaaataaaaaagaaagaaattagttcaatacttttttctcagtgaaatgcttatgcaaacaaatatcatacacttttatttcagagatttcgggatcataaaggg

SEQ ID NO: 219648 - DNA, 395 bp, Homo sapiens
agagtatactataatggaaatgtatctcaatcaaggtttgagatcgactatagaatgcagtttgtagaaaacaagtgaatgcttattttgaattttgaaacttagcacaaaaagaaattctaaatggggatgggtggtctggttattgtttttgttttttgtttgttttttttttttcctttgagacaggatttcgctctgttgctcaggctggtctccaactcctggcttcaagttatcctcctgccaaagtgctgggtttacaggcctgagccacaacgcctggctccgttttctgttccttgatgtgggttcactttatgaaaattcactgaacatcgtttatgcacttttcagtatgtgtgtcataattgaataaaaagtttattttaaaa

SEQ ID NO: 219649 - DNA, 488 bp, Homo sapiens
cttccaccaaggtcttaggagttttatagattggggacttacaatgtcagtctttaatacatcttgagttgatttttgtatatggttaaccagttttaaaaatcattaattactttctatcctttattgtgattttctttatttaaaaaagccaaaggtggcatttttaatcaaatttttccaaaattcacattaaataaatgtaaaatgtattatccccattgtgctctgaaatagcatcactgatcttagaaccagggtatgttgagcaatgtacgtgttataaacaagctccaaagatctgagttcattgctaggtggatcagcacacaccatcccaggtaattgattttggacactgctcctcctcagtctgagaacacgaacaccagcttcctaagtggtatctgcagagctgtttgagaagcaagtgggtcatcaatccattcccaaggttggcagcagtagtcaaagaagcatgcagtagc

SEQ ID NO: 219650 - DNA, 487 bp, Homo sapiens
cagaaacaagttcaagcgcagcaggcgcaaagcgaatgcggggctcgggatggggagcaggggcggaagggccagggagccacagaaagacaagaaagacacactgggaaggattcgcgcatttggagaccctccttgtacccccaccccccctttaattgaaactgtgtgcatgcagtgagcgcaggattctagtaatccgacgggaggatccacttaaaagactaaaatccagaaaccccaggaaaaaagaataggaccggcgcaggcattctccaaatctgtacccttctagagtcaccagcttatatgtacttaaaaagtgctaaaccccctcgtcatgtttactgagaaacagagcgatcctgcgcaggggagaggaacgctttcctctgaacaaaaaccaaaggcgaggattcaagtccagagtaaaagccttcaatactgggagacaaaacaaagtcgtccaaaccagacctgccttaag

SEQ ID NO: 219651 - DNA, 460 bp, Homo sapiens
cttgtattttagtttctgcaacacagcctgacctgtcctgattgaatcaggttctgcattttcaattattatgccttggcttctattattgccaccaactggaatgtcctttctcactgaccacctttgtactctgcacaccggtcttccctctctctttcatgagctctttttctatcccttcctccttgccaccaaacccctaagaaccactaatgttttttttcactttcttgatattttagccttttccagaatgtcttatgattagaatcagaaagcatatagatttttaaccaccttttacttaataatatgcatgtaagtctcctccatatcaatattattgctgaataatattccatggtacagatgtaccacagtttgttcattcctttacctattgaagaacatcttgattgcttctaaattttagcaattatcaataaaaccttccatg

SEQ ID NO: 219652 - DNA, 517 bp, Homo sapiens
tggctcataggtaattcatagaactcccaagtttttattttggattacagggttaacaattgaatcagaaaacttaagaaggagaattgatccttgatatgtgagatctttgaaggtggagcatagtttgtttttgtttttttaaaattccaacctgttacacaaggacctgacacataaacgctttgtgaactcaacagaagtattcttagaaatataattttatttttcacatagaagattgcagtatgattttaattaacacaagtatatgaagatatagtaggattaataatatgctgtgtgggccaagcctataagtctatttgaaagagtttcccaacttatttggaaagaatcagaatttttcatatgctgtttgtattttaaacctcttaaggctgggtgcggtggtgctctcctgtagtagcagctacttgggaggctgaggtgggaggatcacttcagtttaagagtttgggtccagcctaggaaacacagtgagactcttgtcttt

SEQ ID NO: 219653 - DNA, 390 bp, Homo sapiens
aaagatcctgactttgtacccagactcttctttgggaagggggtcatgattagcctaaggaaatcattacagttgcatttccaacttacatagactactttgccccttgggttatctggtgagttaattatggcctatgatacctaaagagaaatctgttttgggaacagttaggggactatcaggaaagcaagtgaaaaatgcattaaatgcattcctctccttccttgcatatagcagccatcttatgaccatgagatggtaatcaggatgggaagagcagagaattacagagccacaggtctccaggtgatgagccactgaaccgatagccccagaggccacccatttccagatttcttctgtgtgaggaaaattaattcctattta

SEQ ID NO: 219654 - DNA, 453 bp, Homo sapiens
tttgcctaaaatggaaatgaatagatggataaatcacaattcatataaactataacagtacaagcatggttatatgttagtatttattttgccttagtcaaaaaagtaaaacaagtctgtatttgcctctacgattatcagcaatagaaacattcactatgaaaaagcagtgtaggccgggcatggtggctcacacctgtaatcccagcactctgggaggctgaagtgggcggatcacgagatcaggggtttgagaccagcctggccagcatggtgaaaccctatctctattaaaaatacaaaaaattagcagggcatggtggtgcatgcctgtaatccagctacttgagaggctgaggcaggagaatcacttgaacccaggaggcagaggttgcagtgagccaagattgccccactgcactccagcctgggtgatagagtgagactgtctca

SEQ ID NO: 219655 - DNA, 610 bp, Homo sapiens
cggtggctcacacctgtaatgccagcgctttgggaggccgaggcagatggatcatctgagatcaggagttccagaccagcctggctgacatggtgaaaccccgtctctagtaaaaatacaaaaaaattagctgggcatggtggtgggcgcctgtaatcccagctactcaggaggctgaggcaggagaatcgcttgaactcaggaggcggaggttgcagtgagccgagatcgtgccattgcattacagcctgggctacaagagcaaaactctgtccacccccctccaaaaaaaaaaaaaaaaagattttgtttctgcagaagtgtggacagatgttcctggcatcttgtgtttttataatgaaaataatgttaaatggccaagtcagttttttggtgttcaatattagtccaggtatgagttaaataatgacaagtctgggcaacataatgggaccctgtctctacaaaaattaaaaaaattactcaggtgtggccgggcggtgtctcacgcctgtaatcccagcactttcggaggctgaggcaggcggatcatgaggtcaggagatcgagaccatcctggctaacaaggtgaaaccccatctctactaaa

SEQ ID NO: 219656 - DNA, 279 bp, Homo sapiens
agtataatccagaagagtgaagaaaatacccaggcatttggcaatataggattactacatgttttcctaaagaatttggaactgattagaaacatcctgattttatttaaaagcaatataatgtatttttacagtttgttttcaagaaggttcaaaaaaaaattttttttttttttttgagatggagtttcgctcttgttgcccaggtggaggttgcagtgagccgagaagattgtgccactgcactctagcctgggcaacagagcaacactttgtctc

SEQ ID NO: 219657 - DNA, 392 bp, Homo sapiens
aaggaagatattcagatgagcaagtctgggcttagagagcatacaactcataagaaaaggagctgggattctctcctgggccaatttcccactgctcactccaactctcagcccagcctctaaccactgcgctgtactctctcctacagcttaactcaaggggttaaatttatctcagatgtaccactgaaagtcgaagagataggattcatttctagaagtatggccatgaaaggatacagctatgcaataagtttgttgaagaaacagagaattgtgttgtttgccaattacatgtctttctccatggaatccacaagtgaatttgatcactggatgaccatgtcaagcaagaaaaagtgtaaggaataaagaagagagaaactatagtt

SEQ ID NO: 219658 - DNA, 377 bp, Homo sapiens
tcatggaggactataaattttattctgccacatatatttgctgaattatgaattatctccatgtgtactatttgactcgttttctcccttacaaccttgttgctgccatacacattcaagttctaatcatttttctttcttctccattcagataacttttcatttgcctgtttgtccctcatctttcatctctgtaattcctcttccacactgccactcatgtcatctctagaaatcagatctctgaatgctatcctgttgctcacaatcctttaatggctcccataatctgaaagacgaagttctactccatagtctagcatccaacatcttaaagatcaaagttgggcactgcctgtttctccagccctatctcc

SEQ ID NO: 219659 - DNA, 196 bp, Homo sapiens
tgaagataaaaataagatttcagctgtaaaatcagtttgaaaacactacataatatataatatcaccatcgttattattctgcagttagtgatgtttcaaaaacataaggaacaactctgtgatcagactgaaaaggtaaacaggcagagaaaagaaaggaagtacataggaaagaaaataaaaatataacaaaaa

SEQ ID NO: 219660 - DNA, 590 bp, Homo sapiens
aaaaagaaaaacagaaacaaaaattagccaggtgtggtggtgtatgcctgtcattctagctacttgagaggctgaggtaggaggatcacttgagcccaggaggtggagtctgcaagtctgcagtgaaccaagataatgccactgcactccagtctgatgacagagtgagagaccctgtctcaaaaaagaaaaaaaaaaagagattaaaaaaaaaaggtttcatttgaattgttcattccttggaggcaggaataccaggtgaatctattgtaggaattcatttggtttgccgattcatggagtggctgtgaagtgaaagttcactgtaggtgccaagaaagcatcccttcctgggttagggagcaggagagcccattgtagaaagggggcttttattttgggtcatcccattccttcagacaggaatgaagaacaggagattctaccttcagaaggtggtaagactggaaagacccatttttctacaagggtagatgagcaaatcttttggaggtaggagtctttttggaaacacccattcatggggtaggggtaatggtagaatttagtgtagaagggggatctatgca

SEQ ID NO: 219661 - DNA, 265 bp, Homo sapiens
acgatgagtaaacaatgcagccaggattggaactcagttggtttgttcccggtgtctttgatctcagtggctgcttgaggcagcctctcagggtccctagttggcagtcatattataaaaataggttccctagactcttcgcctggaaggaagatcattcattccaattattgagaagcgggaaactgaggctctgagaggcagaatgagataccagggtccctctgccactgccctgcaggttgactccttgacttggaaccat

SEQ ID NO: 219662 - DNA, 388 bp, Homo sapiens
aaaggtagtcccaaagtgcaagtataaccttgggccaaaatgttttactattcatgatgtgtttgtagcttaggttcattttagacttagataaaaaaacaaagcttgaacaagaagactgggaatagttgatgctcaagcagatcttaaaataaatctttaagaccacaaaagatgtaaatccttttgtattaggatagtacataagagtttgtattaggacaaactctctcaagagagtttgtcaaataactagacaaggaaataagaaacaaagctagacaaggaaataagaaacaaagctagacaaggaaataagaaacacgtatacatatgtaactaacctgcacaatgtgcacatgtaccctaaaacttaaagtataataaa

SEQ ID NO: 219663 - DNA, 307 bp, Homo sapiens
tattgggggtattgtgttctgtgccctgagaggtggtacaaaaattcagaggccaaacgttggccccattagccatttcctgagcattgctctggccaagtatttattattttagaaagaaagcctgataagcaccaacgcatcttcatcccatacatgacactgttttgcaggaattccacttgtatcatactgggacccagtaaccccgcattcttccagctccgtcctgctgcaggagccgggagcaggacaaacccttcagccccatttgtgtcgatccctgattgctgactccatgcattag

SEQ ID NO: 219664 - DNA, 425 bp, Homo sapiens
ggacactgaggtacccagaaagagggtggaaaatcaggatgaagggagttactgctagcctgtcatgtaccatgcacacaacctatctttttaaataccagtggatttcctgtctggctcagggggcctgtctaggaagagattcaaggaaagtagatgggttagttccagggactggggctcaaaaatttaaagccacacgtaacgttagctctctcactcccacacacatttaagataaaggagatggcagtagtgtgctgcccagaggatggaatacgcagataactaggtttctatactggttctactcactagtctgatcttgggtaattttttgggtcattgttctgtaagggagggcaataataactacttggtcagggctgttgtgacaattcagcaataaaacatggtcaattgca

SEQ ID NO: 219665 - DNA, 156 bp, Homo sapiens
taaatcaaaatcgagcaacttgaaaacgtctgtctttcaacacagtctttacttgttaagtcaagtgcacgcaaaataatctttacaataatatttctttcataacctataaggatgttcattactaaattgccaacatgcacttgaaaatatcta

SEQ ID NO: 219666 - DNA, 1055 bp, Homo sapiens
aggagctattggggtaatggcagtgttctgtattttgattgtgttgggggtttgtcagaagttattaaattatacgccttgcatttactcttcagaaatcatacatcaataaagttgatttaaaaactgaaggcaaatttctgcttcttgctaagattaagtaagagggactgcatttaactttccacctgaaacaacttaaaaactagacaaaacaatgaaacaatggtttttataatgttggacatcaggcattgaaggacattgattgcttgggagatgggaaacaaatgaggtgaaccctaagattgcaccagctttctgcctgaagagagtttccaggctacagtacaggcagggggtacccagttaaaggccagaagcctccctgattgagattgagatgtgagtccagggaggctagaattcgcagagcacagagaatcagggaggagagagccgtaaacagtctacctctggtgcgaatagtttcaactcctacaaaccagactggaaaacttcataattgacatggcattgagtagagcctcacaatgcttttgcctcaatagtggggcagaattatccttagactaaacactgctgtcgtacaaccaagagtttaaaagcaagaactaaaaggctcaaactcttgccaagtaatttaactatgaatccagaacaaagtcaaaaatactttataggaatacaacaatatccagcacccaacaaggtaatattcataatgtctgacagtcaatcatttaattaaaaactacaagcaggagcatatgacctatagttggggaggggataaaataattaaacaattaaaaccacaaaaatgactctgatgtctttttaatgtttaagaagcaggaggaaagattgaacattaagtagaaatctggaaaaagaaaagctttgtatttatggatatgaaagctacaatatctgagttgaaaagtacactggacagaattaacagcagattagacattgtcgaagaaaggattagtgaacttgatgacatagcaatagaaacaattgccaaa

SEQ ID NO: 219667 - DNA, 270 bp, Homo sapiens
atgcagtgccactgcaatgcttaccagttaaacagaaaaaaaaaaagggggataaaatgctcatctcttaaaagtcaatcggcttctatttcattctatatagttgttgatttcgtctacttctctaaatttaatcatcatttgctagattccaaatctatattcccaagccagattttcctcaaggtttgctaatgtatgtgttcaactgctcactgaacatttctacatcagtcttagacaacttaaatccagtatgtccacagctga

SEQ ID NO: 219668 - DNA, 297 bp, Homo sapiens
agctggagaagaatgcatgattgactttcctgcaattcctttctttccacatgtaaagtagattcacactcaccggtgcctcacaggaatgtaaccactgcctcactgcctaccctctctcctttttccttccttttttcttcccctcctgcttgcacattcccctttaaatattaaagttcccaaaaccctctttggaaaaagcacaggacacagatcctactgtaacttgtgtctctttttccctggcttgtcttcaacctcagcaaaataaatccctaaatctactgagatatg

SEQ ID NO: 219669 - DNA, 521 bp, Homo sapiens
tagctcttattctacttcctttctgcacaaacaaacatacacacacaggctccacatttggttgttttgtgtgactgtcagcctactagtcatagtctaggaaagcatttaatctctgtgagcatatgtttccttgttagaaagtgtactcagagctctttggaagacaggtttctacgacaattagtgtggactacactgctgttgactcatgactctgcagaattaccaatacagaaagtgaaattgtagtatgtgatcaggagctgatgaaatgaacctgtttcctcattgggaaattcagcgaattggactagatagactgtgttctttttttttgggaggtggggacagggtcttgttctgctgcccaggccagagtgcagtggcaggatctcggctcacttgcaacctccacctctgaggcaggagaatcgcttgaacccgggaggcggagtttgcagtgagccgagatcacgccattgcacaccagcctgggcaacaaagcgaaactccgtctc

SEQ ID NO: 219670 - DNA, 836 bp, Homo sapiens
tagctcttattctacttcctttctgcacaaacaaacatacacacacaggctccacatttggttgttttgtgtgactgtcagcctactagtcatagtctaggaaagcatttaatctctgtgagcatatgtttccttgttagaaagtgtactcagagctctttggaagacaggtttctacgacaattagtgtggactacactgctgttgactcatgactctgcagaattaccaatacagaaagtgaaattgtagtatgtgatcaggagctgatgaaatgaacctgtttcctcattgggaaattcagcgaattggactagatagactgtgttctttttttttgggaggtggggacagggtcttgttctgctgcccaggccagagtgcagtggcaggatctcggctcacttgcaacctccacctccggggctcaagcaattctcctgcctcagcctccctagtagctgggattgcaggcgtgtgccagcacgcctggctaattttttgtatttgtagtagagacggggtttcaccatgttgttcaggctggtctcgaactcctggcctcaaatgattcacctgtcttggcctctcagagtgctgggattacaggtgagagccaccatgcctggccgatagactctgttcttgagcaggatattgctttaggggcctcattgagcagaagcaacagagaaggaagtcttttgtgggtgagaccgtgcaactgtgcctttatctcccagttccaccagagaatctttgctttctttgacttcacacagcagggatctgagcaagatttcaaggggaaaggggttccactgctccttcactgc

SEQ ID NO: 219671 - DNA, 419 bp, Homo sapiens
ctagtctatccttcctgtagataagatttgttgaggttctcaattatgaacttgtctgtcttcctgacagcatccaatcatgatcaaagcctgaatccttggaccctcccctgaattaccggaccaaagctcaaatcctgtaataggtctttctcttactgagagaggcactatggctttctttgctgtgtgttttcctttcatgcaaagagtcataaattcaacttgttcaactatcactgtgttcttggtggcctttgtctggagatatttgacaactgaaatttgttcaatttaagtaatgctgatgctttgcaatgaatgctatttgaaatctgtattagcagttatataacttctgctctagcactctatgtatttacttctaaaattaataaaattctgacatgtttataata

SEQ ID NO: 219672 - DNA, 630 bp, Homo sapiens
gttttctaccctgttgccacctcttctatttagcacagcaatgactaagacatatttagaaggatggcctaaagaaaaatcaggactaagtagtttaggtaaaaagaagaattcatctacagatggagaaaaacaatcttgcccttcttcacgccaagttccaacatgtttgaaatttagcactggagggattgggagagctcaataattagactgcgattgaaatgttccactaaaataatgattagagaggcatccaggggcactttctatcttcttcattcgacctcagcatggagcacatcaactctgtttcttagttggactatactaccttagatacagaactgatttttaaaagtatataaaattatttcaagtctaaaaatcataaagagtttatctcaggataaataatttttatgaaagtattttatcgccagttcatttgtaacctaattgctttgcttaagtagataaatcccaagcaatgagtgaaataaactagtagactagtgggtttttaaccctctacctatgtctctcaaatgtttataatttctgctccactaatagccctgaccctgctaggtaacaatactctaggaaattgaagatatgagttcagag

SEQ ID NO: 219673 - DNA, 406 bp, Homo sapiens
attaacctatgattaaacctgatgattagccatggccaggaatcagattgctaatagccagagactcagtgggcacctttcgttggcggttgagtgctttgccagaaactgcatctcagtgggagttgggagattggaaagttgactaaggagccccatggtgggaagaattaagctgtagacccatgagatgataacagcaatagaaggagaggcagagcctcccacccacacaccaattcagaaatacctcaggtataattaaatccgactccagaatttagcacctttttgtaataagaatctttccttccagtccttagcattctgttgccttggcaaaaacccggtctcttgacatttgaaaggtttctgtcccattttcaaagaacagccctggtgaaga

SEQ ID NO: 219674 - DNA, 407 bp, Homo sapiens
  misc_feature (381)..(381): n is a, c, g, or t
taagcagggtgtggaatcccaatttatactaaccatatgttgccaaaatctcaaagacaagatatcaatttttaaaaatcttatccagcatctgttaaatttatgaggataagtagctgaggaaaacaaaaattttctctctagcaatacttccacagcacagaacatgagaattcccaaaggaaaaagtcctcagtaaagatgagctcataagtaaaaactacaaatcccagacccaatattgctttatctataccccacccactccctcaacacccgatccttggaagcaaaccctaggcatcatgccatttcaataataaatatttcaatacacatctccagaagataaggactcccatatgaacgataacgaaggangtctctgagtggaagagtaggctaaa

SEQ ID NO: 219675 - DNA, 597 bp, Homo sapiens
cgcttctctgccttttggctaagatcaagtgtaggatctgttcttaacagtttaatatctgatatattttctatccgagtccaatatattaaatggatttggggagcaggaagacggaataggagcttgcttgttcacttcacgcatcgatctggtattgcagtacctccaggaacagtgcaccccctcaggggattaaaatttaatgttcaaaacagaagaaggaaaaaaaaacagtctgtctatgtgggatgggatacaaaagagtgggataagaattatcttttggccgggcgtggtggctcccacctgtaatcccagcactttggaaggccaaggcggttggatcacctgaggtcaggagttggagaccagcctgactaacatggtgaaacctcgtctctacaaaaaatacaaaatattagccgggtgtggtggcgtgcgcctgtaatcccagctactccagaggctgaaacaggagaattgcttgaacccgggaggcggaggttgcggtgaaccgaaatcgtgctattgcactccagcctagacagcaaaagcgaaaccctgtctcaaaaataaaaagaattatcttttaaa

SEQ ID NO: 219676 - DNA, 455 bp, Homo sapiens
  misc_feature (15)..(15): n is a, c, g, or t
  misc_feature (69)..(70): n is a, c, g, or t
  misc_feature (119)..(119): n is a, c, g, or t
tctagaggatcccgntacatgtcgaggctggagatgggcagagggccagggtttaagacctggcgtggnnctgaactcacctgaattattttacttgtagaaagaggctacaggttggntgcagtggttcatgctcggctaatttttgtgtttttagtacagatggggtttcaccatgttggctaggctggtcttgatctcttcacctcaggtgactcacctgccttggcctcccaaagtgctgggattacaggcatgcgtcaccacgcctggcccagaagccaaatttttagtcacttaaccattagcaattcctcttctattagattttttttaaaattgcttttgagtatttctttgaagtggcatactcatttaaaggattctatatgtcagggggaatgttttctaggagggtacttaggaaggaacatatcgttatagcctaaaatttg

SEQ ID NO: 219677 - DNA, 389 bp, Homo sapiens
agctgattcagtactggatacaaggaagtcctgtgagagccaggtgcactattctgggccagtatacccttactttaatagaaaagagaattaaaaagatgctaactttacgttaaccaatagtaaggctgaaaatacgtcgtttggcacaccaaagagcttcacttagtagttaagaaaaagaatgactcccaattaaaattgcatacttgtgtctaaaaggttactttcggggggggggggggcgggggaaatgctgccacacgaatttccctttaccagggttatcgccacggcccagtacggcccagcgcagcatccacgtggttctcgagtccgcctggaagtctccggcgctagcccaaagcctggcctccgcgggaagaggc

SEQ ID NO: 219678 - DNA, 448 bp, Homo sapiens
tgtcctcttcttgaaagttcgttttgccaggaacactattctggggtgacagttgtcttccatccacactgtgaaggtatttttccgctgtgttctggcttccaccattggttggaaggtcagctgtcagtcactgatgcttctttctgaggaatctgagtctctctctgggcacttttaggccttctctttagttttgctacagcgtgtctacaatgtggatttatttttatttaacctctccttgttggtattcatgtctttcatttgtccttggaattttcagtcattatttcattttgttttgttttgttttgttttgagacacgatcttactctgtcacctaggctggagcacagtggcgcgatcttggctcactgcaacctcctcctcctcccaggctcaagcgatcctcccacctcaccctccaaagcagctgggactata

SEQ ID NO: 219679 - DNA, 670 bp, Homo sapiens
acagagaagaaatgccacccaacctcctcagttttgtatttatttgactgataaaagaaaaacttcagctgaattaaatttaaagaagtttaactgaacaaccaacgattcacgaatcaagcagctttcccagccagagtaggctcagagactccagcacagccacatgggagaagatttatggacagaaaaaggaaagtgaggcacagaagcaactagattggttacaggttggcatttgccttatttcaacatgttcaaacaattggctacatttggccaaaactcaatgattggcacaagtgtaagctacggtctgtttacacctccacttgttatagttcacaatgtacagaaaaacctttaagtcgaacttaaaatacgtacagaggcaactttaggctaaacttgatttaacaggactttggagaattgttaatttgagtatattaggaatatagccattttgtgtataaaaaagctatgcgtggttttacaggaacctagttcaagaaaaatcagacatataaaacagactaataaggaagtgcttactctgattagaaaattattcaccttacaggataatttgcatcagagttcattttatctgtgtgcatccgaaatatgattttgtattaaaagtgagtacttattactatcttaaatt

SEQ ID NO: 219680 - DNA, 162 bp, Homo sapiens
aatgacacaaaaggtaggagggagttaaatccagttcaagtatctaaggacttgaccctgggagacacaatgagactgtgcctggaaaaaaaaaaaatatatatatatatatatagagaggataatatatatatatatatatatatatatctcaatcaaaca

SEQ ID NO: 219681 - DNA, 447 bp, Homo sapiens
tctttaattctcttgtgagaatagttttgatctaataaaataggtgtgattttccattataaaaatgagcaaactgagtcttagagaattacagagccagaaaatttttaaaagtgtaaaattctgatctgagattctaacctagttatgtcccattcaaagcccatgttttttcattctagatcatgttaccttgtgggggaaaagtactgtatgtggaaaaacacatagtatatttattgtcctgtgtgtgagctgttaccgtgctttgtcccaacaaaagtccaaagtattggtagcctacaaagattttcattagttcagattacattttcaaagaagactttggtctgctctttgaagtttcattatgtaatcgtgaggcagaaaaacctcattttataaagggccagtgtgagttgaagacatttcctcagtgttgccaaa

SEQ ID NO: 219682 - DNA, 464 bp, Homo sapiens
ttaatctgaaagaattaaaagaaaaccaaaaaacccaaaacctgccagaactaataattgaatatggcaaggtcacaaggatgaactactaatatttgaaaggttaatcactttcctatgtaccagcgcttcataaatgcctaccagatgagttgagagatggatagaggtgtaacacaagctctggggcctctaatctatttgagaggcttttaagataagtgaaaaaccaaaactgaaataacaacaattaactaatcccctgaactgaatagtttaattagtactgtggtaagctagcccaagatcagaaattcacacttcctcggctgggcatggtgtcccatatctgcaatcccagcaccctgggaggccaaggcgggatgaatcacttgagctcaggaggtcgagaccatcctgggcaacacggcgagatcccgtcaatacaaagaataagctgggca

SEQ ID NO: 219683 - DNA, 524 bp, Homo sapiens
atctgagaaagctaaccagatcagtttctggacccacctataactgcacaccatagaagttctcctttaacctgttgatttgtttacattcattaacaatagttccatactacgctgaaataaaatggtattctcagagatacagcattttaaccctaaactaatcagtctcctgatccctagtccaatgtgtcctttattctcaactagactgcctcaacttgataagttcctagttcccaccaaaagttagggccagattttgatgttacagactacttagctaaattgagtggaccttaatatgtgggagccaatattgatattttttgagggaagacacatactttctaatataaaaatttaatctgatactttaaacagggacagatcaaagatatggtcacttttttatccctcccagacatgttgcataacttaatttttataatggatgtgaaattttctaaacgttacaatgaaatcttttttttaaaaagaagcagatataaatttaaaattct

SEQ ID NO: 219684 - DNA, 517 bp, Homo sapiens
tgcatgcaaaatgcattcaccctctcccaacatctccaaaagtctcaacccaatacagccacaactgactgcaaaatctcaaccagggctcttgatctaactcaggaataggtgagattctgggtgtaatccatactgggacaaaattcctgtctgtttgtggacctgtgaaactagcaaacaagttatctgctcccagaatatggtgggtcaggcataggttatcattaaatggaaagaaaaaaggagtctctagttttgagcactttcaaaactcctttaggtttcaaggactggggatagttctctgtgactctttactccaccctgtgggtactgaacttctccactcttgggagtcatccttcttttctaatgaagggtgtagcacctgtatgctgctgattacttttatcagcctgtttcttgcctctggaattatggtggtctgacagcattatttcatttcatattcttttacttcacctttttcctgtcccgttttactgtaaccagc

SEQ ID NO: 219685 - DNA, 398 bp, Homo sapiens
accactcaaaaagcataagcaatacagaagaatgggggtaaatttggctttattgaagttaaaacttttgtttaaaaagactctttaaacactgtgaaaagaccaaccacagactgggaggagaaacacgttatgcacatagccaacaaaagatccttttatgtatgtgtgtatatatatatgtgtgtgtgtgtgtgtgtgtgtgtgtgtgtgtatatatatgtatgtatatatatagaatccataccctacatcagtagggacaacatatgcatcaaatggaaaaatgggcaaaggatgtgaacatttaggtcatggaaggggaaacacaactggcatttgcaaagatggtcaatctcaccaggaaccagggagatgctcgttaaaacaatgagata

SEQ ID NO: 219686 - DNA, 523 bp, Homo sapiens
gtcttcacattcagcccaggattactaaagcataggaaagaggcggggaacatagacacagctcatgtaaacattccttttgtttatggccgaatcctagccactggactacctgaggcatacagatattctttggctatgggctgacatttgaatacagctggggcctcaggattctctgaaataaagggctgcctccctctggaggagccaggcagctcctcagagcagctgcccattgcgtgctggacaaggccatgtcaccacctccatggctccccagtttcccagcttgctgtatctctccaccgtaagagactgggagcaccttgatctgaagctctttgcagtgccggtggcagtgtagggggaagtagttgatgggagtgagggaaaggaattggcaaggaaccctgggcctctgtggctcactgcatcaagcagttcttggcaaaggtaaggtcaggatgggctgtgtcgtcttgggtggggtgaagacagggagcagtgggcatgcagatgc

SEQ ID NO: 219687 - DNA, 615 bp, Homo sapiens
tttatgtggcttctctatgactcaggatgtattggccctagaaagtttggccttttattatcaggctactccagaggttctcattccagcagccagtcaggacctacttccccattctgaaccaggcagtcccctagaaaaccattccaagagactgtggagtactcaacagagatcaggtaccaagtccctgggaaagaaaacaatctccagggcctcaaataagatatacctttcttaaggcctttctactacatttgaaaaaaacatgaggcagagcacttcattgaagtttagcacctttcacaatgtggctagtaataacctgcagagacatccttactctaagaacacaatgaagattttctgcactaggtatgattttgtttccaatacattcaactgtgtgaaaggctgtataattcataaaatggcaagcagggaacaaataactaatttcctctatttacccaatttcagaaaactgccatcttaaagcagaatttattattctcatggcactcatcattcttatgggtctactttagggtccccatgcatgaggctcagctcaagtctctcctctccagtaatcacattaataacttctctcat

SEQ ID NO: 219688 - DNA, 721 bp, Homo sapiens
ttaagaaaatcctgttaggctgggcgcggtggctcacgcttgtaatcccaggacttagggaagctgaggcgggcggatcacgaggtcaggagttgaagactagcctgatcaacatgttaaaaccccatctatattaaaaatacaaaaattagtcggacgtggtggcacgcgtctgtaatcccagctactagggaggctgaggcaggagaatcacttgaacctgggaggcagaggttgcagtgagccaagactgcgctgctgcactccagtgggtgccagagcaagactccatcgccaaaaaaaagaacatcccgttgcaggattctaactatagagacatattacagtagaatatcacagtattaattaccatgaaaatacctatgactacagtttacctttgaaataagaatataaggtaaagaagaaattcaaagtaatcaaataatcaggctgggtgcagtggctcacacttgtgatcccaccactttgggaagctgaggcaggcggatcacttgattcgcctggtcaacatggcgaaactccgcctctactaaaaacgcaaatattagccacgtgtggtggggcgttcctgtaatcccagctgtttggtaggctgagtaaggagaatcaattgcttgaactcgggaggagagggatgcagtaagccaagataatgccactgcactccagcctggacaacagagcaagactctgtctc

SEQ ID NO: 219689 - DNA, 354 bp, Homo sapiens
tggtcaactgtattagtgtttcttaaaagggcttctggtcatccttagggcttatcagtagcatcattaataatgtattcatttcactaaaaatgtggtaagtagcttggatttaaaaacaggatctaatttcaaagctatttccactatacacaccaagttacaactttcttatctctcctaaattctaaattttacatgatttaccaaatcacttcttaagtaagagtacttattgatcagaagtgtgagacaaacaccttatcccacttgtccaattcattcaacaagaccgattgggtacctttgtgtctctgacaggtaactttcaacagttgtatttcttaaacttta

SEQ ID NO: 219690 - DNA, 207 bp, Homo sapiens
accaaacatttgccagtctggttccctctgcatttcaagattacacacccctcataatcctgcaaagcctttcgtatcaatttttctgtgaagcttttcagaatccaccaccactcccaccatcaccccaactccctgagagggcagatctctctctccgtttggcagccacttttaataaagcatttttcactgatactatgagtc

SEQ ID NO: 219691 - DNA, 596 bp, Homo sapiens
tgtgctgtggtgatctagaggatccctgcttgatgtactgctaggttctattttacttttctcacagaaaataatacacagcatactctttatactcagttcactgcagtcatctacctttaaaaaaagattaagtattcactgatgcttaaatcccagattataaataagttaaaacactactaaagggcaggtgcagtggctcatgcctgtaatcccagcactttgggaagctgaggcagggattgcttgaggccacagtgagctatgatggcaccactgcactccagcctgggcaacacagtgagaccttgtccccccgccccaccaaaaaaacaaataaataaaaggagtaagtagggaaataatcagattgaatcagaattaagaaataacatacaattgcaatgtatgagctttatttggtccctaattcagccagcaaacgttaaaaaccctttatgagataatagatgaatttgaacagattggatatattattaagcagcactgccagtttttaagtggagaaagggtaattattttttcatgacttcttttgactattccaggtgaaggtttagaataaaatgggt

SEQ ID NO: 219692 - DNA, 506 bp, Homo sapiens
ggcctctcaaagtgctgggatgacaggcttgagccaccgcgcctggcctattttcagtttcttcaacaaatatatcaccaaggggaaaaaatggatcatcctggcatggtgtctcaggcctgtaatcccagcactttgggaagctgaggcagggattgcttgaggccacagtgagctatgatggcaccactgcactccagcctgggcaacacagtgagaccttgtccccccgccccaccaaaaaaacaaataaataaaaggagtaagtagggaaataatcagattgaatcagaattaagaaataacatacaattgcaatgtatgagctttatttggtccctaattcagccagcaaacgttaaaaaccctttatgagataatagatgaatttgaacagattggatatattattaagcagcactgccagtttttaagtggagaaagggtaattattttttcatgacttcttttgactattccaggtgaaggtttagaataaaatgggt

SEQ ID NO: 219693 - DNA, 824 bp, Homo sapiens
gacagagaatcaattccttaacttgaaaactgggtaatttttttaaaaaaaagcaggtattcatcgtgcctttcctatctcagggtaatcaaatagtagatgagaggaagcatctccttatccacttatgaactaataaatgaaaacaaaattattagaataccatgattttgcaaacttcaattaattaatgaatctaggaattgagcatcgacggctgttaacctcaaaaaagagcaaacaccagacatcatgatcatgtacctcttgaagaaaagaacacacaaccatctataatcttacaaaagacatcaaacttcagtctgaggaagaccctggatcagctgccaacttgctgtcaatacagaggacagagaaacatgctgaattgcctcatgaatgtgcaacccccagactctggaaaacctcacagatcaagggcttaagttatttaacaaataattgtaaggaaaagactgaaaaggcaaatcaaattaaaaaaaaaaagagtggggggaggggtaaggtgcacccttggaagataccaagaaaaacaaaagcagcagaagtgactacatgaaagtcaggttagtggttacttttgggaggagggagaaagggggttgtcattgaggtagggcacatggagaggctcctggggtggctggcagagttctatttcttgatccaggtggtgattacaaggatgttccctttataataattcactagtctatatatctatatatttgttttttgtggttttctgtatttatgttttattttacaattaaaaaatttttaaaaacactccttaacctgca

SEQ ID NO: 219694 - DNA, 451 bp, Homo sapiens
atcaagggcttaagttatttaacaaataatttaagccccagactctggaaaacctcacagatcaagggcttaagttatttaacaaataattgtaaggaaaagactgaaaaggcaaatcaaattaaaaaaaaaaagagtggggggaggggtaaggtgcacccttggaagataccaagaaaaacaaaagcagcagaagtgactacatgaaagtcaggttagtggttacttttgggaggagggagaaagggggttgtcattgaggtagggcacatggagaggctcctggggtggctggcagagttctatttcttgatccaggtggtgattacaaggatgttccctttataataattcactagtctatatatctatatatttgttttttgtggttttctgtatttatgttttattttacaattaaaaaatttttaaaaacactccttaacctgca

SEQ ID NO: 219695 - DNA, 403 bp, Homo sapiens
gttctaatgacacgctccttttttaatgtaggtaaggctttatacttctccttgacctgtagtggcatgagagtgtataacatttcctaagatgacaggcaaagtagaactaaccctggcactgccattagctggaccccaccttctgccatctctggccacgaagtcactttccttgtttgcggctataccacagtggtgggactgcccaggggtaagttggtcagtggacagtgttcctcttttctgaaaactgtctgcacaattgccagcaggcatttgctggttaagatgcaaacagttttaaaattcgtcattttaaaaccatacttggcatctaataactacagtttacccaaccatccactcatcttttaaaaaaaaatcattttgattcttgcta

SEQ ID NO: 219696 - DNA, 437 bp, Homo sapiens
ctgtagacttgtatctgttgtgccaaaagccatacaattatcatatgtctgaccacttgtcttttccttttatgatattgtgggaaatggggaggggaatggtataggaggaagcctgttttttgtcttctatagtggtctaactataaaaatccatagaagggttttgctttgggaatagcacagggaaaagcagtgaaacttacctgtgtcacagggtttgacactggtgagaatccctgctcttcatagatctcactccctggcccaccctacagacccccatctcagacctactcaacataactcactccccagcctatacaaatccataatgaaaggctagaaacaaaccaacaatagagaaaattaatgaaaccaaaagctggttctttgaaaagatcaataagtaaaagttttagctagattgaccaaaa

SEQ ID NO: 219697 - DNA, 484 bp, Homo sapiens
ggaaaaaaacgatccaagggaagccaatcaaagagcctggattgccagtcttccctgctgcgatctccgcctgcgattctccaggggaaatgtcctttatgaccttacagctcacctggaaccctccacctagggcccgaggcagcacatcctctcgtgcccgggcacttccaggcattgccctgagtactgggcacttcacacactgggctggaccactcaccggagtgaataaggaggcttgaagctgtcctggtacaacaatggaatgaagcgctagtctcagctcagccacttggaatatgactccaactctcacatttctgtggggtgtattcatttcagctttttgtttggtgctatggggagggaagggccctcagactggcatcctttttcttccaggatgatgatgaatattatgaaagtctgaggctgtttttaaaattctgctctaatacgttgtttttctgtgcataagaat

SEQ ID NO: 219698 - DNA, 421 bp, Homo sapiens
gattgagccattgtactgcagcctgggcaacagagtgcggctctgtctttaaaaaaaaaaaaaaaaaaaaaaaaaaaaaaaaaaagagtttcctgttggtcttactatctttagagcagtgataaacagtcatttgtttaaaggctttgctactcactgcatgtagtctgtagaccaagcgacatcagcatcacctgggagtttagaaattcagattcttaggccccatccctgacctacagagtgcgagtctgcattttgacaagatccttcatgggtttgtttccacagtggtctaaagtacaaaagcaatccttggcctagtgtggtggcttactttgggaagccaaggcaggaagatcacttgaggccaggaacttgagaccagcctaggcaacacagtgagaccctgtctctacca

SEQ ID NO: 219699 - DNA, 359 bp, Homo sapiens
gagatggagtctcgctctgttacccaggctggagtgcagtggtgcgatctcggctcactgcagactccgcctcccgagttcatgccattctcctgcctcagcctcccgagtagctgggactacaggcgcccgccaccacgcccggctaattttttgtatttttagtagagacggagtttcaccgtgttaggatgatctcgatctcctgacctggtgatccgcccgccttggcctcccaacagtgaaaaacttttaagaaccactttgttctgttattttaatacaatttaactcattagacacctgattaagacttgagttatcctcttcctcccttcctccctccccttctatgtgcc

SEQ ID NO: 219700 - DNA, 471 bp, Homo sapiens
ggactgcctattaggtgctcaggaaataaataagaatcttagatgagacatcccagcagattaggatccaaaagatctgtctggaattctgagatgccataacacgtagtaacatgcacacagcattaaaaggctgttgtggcagaggcatttattgtattgctcaccaaatatccataggcttccccatctgtcccagtccatctgtagtttgttctgtccaaccactgagacagaggtgatatgtgtcccttccaggctgaagtataggacacatgtgaattctctatgcattctctccctctacggccaagatggtgatggcccaaggctccagtaatatagctgcaagtgccagagcctctatcaaccagggtgcttaagcagaattcccatctccacttcccattccaccaccaacctgtatgtgtcatttaatgaaaacacgaaataaacttttactgtgttaag

SEQ ID NO: 219701 - DNA, 396 bp, Homo sapiens
tttgaccttatgtacccaccacagggtcaatattcctggctaccacaggtttcctgggcgtggtaacttgcaaaagccactcaggttgtccagagaaaggttaatgtggcctcatcataactggcccttttagctgagtgtgtcctggccccacccccatggagcagaccttgccgagcaactgttgaatgaacacacagatgccacttcagctttcaggtgcacagacacagcagtgtgcatacctgaacctcatgctaagacactcgcagccattcaagcagtttaagacgctgtctttaggcatgaagctctaaggaggatacaaatttttaaacaatttttgctgttttaagatttttttttttttttgaggcagggtctcaccctgtcacc

SEQ ID NO: 219702 - DNA, 334 bp, Homo sapiens
gtgataatagagttagtatgtgaagggccaagaggattttgaattcaggtcctagagttatttctaatatgctactttgttgaattgaccccataatatggtcagcaatcttcagtgataaaatgtgcagtgctcacatgcagtgtgtatctcctgagcaggtagcctctgaaacagctttggcattgctgtttcttgtcatatcttccattaactctgtgcacattagactcgctaggacttttcagactggaggactctgacactcagttcaaacttcatttggcattcagaaatatagtcattgtattactgtaattagattatcaatgtg

SEQ ID NO: 219703 - DNA, 749 bp, Homo sapiens
tcagttttgcaagatgaagagaggtctgagatggaatggtgtaatggtagtacagcagccatcatgaatgttcttaattccactaaactttacacttaaatgatttaaaaagtaaatgttgtgttgtatttattttaccacagtaatattaattaaaaacaaaagaataaagccacattccagttcatcagtattcttaaagggtggccttaaagttgaatgaatactccagatgtggtaccagatttctctttatgtattagtgaagcctaacacattagcattttacccctttattagttacattgtcctgttgacttgtactgacaaactaaaatctcctggttttataaagaatcctacttgttctgtgctcctctctctttaatttgctgtcatacttctaaattatcgattacatttttcctgattaaatttaatgtcttttttaaaaaggataaaaagtaaattatgtaaactctaccacaataataaaaaggatggaaacactaaatctatatgctttcctgtatgtaatattctagaaaaggctacttcagatttatgaagaacagatcagtggttgccaggaattaatagcaggagattcatttggcttacaaagtgctactattaggaaatttaggaaggtacttaagagattgtttgatactccaattgtggtggttacacagctggctgccatttgtaaaactcacatcctatggcttcaacagagtagcttctat

SEQ ID NO: 219704 - DNA, 336 bp, Homo sapiens
ctaataaaacttattagtaatctaattaatgtctagtcctcagggtatagtcaaagagaataaatttgatggataattttccattgtttctttcatacccttctccaggcaaagctgagaatgagcctaatggtcggaggaattaactgtttccctaagtgcctaatttactataaggaattgtatttgctgcatagaagaaagtaactttttatatgagattattataaaaacaaaaatgtcaggctggtctgttgcttaatattatagctcatacttatttcagatatctttgacatctcttgttaattttcaaataaagaagctgaagccaga

SEQ ID NO: 219705 - DNA, 1096 bp, Homo sapiens
accttgtgaaaaaagtttaaagcaaagacaggattcaaacagtataagactgaatacatatcaaactttacctttctaaacaatacctatttcttttttaactttttttttgagatagggtcttgctctgttgcccaggttgtagtgcagtggcatggtctcatctcactgcagccttgacttcctgggctcaagtgatacacccacctcagcctccctggtagctaggaccacaggtgcatactaccatgcctggctaatttttggtagagatgggggtttcatcatgttgcccaggttggtctcgaactcctgggctcaagtgatctgcctgccttggcctcccaaagtgctgggattacaggtgtgagccaccatgcccagccaacattacctatttctaagcccccgtgcaacatttataaaacctgcaacttatcctgaccacaataataaaaattttaggcaaaaaagagcctggtatcatttattgtaaatagttatgtatgaatattaaaagtacttacccaaattttgctgaaagttgaaatcagaagcaaattcacagccttaaatgcttacatggtttaagaaggggaaaaaaaaatcagataactgtttattaatttaagttaaataaacatgcaaaaaggaccctgagaaagtaggaagcacaaagaataggctcctatacaactgttgaatctaagaagtgtttttgacagaaaaaagttaattgtatcttagagaacaaaagccaaaattaaaaaaaatgtgatatttgactcaggaaaaaaaaggtcaaagcctgaatagataatcagccaggaagaaatttaggagaaaaaaaaatggaaaactgcttaagcaaaaggctccaggcctagataatttagtagtgatttagtctcaaggaacagttatttctcattctaaataaactgttgcagaaaaaagaaataaaaaacagcatcagctataatagcaactagttcttaaagtgcttattatgttccaggcattaatctaagtgcttttacatatattgtacaatttaaacttcacactttagcactggtactatttattatcccca

SEQ ID NO: 219706 - DNA, 835 bp, Homo sapiens
accttgtgaaaaaagtttaaagcaaagacaggattcaaacagtataagactgaatacatatcaaactttacctttctaaacaatacctatttcttttttaactttttttttgagatagggtcttgctctgttgcccaggttgtagtgcagtggcatggtctcatctcactgcagccttgacttcctgggctcaagtgatacacccacctcagcctccctggtagctaggaccacaggtgcatactaccatgcctggctaatttttggtagagatgggggtttcatcatgttgcccaggttggtctcgaactcctgggctcaagtgatctgcctgccttggcctcccaaagtgctgggattacaggtgtgagccaccatgcccagccaacattacctatttctaagcccccgtgcaacatttataaaacctgcaacttatcctgaccacaataataaaaattttaggcaaaaaagagcctggtatcatttattgtaaatagttatgtatgaatattaaaagtacttacccaaattttgctgaaagttgaaatcagaagcaaattcacagccttaaatgcttacatggtttaagaaggggaaaaaaaaatcagataactgtttattaatttaagttaaataaacatgcaaaaaggaccctgagaaagtaggaagcacaaagaataggctcctatacaactgttgaatctaagaagtgtttttgacagaaaaaagttaattgtatcttagagaacaaaagccaaaattaaaaaaaatgtgatatttgactcaggaaaaaaaaggtcattgaactggttcctgttgcagtgtgcttccg

SEQ ID NO: 219707 - DNA, 611 bp, Homo sapiens
cctgggaggagggaaccccattgccaagttccgtgaggcccctggactcagcagtggcttcacagatggcctcacgcatcctccaaacagcagcaccgtggagcccatgtgctggtgggaggcagattcttggccctgcagagcagcttcctgagtgtggacagcaagccaggaggcctgggggaatgccgtcctcagggatctgtgtagcaagacgatgttccgggcagaggagtcttccacacgctttcctcagatgcagtggggtgggcacgggaggttctagatcatgattaatgactataccgccgcgtcctctagcatgcttagctgggccatctcccaaggctctttgccatagtaataatcaacaagaaattgtgggatgtgtctcttctgttggcatctatgaaaaatcgctccatatgttctgccaccacggggcagcaagaacacgctttgccagcttggctgacctgcgcagttgggtgcgtgtccaccgtcatctcagccttgctcctcattgcttgctgcgtgccatttaccacaacagtgctgtgagttgtatgttatcatcctgcattctccgaacactgaacagtttacccagg

SEQ ID NO: 219708 - DNA, 228 bp, Homo sapiens
gactgctaccagagccagactctatcccggggagaaggagtgtacagaaccaagcaggtccttgccacagagcatgggagagaaatggggccccaaagtgtctatgaattgaccgaaaatgaggaggaaaatgttgacgtcatccaattagcagagattaaccagattaggttttctggcacttggcagaatggtaactcaaaataaaaactgagtttagtaaaaaac

SEQ ID NO: 219709 - DNA, 259 bp, Homo sapiens
cgtttgatctgtctaatgttgacagtgggatgttaacgtctcccattattattgtgtgggaatctaagttcctttgtagggaatccttttttttttcctgagacttgggtctcaaaaaaggaaacaaaaacaagaacaaaacaaaacaaaacaaaaagtaaaaaaacaaaactccattaattttcaaataaaggaagaggcaaagttattcaaagcgaacaaaaagacaacgggaattgaggttaaaaaaaatcattaa

SEQ ID NO: 219710 - DNA, 388 bp, Homo sapiens
cctgggaaaaattttttttaatagaatttccccatatttagaggaaatcattggaaaagaaacttcttgtcacttgttccattgaagtgcttttgaatttgaagtattgaatttcagttgtttcccatgactgtcattgtccaagttaaacactttgagaatagtgctcgtatgtttcttcttcttcatcttgttagggctatctatggttttttatttatttttttatctgtgcaacaagatctctgactgtcactgtcctagcttagtgcagctactcgggaggctgagccagtagaatcgattgaccccaggagttgtaggttcccatgccccaagattgcccccctgccctccagcttgggcggcagagcgagactgtctctta

SEQ ID NO: 219711 - DNA, 446 bp, Homo sapiens
cccacttctcatcacactacctgaaatgccaccattagagacttatcccacactgtctgctgcctccaagatgcatctaacaaatgtagaaacccagggaaggaatttactgtttaagcttatttatagaattatacagtaagagttgttgtgaatgatcattgggtaactttacagatggggaaactgaggctaggaaaggaaatgtgactcatcttcccactttcatagagagatctgtctacagtggtctgaaagcaaagctgccatgctgctatggtctcaagggttatgttcccccaaaattcctatgttgaaattctcacccataaggtgatgacattaggaggtagggcgtttgggaggtgagtaggtcatggaagaggagccctcatgaatggggttatgtgccctaatgaaagagcactgaggctggatgcagtggc

SEQ ID NO: 219712 - DNA, 677 bp, Homo sapiens
caaccccatgaaaaagtgggcaaaggatataaacagacacatctcaaaataagacatttatgtggccaagaaacatatgaaaaataaaagctcaacatcactgatcattagagaaatgcaaatcaaaaccacaatgaaattccatctcatgccagctagtacaaattgctcatattttaaaagtaaccagtatcaaattggaaaggatttgatttaggagccaaaccaaggctatcatagtggaaaaaaaaaaaaaaagaaaaaaaaagacagaaccttaacaatggatctgcagtgtggggcaacagccattgctcttaccattcggcttggctagcaaaatgtggccctgttagacaaataaagtcccttttttagtcaaaagaaaaaaatctctcccctttttattttgtgggaatttagacacttcagaggccttgttcccataaattggaactttccttcagatttcatcatgtcagatagagttgatcaaacccagtaggaaaaagactgaaacaataacaaaaacagaaacaattacaaaggcaacaacaacaacaaaaaaaaacaattaagcaaaacaaatgaatattacaatttatatgaatactgagcactctaatggtaaagataaattaacaccagctgatttttaatcttaactttagcccaca

SEQ ID NO: 219713 - DNA, 674 bp, Homo sapiens
tttagtgtgtttgaccactgaggctagctgggaggtgggagcctggaaccccaactaatgtttgctcaggacaagagagttcacaaaacaagacacattcacacctcataatcttatgcaattgtcccacggcctggtgattttagcaaggagataagtggatgtcagaaatgaacgctcgagacactgctgggtgccggttccacactgacactgtgctccttggtttaatcaactcatcagccttttggaggctgcagcttttgttactagcattttgctgctgtgcaaaccagcttagagaggtgaactgacctgtcttaagtttgcacagctaagaatggcagaagctggagtgggagtgagaaggggaactgctccttctgaacacctgaagaatatttccctgcaggctgggcgaggtggctcacgcctgtaattccaacattttgggaggctgaggacggcagatcatttgaggtcaggagtttgagaccaaccccgggcaaaatggtctctactaaaaaaatacaaaaattagcctagtgtggcggtgggtgcctgtagtcccagctactcaggaggctgagacatgagtatcacttgaatcacagaggcggaggttgcagtgagccaaggtcgcaccactgcactccaacctgggcgacagagcg

SEQ ID NO: 219714 - DNA, 649 bp, Homo sapiens
ctctgagggttacagctctataggtaaagtcatgccacccctaggcctacatttcaactactttgccattgggagcactccatctggagttcctttttaccagtttttttcattccatgctgttctactaattcttccgtctttcgtgtctttgctatgtggtgggctctactgcttgtaacttgaggaaaacaatcaaacattatttttactttctaggagggtgatggagaggttaactatcaaagtttatgttttattttgcatacctgaattttacaaagtaataataaaccagttccaacccagctgttgttaggacattttccatatctataaatcataaatgtttcaaaactggtgtcattcttcttgttagagactgaggataagagtaggtatgaaattttgtgagcacaggtgatattttcctcatccttattttccacatgattggaagaaaagagactgaaagaaaaccctatgtactaaccaaaattgtttccttaatgtctctgaaaatgtacgtgcattttcaaacatgttgaagaaataaaagatgaccacatctccgtagcaactcctttataatattaatattctttccttgttcctcttcccaacatgtatgtacccacagaaagcctca

SEQ ID NO: 219715 - DNA, 408 bp, Homo sapiens
gtaacgaatctcactgatcttcttttcactttaaataggatgggtattgtctcctctttgtctggatttctgcataaagggctagatgaagattattgtaggaccagcagcttatacagctttgaaaaagtgacaggtctacgtgtgtaagtgacagtgtgttccgctagtgatcccagggaggatgaaatggaggtgtggtgggagatgcttcacatttagtagcatctagtagaaggcatttgttttgttaattatttttatatacattacaggagaattagaaaatgctgaaaaaacaaaagcgtacaaacatctttaaaaacaaagacattgtatcatgttgtaaatactgtttttaaaacctttttaaatgtttaaaaaattgcagatatatagaaaaattga

SEQ ID NO: 219716 - DNA, 414 bp, Homo sapiens
atgctgtgtcaccacccaactagaaaaacccatcggaaaccccaaggtcacttaaaatctactcttttcctgattttcgaaaatccaatacattgttgttaactctagtcattatgttgtacaacagatctcttgaactactcctcctaactgaaactttgtacttttgaccaatatctccccaactccccccagcccttgccctggtagccaccattgtgctctctacttccattagttcaacctttttagattccacaaaaattaatttgtgaggtagtgcatatgttaattagctcaatttagccattccacaatgtacacatatttcaaaacagcatgttgtacacaataaatatacacgattcttgtcagtttaaaaattaaaataaatgaaaataaaaattaaaccaa

SEQ ID NO: 219717 - DNA, 530 bp, Homo sapiens
gtatcctagaaaaacttttaccccgtgtgaatgggaaaacatacagcaatgtaaatgctgcattattttgaaatactaaaaacttaggataaattccatataatggaatgcttatgcaccaattaaaattagagctacaacacaaataactctcaaaaacataagattgacaaagaaaaaggaagctgaagcaggttatatacagtataccatttatgtgcttttaaacatgaaaaattatattgtttaagtgatacattaggaatgcaaaacattcaagttttagataatggctacctcttgaataaaggggatttcagccatatctagtatttattttttaaaagtaaatatgataaaatgtttccttttgtcaaaggtttccttttgtcaaagctaggtgttttccctatactctttatgttcaaatgtgctttagtgggtaacagagagtcatcagtaacctagtcttgaaagccatcagttgcagtgggttctgcctataaacccagaggtgaatgcaaagcaaa

SEQ ID NO: 219718 - DNA, 377 bp, Homo sapiens
ctttgcaaaaattatgacaatgagaaaaatctgacatagctgacaccaatttgcttctaacttcacaagctaacaactacccttgcccattctggagcataggccaagctaactatgggaggaattagtctgtagtttaaccttaaagtagggatgataatagcccttcccaaaactaccccttcattgtttgaggactgacaccgcctttgtaaaactaatgaaaggcaacaaaattagaattatgggagaggcctgaattctgctaagatgtagccataaacaataaccaaccacggttccagaggtcagatttgtatcttccccacttgctcctgtagataacatcactattattaaaaccttggttctgttta

SEQ ID NO: 219719 - DNA, 576 bp, Homo sapiens
ctgggcgcagtggctcacgcctgtaatcccagcactttgggaggccaaggggtgcagatcacctgaggtcaggagttcgagaccagcctggccaacatgctgaacccccccccatctctactaaaaatacagaaattagcaggcgtggtggtgcacgcctgtagtcccagctactcgggaggctgaggcaggagaatcgcttgaacccaggaggcggaggttgcagtgagcccagatcatgccactgcactccagcctgggcgacagagcaaaactctgtctcaaaaccaaccaaccaaaaactaaaagcctctcgcactcccgtgtgtattgcagctttattcataagtgcctagatgtgtccgtcaacagatacatggatagagaaaatgtgtacatacgcaatagaatactatccgaccttaaaaaaatacatatcacaaatccttatcccacccccaacacccaactccctatccaacttaatcactcgcacacactatctcatgtggccgaatttcgagctaacttggcctcgccctaaggcgagccgattacttcactgcccgccgttcc

SEQ ID NO: 219720 - DNA, 438 bp, Homo sapiens
ggtgctgggaaagaacggtgagcaaaaccaagtaagatctttgtgctcttaaaacatctatggtggtgaggagattgaaagggaagagaatagacactaaaccagtagccagtacatacggaagaattccagatgctgacagtgctctgaaggctctgaggcagctatgacggaggaccacaggggacacctcctgggacagcagcagcaggggagcccagacatggaggaggacagctggagtaagtgtttcaggcacacaggacaaaagcaaaggccccaaggcagccagcggattggctgttcaggcgcctgacagagagccagtgtggacagagcatatgcgagggatggggaaagtggcatgagaggaggccgggtgatcacagcaggttttgcttgtatatgcagtgcagtgggaaaccactatcgggttta

SEQ ID NO: 219721 - DNA, 329 bp, Homo sapiens
cccagactcttggattcccagctcgagagtcccagaaggtgcactttgaaggcatgaaaggtgcaggcatgatgaagttgtcgtcttagcgcctgcagctgccgggtctgcacagcaggaagaaggcaggccagcccttgcaggtggggccaatctcctcctagactgatgagaacttaacaaaggttttctgtgtcttggcgaccccagacacatcaacatagagtaaagagagggctggactaaaggtttgtgagcctgggttcctaatcctaattctgtcacaatcctaattagccccatgattctagaggcctctaaactgatat

SEQ ID NO: 219722 - DNA, 740 bp, Homo sapiens
aagtgatgtaacattgccagcagaagtgaggttcatgcagaaaacattcctgctctttattttaatcaataacctcctgggtgaatgacatttccaccttagtgatttaaaatcagaagaccaggggatgtccgtgcttgtgaatcacccggggttccaggaacaaagaaggcatttttgttttttgtaatttccccttcacactacaaacaactgggctctgaagttgatttcatttagcagtcaacttctgtctagaaaaatgtgcacaactgaaccgaacaccgttcttatttaaatcggcaagcgatttgcttcagctgccatctgttggccggttagctattttaatttgatgctggggacattacctgactttgtatattgcattttgatctgcatcatgtttgagaaatatctgcaaatgactctaagggagaggactttgaaggattctatcgaacaaatatgtacatatgtttagtgccgtgctgggcagaggagtgtgggaatgtaccagcgtgtatataagacagtgtgcatcttacctaataatctttatggccagattgagaataaatttttcgaaattttctttcttccgcatttccaactgacccttatttaaaagtcattaatgttgagctctctcatggtatctttatccatttttctaaagctgcggtttctcaggttatcaagtttataacccttgtgagcaagtcacggatggtggagga

SEQ ID NO: 219723 - DNA, 776 bp, Homo sapiens
tggtgctgagaaacaggaaatacttcttgagaattatgactgggaaaggatttggggtatgattattggcacatggaagcagaaatctaactttgtgagggaatttacaaagaaacacaagccaggactaaaaacccctttcattgttcaggtgaggaaacagctttgaggaggaaagaaaatatatcagagagatacctgcaccctcatgtttattgcagcagtattcacaatcgccaagatatggtattaaaatgtgtccagcaacagatgagtggataaagaaaacatggtgtacatacacaacggaatagtattcagccgtaaaaaatgaaatcctggcattcacagcaacatagatggaaatggaggtcattatgtgaagtaaaataagccatgaacagaaagttaacaccacatgttctaattcatggaagctaacaaaagatctcatggaagtaaaaaacagaatagaggatactagtggctggaaagggaagagaggaggaaaagacagatttgttaaaggacataaaattaggaggaacaagttatagtgttttatggcactataggatgactatagataacaataacatattttcaaatagctggaagagaagatattgaacacccccaacacaaaggataaatgtttcagatgatggatatgctaattagcctgatctgatcactacatcttgtttgtatggaaacatcaaaatgtacatgtgtataattatgtattgattaaaaataaaatttttttaaaatta

SEQ ID NO: 219724 - DNA, 366 bp, Homo sapiens
gaatagagcgcttgttgaattaaaaggaaatgatttttgttgtcactttggtctgatggaaaaggaacacctgatgtgtgtctgtctccactgcacagacactggcatagttcttacattccccaggaatgagaaggcttggttcctgtccagaaagtgtttgtgatgtttggctctggtaggtgtgactggaaacccgttttctcagccatattctccgtgtggcatggctcgctgtctgaacctagccttgtggataaatatgtctagtggatagatcatactttgctgaaaaccaggattccttggttcttttgcctacagcttactgacttgagtcattttttacttctttatgcaagaatg

SEQ ID NO: 219725 - DNA, 494 bp, Homo sapiens
tctggtccttgaattgatctctgtgactaagacatgctgctctttatctttgtttttccaaaagcactttttgtgtttagagagttaaacagcatgatattttcttgtattcagaaggatgatctagtagtcatttgacatttaccattgcttttgaatacaaataacatccaagtgttttatgaaaagaggacactgactatttctatcagtgatttaaattaaacatctggttattacgtctcatccactccctgattctaagtttattgaaatttttttgtatttatatcagtctttattatttcacatccaatttggtctacaacatttttatatgtttgacgcggagtccagaagcagcatgttttgggtgtaacagctgatgtgtaaaaaactggtctgagcattgttatagcaatatacttataatggttcttttattctttttttgttaataagaattaaataaaatctaattgattttaatagat

SEQ ID NO: 219726 - DNA, 552 bp, Homo sapiens
attgtagaggatcttcagggacaggctctgggcatttagtgaaagggacagcgattcctttgcctatactctggtggtttagaaaaggacctcagggaacatttgttttgttttgttttgttttccttttgattaaggcatttggggtctagaaaagaagattcaagcaggatccatttaatttatttagtttgcctcacagacatgaagcttcagaatggtcgtcccattccacctacatcctcgcctagtctcctcccatctgctcagctgcctagctcccataatcctccaccagttagctgccagatgccattgctagacagcaacacctcccatcaaatcatggacaccaaccctgatgaggaattctcccccaattcatacctgctcagagcatgctcagggccccagcaagcctccagcagtggccctccgaaccaccacagccagtcgactctgaggccccctctcccaccccctcacaaccacacgctgtcccatcaccactcgtccgccaactccctcaacaggaactcactgaccaatcgg

SEQ ID NO: 219727 - DNA, 318 bp, Homo sapiens
aatagggtgaggctcaacatgagcacttaataaatgctcagtttaattgtggtaattgtaattctcattggtatatatttatgtcctgatcctatacctctgttattaatgagactgataataggtaagtgaagggaaaactcggcccttaccctgactgactctgacaacgaaaacaaatcagatgatgagaacggccctccgaaccaccacagccagtcgactctgaggccccctctcccaccccctcacaaccacacgctgtcccatcaccactcgtccgccaactccctcaacaggaactcactgaccaatcgg

SEQ ID NO: 219728 - DNA, 347 bp, Homo sapiens
cagcttttaaataatttcagttagggggttccttttaaccctttgggtaggtaacatactgggtaccccaatatgttacctactcccctcttccatgtattttgtattttacgttactaaataataatagttacaagttagagaccgtttctatccacagttcatatctgtaactatggtccaaaagtgctaaccccagaataaaatgagtgatctggctaaaggaaaacatcacatggtgaactgataagaggagcttattgtgaaagtctctgaatatagcgtagtgccaaaacattgtttttcaatgtcaaaatagagttcactggaaaatttggagctgaatt

SEQ ID NO: 219729 - DNA, 551 bp, Homo sapiens
tgtgtatgtgtgtgtgtgtgtcgagacagagagagaaggggagagagagatttgttataaggctttagcttgcaaggctatagagaccagcaagatctgcagttgctaaggtggagacccaggagagccaatggcacagttccaatacaaatacaaataaccagcaggccgaagacccaggaagagttgggtctgggaaaagatgttttagtttgaatccgaaggcagaaaaaagccaatgtcccagctcaaggcagtcaggcaggaggaaatttccgcttacttggaggagggtcagctttttttccctactcaggtcttcaactgattggatgcccaccccccaccgccatatcagggggaataatctgtgttactcagtctactgattcaaatattggtctcatccagaaacaccctcacagacacacccagaaaaatgtttgaccaaatgtctgagcatcccatggccaagtcaagttgacacccaaaattaaccatcacagtctaccccttgtcaacttggcacacatatacatctctttaaacca

SEQ ID NO: 219730 - DNA, 665 bp, Homo sapiens
aagaggtggggaagggtactggggcagagagatgccgatcgatagaaacagcgaggagagacggagagagaccagagactcaagggcaaagagagacgaaggaccggcgggaggaagagagagagagacagagagacagactcacagactgggaggaccggagactcgacgcgaggagagacagtgaaaataagtgaacaaacatagagacacgggtccaagttataagagggctgagtggatcagagggtcagggccgggcaaacaggtgtcagaacagttagcaagagagaggcagatcagaaagggatgcagatgaaagagacacaaagaaggaaacgcagaatgggttcacagagacaagaaatgcagatatccagactcaagaggtagacaagaagggagagggacagaaacaagaagggagaaaagggacagaaattagagatacagtaagatggattgacagttttcgaagacctagagaaagatgacagcacgaagagagacagggagaatccgaggtaaaactgttaggaaaacttaggagtccagatgctgtccagttatatgctaccctgtacaggttgataggttgcaaatgctttctgtccagtgtatcgctttgtagctcactaagcagttttgtatccaactttgtgctt

SEQ ID NO: 219731 - DNA, 129 bp, Homo sapiens
aaacatgtcagtggctcagaaagaaaagaaaatttgtcaatacaatacgtattaattaaggtaaaagacctgacacgggatgggcgtggtagctcacgcctgtaatcccagcactttgggaggctgagg

SEQ ID NO: 219732 - DNA, 2228 bp, Homo sapiens
  misc_feature (1242)..(1242): n is a, c, g, or t
ggaggggaagatgaactaatataggtagtctgccatatgggacatattagaacagtgtggtaggagtaggccaggagagtgagctgtctgttcatgtaacttacttgtgccttaatggcacttatgttagaggaaataaagacttgattttttagtggaataggtcagatgcagctagttagttatgggcaactgttttttaattgtttattaagatgaactctctgtgttctgtggtcagacctttaatcttcatcaagatccagtagcaagtaagaatctatctagctgtttctgaaaaggacagtagttactcacctaagaagtgagaatcctaggcatccccattatgttctttttatgaaggcttgtatattctgtatagcaccctaatctgctgtagactctttgagtatcattgcatctgccagtttataacatgtataaagtatttcttgtttagagaatcctactttgagtaggattagagtaggattctctactcatagtttcaagcttttcagtttacttggtattgtgtcagagtataacaccaatatgtgatatgaaagtgttgggatgaggttcccacaagtatgtctaactctcttcctttgcacattttcagattcttttctttatattgtgatatagttttttccaattgttttaaagtcaggtttactcaggcaaaattaaaattatgtaatcaaatgcactgtgaaaatctaccaacacataatttaaaaaaattaaacaataagaatatcaaattccaacaattcctcaaattgggattatttcatacttactgcatttcacccaaaaagcaggttattcttgctgttgttactgtttttggttgcttttagtggaatgaagtgttgtctcaaatgtccttgcctatcattacacaaagcctccatactcaaaggcctttaattttttttttttttactctagctcaagcttcctggactcaggaggctttttgttggttagaacttcttagcatagcagaagtttcctgtagcccttgagtgactttggttaacttggttgaaaatttcccccaatctctacacctttcttcacccctagaagttgtttatctacctcataatcaaaacaaaagcatgcctttatttttaatagaaatttctagcagcatatgtaatcttagtcttttagctttctttccaatctggccaatttgggcgaacataaaccccagttgcttangtatgaatagggacttgcagtatgagggctgccattctcttccttcagccctgcctttcctgttatccttttgaattaatttcattaacaaaatgaattcagagggttttttttagctctctccagaagtctgaactccctcagcactgttttgccataaatagctatagcagtaagttgttccaaatgatcctgaagaaatctataaaatttaactggtacatatcaaatagagactgaaacaaatgaaatgatagctttatcctaatgttgtgaccaaatatcagataaattcacagctttatttcaatcccaataaaagttaaatattttttattgaaaatcaacataacactatcaaattaatctgaaacataaatgttgagaatatgaggtcatttttaaaaataggaacagacactgccaaatattaaggcatattttaaaaagacaatgtgttttttaaaaaatattttattcaaagtaaatttagaaattattaaaacaatatgatcctgaaatgataggaagttaacttgcagttagaacttgcagttagaagtaatcaattaacttgaaagaaataaattaaaaaatataacaacataaaaatcaaattaacttaaaatttttcaacagattaagaggctaaattaaaataaaatcttagaaaaagtaggagaaagtagaaattgatatttaagatatcaagaaaaggatggaaatcctttaggaataaatttgtaatagcaatgattcacactcacagcaatgatgagtgactcctgcctcatccattgtcctggattattgcttctttaaaggaacagaaagttatcacaagagagcacatcaatagattttaccgtacagagttctttgaaccaacagctatgaattttttctctgtgtgccaagcatagtgtctttctggcatgcattcaaccagtatttactatttgcttcaattatgttggaacctggag

SEQ ID NO: 219733 - DNA, 638 bp, Homo sapiens
tcacttcactctcatcaggtggctattttcaagacagacaataacaagcttgaataggatgtggagaatttggaatcttcacaccttgctggtggaaatgtaaaatggtgcagccactttgaaaaacagtttggcagttcttcaaaataataagcatagagttacccatatgacccagcaattccactcttggatacatacccaagagaaatgaaaacatacaacacaaaaaaacttgtgtacaaatgttcatattcataacttgtgtactatattacttactatagccaaaaagtgtaaacaatccaaatgcccatcaaatgaagtgtaggtaaataaaatgtggcatatcgtacaaccaaataatatttcaccataaaaagaaatgaaggtcaggcactgtggttcatgcctctaatctcagcagcactttgggagctcaaggtgggaggataacttgaggccaggagttcaagaccagcctgggaaacatagggagagcctgcctctacaaaaaatttaaaattagccaggtgtggtggcatgtgcctgtggtcccagctactcaagaggctgaggcaggaggattgcttcagcccaggagtttcagcctgtagtgagccacgatcatggtactg

SEQ ID NO: 219734 - DNA, 311 bp, Homo sapiens
cacatagtcgcacacacacacagaaggacacacacagccaaacacacagacaggcagatgcacatacagacaggcagacaccgacaggcagacacacacagtttcatgcaaacacaggcagacacacagccgtgtgcacacagacggacacgcacacacaatcgcacgcccacacagacacatagccacatgcacagacaggcagacacacacagctgcatgcacacacaggcgaacatgcacacaggtggacacatacaagcagatacacacaatcacatgcacacacaggtagacacacagtcgcatgc

SEQ ID NO: 219735 - DNA, 305 bp, Homo sapiens
gaaagaaagaaactttgtacttactgaacagcaaacaacagactatcttttaaacccattttactctgcttagttttaaatattgagtgcaggtgggagaactagatatgagaagaaccacctttttattattggaaatgaccaagggcattgttttggttaaagtaattttaggatgtttccattgaccattgatatcttacatacatttcctgttttaacttcggagcgagtcattttgaaggattttgctggactttcagaacgtgtgatttgttttaacggtgctctcgggctgccatatg

SEQ ID NO: 219736 - DNA, 761 bp, Homo sapiens
gactgcataactaactttcaaaatgtagctttaataatctagtggtaatatttaacgcttggtttatggagactagtctagctgtcagctgtttgaaatagcaagtatctttcattaaataactttacagaattcaaaggaaacagttgacatccagatactgagatttttcaacaccatttgttttatactatattaacaataaccttaactataaatttcagagctgtgaactttttaaattagattgactcataatatcatttatgtaactttctcttcaatgagtgggattaacaacctacataaactagattttgcattaaaggattttatgttaaactgtagctttatgaccaaaatttgtgaaaattatttgaacctggaaaactgctaaaacatgcttctatgtatttttccaaagcttagccatattttctctaccagtccaagagccctgacaggttaattataatcatggcttgtttcatctaaatatgacatgaaatgtgagctattaaaattctaagaattctgtcatatggttaagactgaggtaggttttttgtttaggttaattaagcacttctccctttatatgtaaaaacaggttgaatacaattatatgaattttggtaattattgtggatgagcatgttggtaacattatctctcaaatattaaaatagcaggccgggcacagtggctcatgcctataatcccagcactttgggaggccgaggcgggtggatcacctgagg

SEQ ID NO: 219737 - DNA, 535 bp, Homo sapiens
ggcacatagaaggaatccactatttaatagctattataatagattaataatattcatgtattttgccattattttgcctcaacttgacttttgtattttaagcctttctcctctaccaggattaaaagaccttctgtatctgaccctcatgtagcagcaagcatgtgtgactggaaggaccccactatcaccctttgaatgaggctggtcccatggcaatagtcaaatggctggtgcagcccagtcactgccctggcactaccctgttgtagcaaatgctggctgatgaactgttctggtacattcccgctggaatgtcagagtgtcagagtggtggacagtccagggtgtctcccctccttcagctgcctctctgtgccttgtaagatgaagacaccagaagcctgcctaccttggctgcaggaaacctagttccagaaaagagtttttgaaccaagtgcccttctcttccttgaatgaatcctctttgtctaacctttctggtaagatattaaatgctggttttgtgcttgca

SEQ ID NO: 219738 - DNA, 396 bp, Homo sapiens
aaccctttttatttcagctgatctaaataattagttcagatttaccctgacaaatggcttttaccatttttagtttcttaccctgtaacaaaatactgccatcaagttttgattatgaaaatggctgaaggcaagggaccatatgagagagcgcaatcaacaacatagtctttttgcccaacagaattggacatttttggcttagagaattaaagcacaatgactgttcctgaaaatcagtacagtagtcataataaaacttttttcttggctgggcacagtgttgcatgcctgtaatctcagcactttgggaggttgaggtgggaggatcacttgagcccagatcttgagaccagcctaggcaacacagtgaaacctcgtctatgctaaaataaa

SEQ ID NO: 219739 - DNA, 777 bp, Homo sapiens
ccacattcagcttgggtaggtaccttcatagtagctcatggattaattgtccactgcacccaatcatagtcatttttggtttgggttgtcatatgctccccaatagatgaagaagagaataactcttagccgacttcatcagcaggtagggagagagtctctgatggagttatatttcattattcctcacaattgcatagtgccctcttacctcaaaaaaaaccttcccaggtgttttcaaaggaattattttattcctccacaacaagcctgtgggagtcggagcaaaaggcaaagtgattacctgagacattagataactcgccaatattcaccctgctaacaactgaggggccttgggcttgatctcctgcttccgaatcagggcttttcctgccatcttgtcatatccaacccattgcatctgctcatgcactcaagtgaaaggaaaaaatgactaggcaaaatggacacatcttagaggtggaattaactctttttttatgttgagggatgtttctggcaaggtaactagcaacgtggcctgcacttatagttgttcctgcatgggtgatgaaagagatgctataaaactaaataaaaccaactgcctccaagggagggatccgttgactggacaagtgttattccaaagtctgggttattatgagttgcaacgtaaaacattacataagaagatttgaaggcaatattctgtgctctgaatgctgctcaaaagaaaatacttttattttaagtaatattcttttgatgatc

SEQ ID NO: 219740 - DNA, 316 bp, Homo sapiens
gggaatgtcgggaggggcctctcgggggactcggccgcctccagccctaatccggctcctctgggggactcactccggggccatcgcaggagcctctgcattcgggcgcgggcggctccctgactccatcccgagctggaagggccggagccactgcctcgcacggcggggtaggaactccgcgtcggcggcgggactggtgcgtccccgccaagccaggctgtccccactgtggccagggcgcgggcagagccgccggtgactgtggcgcccaaacctcacggggacgccctgagcacgggcccccgggacggtc

SEQ ID NO: 219741 - DNA, 664 bp, Homo sapiens
ccaaatttgctctcttatggccgggcctgtattggagaaatcctgttacagaaacaattcaaaaatgttgatgttgtcctcaaccaatctatatgttttaatatcagagttcaagcacttgcttcacttgtattttaaaagcagccacattttctgcacacacaaaaagcttaaattgttcaaatgttaaatcattctaaaaggcataccaaccaatggaaatcagattgcaaattggcagactcaaccagcaaatgtgtttatgtgacccacacagtatttttaaaacatttagttgccaacattgtcagatgtggaaatttcacatcaaattccaaatgtccatctcttcttttgaaaaactgaagactatggcaccatcaggcccccatttcctagtcagagccaagaggtggcatgtgtttttccagcagtttaactgaagaatgtgggttgcctttttggtactttttctccctcaaataaatgagctaaataatgaagctcattcatagatggcttacacatttgcctcccttactatcatcttaccatgccatcaataattcaacacggaacctaattgaagcttaaccaaaactgtgtataaaccattggccattaactaaagagaaagttagataaatttctatttcttattaat

SEQ ID NO: 219742 - DNA, 437 bp, Homo sapiens
tgacagatgctccaggttcacatccaagttttggggggttgagagcttttccatttggatgtccttctttaagaacaagaaggtaaaattgtgaatacggaatgagatatggggtcttggtggggcccatgccagcaaggggcctgaagctcctcattagcttccgatgtgggggtgggggagtagaagtgggcagtacaggaggaagtgacaagaattctcaggggtggggagaactgtgtcgaaaataaacaaggaagtgcaacaggaaatgactgggtggcttcttcaggctgggtaggacgctgctgaatttatctgataaaaatctcctctctgtgagttgtggaaagtggcttgctgcgagagacccccttcttccccacataacataggtaagagtgatagaagtgatgcagctgggcgctgtctccaaa

SEQ ID NO: 219743 - DNA, 441 bp, Homo sapiens
gactgcagtggtctaaattcatacctgcagtatctccaaagtgtgcctgtagttgagattggagggtactctaaacaagaattaggtaaatgtgtgcatactgaacacggagccagcagaactcttccccactgggtttccggaaccctaccatccaagccttcactctccaggtggtagtttgaaaataagtcttctaagggaaatttgagtagcccaagtgatagaaactaaggatgatgagttgagggtaccctcaattctgcccaaccatatcaatctacaagtaaaagataaaattgagaaaaatctcccagaaagaatgaaaaaaatggagatggtaaataagaggaaaaaaaacaataaaacccaagataatcaaatgactagttttggcagcagtacatcttaataagagaaatatcaggaagggagaacaga

SEQ ID NO: 219744 - DNA, 456 bp, Homo sapiens
tcaagttttatttattttttattttagattaaaattattttatttttataatttttattttctttttaatttttgtaggtacatagttggggtatacatttatggaatatctgagctattttgaaatagacattaaatttgaaataattttatcatgaagactagattatacattatgccaagcattttattcattgagtagcaaacaacccatttactctcttttgttacttttaaatgcacagctattattggctataatcactttgtgtgctatcaaagagtaggtcttattaattttttctattttctttttatggcttaaacatctccacctcctgatcagcttcctattattctttccagcctctggtaaacagccctctactcactatgttcataagttcaattgctttattaggtttcacaaataaagaaaatgtgtaatgttttgcc

SEQ ID NO: 219745 - DNA, 778 bp, Homo sapiens
ctggatcagttccaccctatacattttctacttctgcataaagcctactgagtgatgctgtggaaaattataaactatagagattgggtatgttttcagagtcttggtacctaacctctttggacctttagtcctacttaatctgtttccttttccttcactttccccttagcgacaattttaaacctatatcattcttcaagactctcttcccccgctacactccttctcttcacacttctcagacaagctcctttgtgatttcatcaagaaaaatttggccatcagatgtggattactaccaagtatcttggtttaactaaatcctcctgtaaccctgagttctcctttaactcctacattctccccttcccttcttaaccaagttatttttaaaatgtagtacactcttactgtctccacttattatttactcaactcactgccgttctttgggtgcttattccctcagccttcacaccaccagtctaccacctcactgtaactactactcacagtggcaaagtgacttctaaatttgtaagtccaatgaacatctttatttagctcctttgacatcactctctcctgttcattcttataatttgctgtcctttgctttggtggacttttcataggctcatctttctctaccatctttctttaaagaatggcattctccagggttttatcagtatgttgctattcctgtgcccacccatacattatcttcaggagatttcatccactctgattattttgactatccacccccgtg

SEQ ID NO: 219746 - DNA, 346 bp, Homo sapiens
tcatcttgaccagatcacatggctaagaatttgcaaatattaggttggtgcaaaagtaattgcagtttttgccattacttttaatggcaaaaccatgattacttttgtatcaaccaaatagttcttagatttgcaatgaggagaagtggtagtatcaagtgtggatgagctctgacaagaagaagcattaatgtctttgctatagtttggatatggtttgttcgtccgcaccaaagctcatgttaaaatttgattcccaatataatggtattgggaggtgggtcctagtgggaggtatttgggtcatggaagcagatccttcatgaatggcttagtgttgttcttg

SEQ ID NO: 219747 - DNA, 419 bp, Homo sapiens
gtgggaactctctgtagtaccttcataatttttctgtgaatctaaaactattccaaaataaaaagtttatttaaatttttaaaagactgacatattgtcacatcgactgaaacagagttccctgcgtcaatcaatacctctttctctctttcccacacacgcctatctgccaaaccatatggcaaaaagagtccttttcctgaaacataagaatacttaatccttcaagccactgtagtatgaatggaattggacttattctgaaagttttagatttcccaataatacctaggtcatgccctcagtaatatgggacaaatgctcaaaagagaatgtcaataaacctgtatttcccaaaaactttaaaagataaaccatccttcaactgcatttccaataaacttatattttgtgtgagt

SEQ ID NO: 219748 - DNA, 569 bp, Homo sapiens
gacacttccctgccttctctgctcctattattttccattgcattggaatgaatctctcaactttgtttctttaaaagtaaatgtttatgctccttcaaataatttttcaaatccttaaaatgttatatattagaaaaatatacatgtaagttaagatgaaaacccagtggctgactcatatctataatgtgtaacaatgttgtcatcctgtgctccctctttcacacctcacgtctttaaaaagttgtcatttgtcaattttctttttgatgaatttttctttttttttttttttttttttaccaaaagaagcaatttcaaggaggaacattacttcgcttaaggaataatgaagaaatcttagtgatatgttgtaatatttaaataagaaacaaccggatgaaaaaatagtttatcaaggcaaatttgctgtttggaagggacacccagaataatcagcaagttttagagaaaaagggctcaaaaaatagttcattagcttaatgacaaaatacaaaatgtttgattagttgtaatccaacattttttaagtattttatcaccctttc

SEQ ID NO: 219749 - DNA, 505 bp, Homo sapiens
atggaatattatctggccattaaaaggaatgaagtgctgatacgtgctataacatgggtgaaccctgaaagtaccatgctgaaagaatcgagttatgaaagattacctattgcatgatttcatttatataaaatgtccagaacaggcagatttatagatctatagacagaaagcagattagtggttgcttgggcctggggaagagggggtggaggaatgaggagtgactgttaatgattcaaggtttcttttgcggatgatgaaaatgttctaaaattagattatggtgattacacaattctgtaaaatatactagaaaccattggattgcacacttttttttaaacgggtgaacttttatggcacgtaaattatatctcactagagccgttaaagagcatgtgagtttttactgactgtgtgtgtgtgtctgagagagagagagagagagacggaaagggacatagggagatggagagaagactgagagatgagacgattatat

SEQ ID NO: 219750 - DNA, 453 bp, Homo sapiens
actgctttatctggtcccatcagttttacctctgaaatagccactttgtttctatctctcctttcttttcacagtttgagtttagggtctcttcgttatatggctgagaaggtattgtaataccttcttaattagtctgcctgtttttgtcaatattttctatttctgcatcattctccgaagtgttcattaagttctgcagcatagccagatgctgcttctttaaaacattgttttaaacccattttaaaatattcagtgtcttccttcaactggtgaaataaagtcgaaaacgtgagcataccaaatgcagcccttcaaaacataacagtaccatcagtgtccatcctcagttttgaactccctaccaggcacgcctataatcacgtagttttgaaatactcactggagagattgctcagtttttctctaagtgcctttgtgtatactgtt

SEQ ID NO: 219751 - DNA, 883 bp, Homo sapiens
aaaaagaggcgggccttgaccagaggacccagtgtcagcactgatgtaccaggtgagcttagggcaagacccagcgacatcactggatgacagtggattctgactatgtggctgttgtgatcactacttggaaataaacacaagacagtgaagcaggcctcaatcccacatagttttgaaggttccttgtcattttctgggagcccctgatgtgtcctattcctcagagagcttactcttccccactcttctctgccctaccaggccaaagggtctttctcttcctttatccctccaccccatttccttccaccaccacttcagtcaaggagtttttgtatcagaaagttatcacaggccagttatggtggtgcacgcctgtaatcccagcactttgggaggccaagctgggtggatcacttgagctcaggagtttgagaccagcctgagcaatatggtgaagcctggtctctacagaaaacacaaaaagcagccagacgtggtggtgcttgcctggagtctcagctccttgggaggttgaagtgggaggattgcttgagtcctggaggtcaaggctacagggagatgagatggcatcactgtaccctgacctgggggacagagcgagacccttttcatgccccgggacatttgctggtgctgtttcttctggttggcataccctttctgaggactgcccaacttgtgctctgagccaagggtagaaggagatgtggccttatccattcctccagcttttcccctaccctcagagctcttaggcagtgggtatggcaccttggaagctgcagcagggtcagggcacattgagtgactaagcatagcaagtaccaggtggacggggcagaaatgccagaggtgg

SEQ ID NO: 219752 - DNA, 451 bp, Homo sapiens
ctcccacaggcaagagcacatcctactggacctgaggaagaaaatgatctgtccatacccactgcctggagaatgatctgttgccagaagctggatgacttcgggcctagccaaatgccaagctatgctaagggaagttggggttcttgtcctggaaaattgcagaatggacgcagagatccattactgcgcgcggcggggaagaggacgccgccgggagctggtgcgtgacacactgcagcctcgcgggctgcccgggacttcatcaagcccgggtcggctcggggcgggcaggggtaggatccataccgccgaactgcggccccgctgctcgcagccgctcttccgggagcgcccgcttaggactcactcccgcccattccttacctcgatggaatccttagcccttagagagagggctaaaaaacaaataaacaaacaacagacaaac

SEQ ID NO: 219753 - DNA, 711 bp, Homo sapiens
atatgtatcttttcaaatgttaaattataagtttggtttaaaactttttcaagctatttaaaagtaaataaaatctaaattagagctaaactcacaaacagaaaactctgagaaactcaactgaattttgttttaaggctgtagtgcttataaaatattctgtttttggaggttgtatggtaacaaagatagattgttgtatagtaacaacaaagatgaggttgtataataacagcaaagaaaggaccatccatttttcttataatattttaaaatattctgttctttatacaaagactagcgttttccttttatttttttgcttggcatcctgaaaggaagttactttccatgtcttttttttttttttttttctcactactttgctgattaagcagtggctcttttttccccataataacatccagtggaatgattggttctttgcattcaaagaaataatattacaataaaaccccataaaagaagaccatattttacatagctacctaagaaagatatggtatgtgactaaatttgtattaaagtcagaattccaataatattaaataattacaataaaattaaataattcccttctttggaaattaatttctgcacaaaaatcccagtgtcagtctctgtctatgtattcacatccagagctgtgttctatatatgtaatatatgttctatgtatgaaagttgagt

SEQ ID NO: 219754 - DNA, 258 bp, Homo sapiens
tatgtgaccttgagcaaaggaggtcccttttggatcttagtttcttcatctctaaaataagaaagttggactggatgatctatgagtcccttctagcttaaaaaattcaatgaggcagggggctgtggctcacaccaataatcccagcactatgggaggccaaggtgggaggatcacttgagctcaggagttagagaccaacctgggcaacatagtgagacctcatttctactaaaaataaaaaaattgtccaggcat

SEQ ID NO: 219755 - DNA, 523 bp, Homo sapiens
ttcactttttgtattattttatgtatactctatgatgctaaaatgcttatgtcaaatggaaaattattttatcaagtgacttaattgtcaatactatctaaaagttataggaaatattttaaaagcttataaaacaatagttgtatgaaaagctccttgtttgtatgccatactgaggtgtctctttctttggtggagttatggcaggtgaatttcaatattttttaaatttttgaataaaaataagaaatttttgtggggctggcttggaagtgctttgtttacaatggtcacatttaaaaatcaatacagttcattaagatagtgtcttccattttctgcttctatctcaatattgtgaatggtgattaaaaggaatagatataaaatcaaattaatgtttcattcatttcaactatagtattgtgtaatagtcttatatttgtaaaaaaaacacagcttgcaaaactatattttacaatgtatgttttttaaatatcttaattaaattggattttaatga

SEQ ID NO: 219756 - DNA, 514 bp, Homo sapiens
atggcctctcgctgggctgtgcagctgctgctcgtggcagcctggagcatgggctgtggtgaggccctcaagtgctacacctgcaaggagcccatgaccagtgcttcctgcaggaccattacccgctgcaagccagaggacacagcctgcatgaccacgctggtgacggtggaggcagagtaccccttcaaccagagccccgtggtgacccgctcctgctccagctcctgtgtggccaccgaccccgacagcatcggggccgcccacctgatcttctgctgcttccgagacctctgcaactcggaactctgaacccagggcggcagggcggaaggtgctcctcaggcacctcctctctgacggggcctggctccacctgtgatcacctccccctgcttcctgctgctgtggcacagctcactcatggggtctgaggggagagaagcacaccaggggcgccctctgccttccataccccacgcttataaaacataactaagccaagagtggacat

SEQ ID NO: 219757 - DNA, 474 bp, Homo sapiens
gtgtaaatgctaactattggctgttcattatttagggttttgtaattattttcttaaggcaggattacttagtctcagcctcagccactgaacactctgcaagcaagtaacacctatttgccacctggtgacaaaagacttggccaatgataagatctccctggttgcttaatggacctcatacctttattcagaaaaagaaattaaaaacacagcaaaagtaaaaatgctaagcaaaatccagttttaaattattttgtttattcacaagatacatacagaattctttatttttcttgaaaaatatttaaaatgtaaagaatatgaaaacattttaaaaatgaattttaaagtactttattgattcaataaatttctaacatttaaaaaaattcctatgtatcaagcatatcactaaaatgaaattagtttgcttaaattgctatctgtattgcatagtaataaaagctgaaa

SEQ ID NO: 219758 - DNA, 442 bp, Homo sapiens
tgaaatagtagttttgagacaagcatggtggcaattgagagaagtaaatggatttgagacacatgtaggagatagaatagataggacttgctggatgtgagggaaggaatgcatttaggagttagagattagaggaatgagttggagatttaaatctgaaagacaccaacagcaattaagaaaaccttggggattcgttatttactaaacaagagtgcttactatgtcgtagacactgttagaggtacccaggtacataggttccaggtacataggtgtgctccaggggttgaggttgaaaaggcagaaaacagtttaaatcattatcttggggagtagggagtaggataacacctgccctcatggaacttactttataatggggaaatagactgtaaacaagattaatacataaaatatatattatatgattataaatatt

SEQ ID NO: 219759 - DNA, 348 bp, Homo sapiens
gcagctgctgccgggatccaacggaaccaaaaattcttatgatggtgctgggttgaagcatgaaattcatatgtaagaatggtaccttttgctccagcgttggaacagactgtggctttttttttttttttcagttgagcatgaggtgaagtagttggcttatgttttggggccaggagtctcttgaaactctccacttacttgtgctcaaagtcccagaggcatttaggaaatgcgaggcatttaggaaatcacagccacattcactacagtcctcattttgtggaatgacctgggctatttctattgttttatttatcttgtttaaaagaaaattactgaatgagt

SEQ ID NO: 219760 - DNA, 891 bp, Homo sapiens
taaatttgaagacatgtttttatcacatgtaaagaataagacagcattgggagttatattacatagtcattttgtaaaagtagcatccacaatgtgatctaattagaatcataacatatccagcctgaaggtttaatttaaatatatagaaaaaaatggtgcttgaggcctacagtcacaagtacaatctccctagatagcagaggtggcaggacaaaaaagtcctgaaacaataaacaaacattattcatgcttcatagtgcttatgaaacatttggaagaaacagttgcgcacagatattgtttctgattcatgcacaaaacctctgtacctataaatgcagatatatatttgcacatcaccaactctaggctcttttgtcaacacaacttttatatcttaagtaggcactgtgaagaaacaaacacacacacatgcacggatgcattcttgagctttctctgagtctgtgttaaagaagaacatgtcccattactcattttctttgaagatggatgttctgaccccaaaagagttaggcttataatttgcattcaacatctagtttcttcttgttgaattagattcacagtgtctatttaaatttgccaaatcagagtacaatagatgttagtgcagacgaacatcattatatagaactctaataagaaaactgatgtttatgaagcaaacaaatcatttcattaaaaatctttgctgtaaaattcatgtaaataaactacttaaaatatttctttaataaaaattccatgtttcataagattaactaccatgttattaccaactgttggcttttggaaattttgtagtttcaattagattaaagtatcaagcagtgtacaagcctgaaatatttaaaaattttaaat

SEQ ID NO: 219761 - DNA, 424 bp, Homo sapiens
tagctgggtgtggtagctcgcgcctgtagtcccagctactcaggagactgaggcaggaagattgtgtgagtccaggaattggaggctgcagtgagctataattgtgccaactgtactccagcctgggcaacagttagaccctatctcttaaaaaaaaaaatttttttttttaagttaagaaatggcatgtgtagtatgggttccattgtaacaaattacttttctctcattcaaaatgcatcagatatgcacagatggatgctgtgactgaggttcaccagatgtcagcattggttctctctgggctggtattttgatggataaagtgtgctcctttatattttcctatatggcttgaattgtgttttgataagcgtgtattgctttagtaaagccagtcaagtcactacttatttaaaaaggc

SEQ ID NO: 219762 - DNA, 620 bp, Homo sapiens
cagcttcatcttgagccttgcaattcagtatagtccgtggaccagcagcaatggcattacctggaagcttgttaggaatgcaggatctctggtctcagacctattgaaactaggaatctgcattttaacaagatgctcaggtgatgcatatactttaaagtctgagaacttctgatttgttacttacaatttggagttgatactctccagattaattaaaatctcccctttgtttttagtgacctctataaacatccaaaagtaaaatcatctaggtcatttcagagtaatatgtcttctccaattggtaactaattgttcaaaagaaattgtggctaggcatgatggctcatgcctataatcctagtggtttgggaggccaagacagaaggatcacttgaagtcaagagtttgagaccagcctgggcaacacagtgagagcccatctctacaaaaaatttaaaaattagctggttgtggtggtgcgtgcttatagtcttcattattgttactatttttcccccataacataccggaaggatcgcttcagcctcctgagtgactgggagtactactaatattcagtgtaaatattattatctgaatagatactagttctt

SEQ ID NO: 219763 - DNA, 381 bp, Homo sapiens
taaatgaccagtgatgctgatggttgtcccttgaagcttcaggttcagtgtattgacaggatcagattatctacttaaagttctaagctgttcctaggtgatccattttaaaagcagctggtcttttgcatggcaactctagccttcagtctgtatgtaatgctagcaaagcacctttacctttgacaacaaacaaaacttggtgtgggatataactttgtgattggcatccaaatcttaaagcaaggcagaaaaccaggttttgacatattgttttattttattttccacacaattgaccacctgacagtgagtctaaaaccttcttgcaggttgctgagcagagttttggaagctaaagttggtggtgaatgatgcaga

SEQ ID NO: 219764 - DNA, 445 bp, Homo sapiens
gatttaaaaaacacatctttttaaacatctctgaaatagatcaggggaggcttgctatcactgttggccaaatggctttcacttaattgtctaggtaacatcatctacacttaattattatttcctaatgacataattggactattgcaatccttgagctttaaatcagcaaatcattacagaggaatgtaaggaatacaagccttggttgttacctgaaaatcttcggtaggcacctcccattaaacacagagagcatctgttcagatcttgcaatttctatggagaaattttaggaataatctcatcagtttattttgcatgtactttttgctgttcaagagaattataaatgacaaaattgatggataagtcctaaagagtaaacattgatctgggcataaattgacagtggtttttcatttttgtaatgtataatataagg

SEQ ID NO: 219765 - DNA, 242 bp, Homo sapiens
ggcttagagttatgtcaccaaggagtgtatgaatgacttcgggaaaacactcaagcgtcttctccatgacatcaaaggatttggtaaggatgaagaagctacaaatgtcaacaaggctatggttgagatggcaaaccaactttttctttttttcttttttttttctgagacggattctcactctgtcgcccaggctggagtacagtgatgtgatcttggctcattgcaacctctgccccccg

SEQ ID NO: 219766 - DNA, 301 bp, Homo sapiens
gattccagatgcggtcccccaggcggacagacccttgcccggggcgcaggaggaggcaggactggcatcgcggggtgggagccctggacctccgagcaacctcggactcggcccgaaaagcaacactctcatcaccaaaccgcagaattagaccccgatggagaaaatgggtcaggggatccattcccaccccacccctccaaatccagaccctccgctaccacagatcagcctcgaaaaaagcttgtgcttcaacaaggatggggaactgccctcgtggaattctgtggggaaattgcca

SEQ ID NO: 219767 - DNA, 520 bp, Homo sapiens
ttcacagcttcctctcctctaattctgaacttagagattttcttctcatttctaatttttagtagcttattgttctatccagtagagcattataaaagtcacatctgcatcttccaacttatggtacagtgatgggaatttggaagcacccctggagcaaagaggctagggatagcattaacatctcccaagacaagtggtataggggaaatgaaggaaagactgtggccatgtatatgccaggcgttaatacatcagagctgcctgtatttaatttaaaacttttgatgaaacttagtggataagcatctttgtcatattttgtcaataatacattacttgcaattatattaaaacttattctaaatacctgtacctttcttgttctgtagatgtgtagatgatgttgcttgtttgtcaaaatattatcttttataaaagaaagtcctgcttcttatcatgatgtatgtgacttaaatgattgtttcatattaaaactatttcttccttaatgtactgt

SEQ ID NO: 219768 - DNA, 404 bp, Homo sapiens
ttttagtagagacgggggttcaccatgttggccaagctggtctcgaactcctgaccgcaggtgatccgcccgcctcggcctcccaaagtgctgggattacagacatgagccactgcgcctggccatgaaaactcttttctattgaagaatgcagaataaatgataacagaaaaatcagcatttaatgactcagcaataactgacttaggcaagaatcaataaaagacactaaaacgactgagtgaaagattcttagagaacggtaaatgctgaaatctagaagatactgccttaaccaaactattaagccaaacctcaccaataacaggacagctgacaccgtgctcccctggtgtggttcactgaggacaacgctacctacttacctaggaagcactcttgcc

SEQ ID NO: 219769 - DNA, 149 bp, Homo sapiens
aaagtcagacagatttaaactggcatgaaacaatgtagggaaggcatatcagtacacttaaaaaacacttttatagttttcatctccatcctcaatttgatagccccaagctaaaaatgattcttataaacatctgcttcttgtgttta

SEQ ID NO: 219770 - DNA, 166 bp, Homo sapiens
ttctagatttgcatatttttcccaactagtttcagggttagttcccagaaaattggtaaccaagtaaatcttttaaacaaaacagttttttgttgttgttttaaatagggtctcactctgtcgcccaggctggagtgcaatagcgagtttacagctcagattactg

SEQ ID NO: 219771 - DNA, 582 bp, Homo sapiens
gcaaactctttaaaataggcagcactatgatgaaaatggtttctatcagtacatagaatctcccatgtcagccccagggcccatcaagcccaacctcttgtctctccgaagcagcccagaagaaacatttgacttgagcattagcagatgaatacttcttacagtcaagaggagggttcgtctgctcttccctgtttatatatcctttaggagatgaaggctcagttttccaagcgtgtctggttgccccctctacacacctgcagcctcttcccaaggcccatggtgtggaagatttggttctgaaaaccagactcagcgtaatgtggccacagaggctggaggatatagaaggacctgctattttggcacgacaccactgtgaccagcttgagaggtcatgggcatgtgttacatttcccacagaggggagaatcattcgcacttctgtactaatagcatacctctgcaaacacaaaatttaaatgtcttggctatggaaaggagattcagatcctgtttaattaattggatagcattctttcccagactataaccaggtgatgagggtggggaaatgct

SEQ ID NO: 219772 - DNA, 561 bp, Homo sapiens
agtagctgggattacaagcacacgccaccatgcccggctaatttttgtatttttagtagagatgggctttcaccatgttggtcaggtcggtctcaaattcctgactcaaatgatctgcctgcccttggcctctcaaagtgctgggattacaggcatgagacacaccatgcccagccaagaaatagtctttagttttcttagttatataaatagtagtaacatcttgtaccacattgcaccatatcttttttcatttaataagaagtattgaggctgggcatggtggctcacacttgtaatcccagcactttgggaggctgaggcaggcagatcacttgaggtcaggagttcaagaccagcctggtcaacatggcgaaaccccgtctctactaaaaacacaaaaattagccaggcacagtggcattcccctgtaatcccagctactcaggaggctgaggcacaagaatcacttgaacctgggcagcggaggttacagtgagctgagaggtggaggttgcactccagcctgggcgacagagcgaaactgtttcaaaaaaaaaa

SEQ ID NO: 219773 - DNA, 570 bp, Homo sapiens
aattttgcagctgagggggaaagacaacacgcttgatagtggtggaaaaagccatgtactcagccatctgttctctttctctaattccacgtagcatattgtgttctttccgacatctgtggagaaaggaaaacactgcagtgagtcacagactgcccctgtctctataggggagtgggagaaaaatttattcattctaatattttcataaaactttctcctataggtttatcagtctgacttgcaaattgaacacttaaatgaataaaaagaaaaccatctctttttttctaataaatagtgttcagctattttcacctttaactcctaaactattcaatagacatcatggctttatgaagccagggagtgcaagcctctccactcagtcccctactatcacaaaggagagacactgctatttagaattagttccatttcaactatacaacagagcagatctggcaaacaatcatgactttgagtgtcaaatccattgttaatctaagccctgtgatggcacggtccatgtctgtcctggttacttttatctgcaatgtgcctccctgg

SEQ ID NO: 219774 - DNA, 493 bp, Homo sapiens
gttttgtgtaactctccatgcaccaccatggatgtaagagtaactcaaataacaatgctcatttgcttgtcctctgcttcccctcagtacagtttaatttactttggaaatcttttatttgtaggtgtaaggacaaacgtagctcagcattttatatcattgtatgacctctgaaattttagatgctttacatcttattctatcttcttgtattagtaaatcatcaaaagttgaccatagatctcggaatctaaattgcctaatgtgtgcatctcagcacacctgtgtgtaagagagctagagttttgtatgcaggagaatggttcttgactgtaaatgatgaaaattccagaattcgttgtatttgatctcctagatatttttgtgtcctttgtttcagtgatatcatcatgtaggtgaaaattgtgttctaaaagccaaaactgactcattatagaaaatgaagagcagagaataaggaagcattgggttc

SEQ ID NO: 219775 - DNA, 420 bp, Homo sapiens
aagttagaactaaagaaaagggggagggtgctactggcatctggtgagtggagggagatcaggaatgccactaaacatcctacaatgcacagacagccccacgaaacacataattatttggctaaaatgccaatagtgtcaggtgcaggggctcaggcctgtaatgtcaacactttgggaggccgaggtgggtggatcgtttgagctcaggaattgaacatcagcctgggcaacatggcataactcggtctctaccaaaaataaaaaaattagctgagtgtggggcgcacacctgtggtcctagctactcaggaggctgagatgggaggatcactggagctggggaagtcgaggctgcggtgagccgtgatcgagccactgcactccagcctaggtgacagagtaagaccttgtgtcaaa

SEQ ID NO: 219776 - DNA, 593 bp, Homo sapiens
atcttttcacagtttggatgagagatgcgtcagaaaaaagcagaattaagatgactttaaggtgtttttctgttttgttttgttttaattttttttctgttttgttttgttttgttttgttttgttttccagagcaaatggaaggattgggtttccattactgaaagataagagttattttatttgttctgttttcttctttcaatgcatttgtgtctaggtgagcatgtgggtacacaggatcaatcttaaatgagctatttggttatttttttcagttatttgtaatcagttgtcctgtttccactgtgatcaagttaaaaatggtactgtttcaaattgtcttgtgtcattgtggcaatagtttagttttcagttttttccttaagttgcttcataagaaataaattaatctataactcctctttcatatcgtgttatcactaagcttgagttatatagggaaatgttctgatatgattaattcaaggatgctgaagagcaatgagttgtgtgtaagcagaaaacaaaccagtacttaactaggacatctgtctatgagagagaaaggaggtgcacattatttaaaaaaa

SEQ ID NO: 219777 - DNA, 400 bp, Homo sapiens
aacataaggcttgtaagatgtagtggaggaaatctgtcaaaaggtaggacaaaaagacaagaagtgaaaagtaaaaagaaaaaataaaaccatcagaagaccagttcaggaaaccccatgtcctaagaggtgttccagaaaaaaacagagaacaaagagaaaggtcttattaatgaactaattcaataatttttttttcagaactgaaagacaggagtttccaggtcaaaaaggcccactgttgtgatttaacaaaaatagggaaaaaacttctaacagattccagaggggaataaactaggtcacgtccaaaggattagaaacccaaataacttctcaacagaagcactgaaagataaaagacagtggaataatgtctttaaagtagaatatgatacac

SEQ ID NO: 219778 - DNA, 452 bp, Homo sapiens
acatcagaagccagacgcaaaagaattacatcgtatatttccattcatttaaagttcagaaaacaggctaaaacacagccatattattttgaaatgtgtggcaatactattgtttatcaaaatctgttctttcatagtaacaaaattgtagtggggcatataactgcctagctacagcccatttcgcagcctttcttgcggttaggtgtgtacatgtgacaaaattttcttccattgtatggagtggacttgatgtgcgccacttctacctggttcctaaaacccccagtgtgtgcttctcagggctgtggtgctcttttcctgtctggtgggctaggatggcaataatcagagcaataattgaagtcaagtgtggaaaattgcagaccctgagtttctttttatttatttatttatttatttatttatttatttatttatttattgagaca

SEQ ID NO: 219779 - DNA, 493 bp, Homo sapiens
gacagctccattttttttcctcttttgaaccctctgactctgcccaggcagcctggccaacagatactacctgaatcctccccctactctcctctgctatgtgccaggcaccctcacacatgtcaggggttcagcacatccccaccctttcacctctaggttcctccttcattcccatcacctgcccatgttggggtggggtgcagtcagggccatcctgtttgacccttgagatccaaagccagatgactggaagcaaaacaccatcccaaaggcatgacatctggaaccagactacttgggctcaagtctcagctttgctgtgtggcttgggcaagttaattctcctctcttttcttcagttttctcaagcatataatggggacaacaatgctacctttgtcagggttttcctgaggacaaaatatgagagactcagaactgtgcctggtgcacattgaatgctcaataaatacggccattattacctgct

SEQ ID NO: 219780 - DNA, 500 bp, Homo sapiens
taaaatagcagctgccatatatatatatatatatatatacacacatacagataggtatattaacattagggacttatgagaaaatcaactgagttaaggaaagatcttttagatataactctattaaaatctgtaggtcaaatgccgaggcagaagacagtctttaaagtgtaatcctgatgcttggaaaaaacaatgcaaggaactattgagcctcatttatgaacgtgaagactcggagccatttcgacagccagctgatcttctttcttacccagtaagcatacagttgtttaaataattgtcagtatgataatttcccataaatgtccatgctaaaatctagataagagcaattttctcacctctcctttcctttctttttttccagtcttttgattgtgaaagtagtagtgtgattagtgtgatttttaaaaaaatgtaattgtgtcttcagtgtgtaaattatacagttgtaaaacaaaaatttaaatcagaat

SEQ ID NO: 219781 - DNA, 138 bp, Homo sapiens
accaaatggtattgttttatttatggcagacatcaggggatgaagggagaactaatcctgtccatcctggtttattggagagggagaaaaaaaaaagtgaggagatggggaatggtgcggaaatctaagtaaccacag

SEQ ID NO: 219782 - DNA, 386 bp, Homo sapiens
gcaatatgtatgtgtctatgaagctgtcttgtgccagtgagaaccagcaggagaatgtacaacagtgtcacttgttaacaagactgatattcaacaggcttctaagaatatgtatcttcataaactgatcactatctattatgcagctattatgtggtctatactatactgtggtttgttttcctgtccccacatctgagtgaaggtcttgctcttccctttcatatccaatgtcaattccttgtactcactgaacccatgctgatctccagggaaccatccttcctctcagaatccagagtctggaaggactgaaacctggtcatacccagtcctttcaaggggcctctattctactaataaagatggatcaagtctccacagtc

SEQ ID NO: 219783 - DNA, 253 bp, Homo sapiens
gtaatttactgataatctgagaaattatccatattttaaaagttataaataaatttggagtacctgaggaatataccctttcttcctgttcagctaacactttttccctattctttaagcctcaccatctctataagtcaatctttgataagcagcttttgaaaattgcaaagggaagaatattcctactgtataccaggcattgtacttagagctttacatatactgttttatttaattctttttttttttt

SEQ ID NO: 219784 - DNA, 409 bp, Homo sapiens
tctgtaagcagcagacaggatttccaaaacgtgaggaatgaggactttatgtattcatataagcactcaaaatgtgctatctgagctcaaggcaagaggtagtcacagcatttgatgtaacaattagggccgaagaaaggcaggaggcaacattttcttgcagtcctcttttggaagattcacttctgcataaatgtgttcacctgaaccgaaggtggtcctgtgccccctgttcatacatgtcaccacctccactcatcagctgggcttctcagagatggtgcacgtccgtaaccagttctgaaggcctgagggactctgggagcaaggtggaattcacatctgctagctcatcacgccaacctggggaaattgtcccaccctctgtgaggagacagtgcaggtgtcc

SEQ ID NO: 219785 - DNA, 657 bp, Homo sapiens
gctattgtgaataagtgccacaatgaacatacgtgtgcatgtgtctttatagcagcatgacttataatcctttgggtatatacccagaaatgggatggctgggtcaaatgatatttctagttctagatccttaaggaatcgccacactgtcttccacaatggttgaactagtttacagtcagtggaaatggttattttctcattccattttagtactaaaaattaatcaatagagtttggttctccacattttggcaacattattaacactaaagataatgcctgagaacaagcaaaacaagttttgtttagttttccaaggattcagcctagtgtcgatggaatccacctagccaaagtaaattcttatctgtcatcatggttgtttaccattatcacagaatggtgtttcctggatactgaaatgtgtaggacactgggtaaggtgtaacaacttacttcatcagctgatactttaaatgttgaaaatattaagtaattcaagaagaatgccaaagaatgaggatttgattctataagatcaaagggtactaacaatattctgatcaggtaaaaatagagtcaatttttaataataacaacctaccacagcaaaacatgttaaactcaataacattaaaatataatagtggacac

SEQ ID NO: 219786 - DNA, 419 bp, Homo sapiens
gatttttcctttttttttttattagctataaatgtgaatacttgtaaataagggtctttctgaaatcaagccttgcaagtgatgtttccaaggaggctgtcggctggagcggagcctgcctgaatttcgaaagcaagtcatttctcttctgcagcactaggcgggcaaccatgtctgcaggattattacccttttatatctgcaaaagacggctttcttcctttactccaatatacctttttaacatgtgtttccagggttttacgcaaatttggtttgtaagtatgagtgaatacatttttcttttaaaatacctacaataagtgtcaatcttctctgtataacaaacccccatgacatgcgtttacctatgtaacaaacctgcacatcctgcacatgtacccctcaacttaaagttt

SEQ ID NO: 219787 - DNA, 219 bp, Homo sapiens
ggtttgcctggctggtactgggtaataataaaccagatctcctcagaggggaagtccctcaagcccaccggagatttagaaggtttaccatcagcgttgtgttgatgaaaacactaacacactgcattttgaggggctgaaggcactgtgctgaggaaggtgagttttcttcctcactgctcctagttgtgccccagaaatccctgttgaccctcgtaa

SEQ ID NO: 219788 - DNA, 424 bp, Homo sapiens
cagctcaacaatgtcaagaattggttcctttatgtctctcgcctttgcttccctgtgtcttgtctccatccttgggcatgcccttctcttatattggcaaagtggttgacaacctccagatttaacatcctcataagtccatgttcagcataaacagagtgaatgttttcctttcaaaagacctaactgtgtgtctcatagactttaattagggtgtgtgcccatccctgaacaatcactttggccaaggaggtacagtgtactgattggccaggcctgaatcaaatgtctatccctgtaggcagaagtagtattaataccaccgaaaccaaatgggctgagggtgagaaaggggtaatttctcaaaggaaaatcaggttgttattgtcagggaaaaaaataaataaatacaagaaaccgatgt

SEQ ID NO: 219789 - DNA, 278 bp, Homo sapiens
tgagaacccttcagcaggggttcttgagcagagtctgtaaatgggcctcagagggcttagacctccaaagtctcatgcagaactccctttattctcatctcatatctttctcctggaccccactatgctgtaaccgtacctgggccttggcacttactgttctctctgcccaggctacttcctacccgatacttaaggcaagaatcactcacctttcaggtgtcaggtttcaggtcatgtttgctctttgaaatcatctggcttgattatgtgtatta

SEQ ID NO: 219790 - DNA, 512 bp, Homo sapiens
tgcatgcaccctccagtggcataaggatggcccttgcctgccaccagcccccacaagcacctcttgggagtctgaggattggcccatgcagcctgctgctgccactgagtcacacaaaccacctcggggcctggagactgacctactcagtccaccactgctactgcactgccaacaccacacacaatgcccagagtcctgaggacccacctgcccagctcaccactggcacctgagcatgccacatggaaacccaaggactagcttacccagacccaccaatactggtgcttgtctgtgccacccaggggtctaaggaccagcacaccaggcccactgccaccactgctgatgcctgaggactagcctggctagtattcctgtaccctgcaaagccttaccacagccttcactgacaactccagcttaagctgctgagaaactcagagacaccactgttgctgattatggccaaagaaatcatatagagactacactactgcacccaccca

SEQ ID NO: 219791 - DNA, 406 bp, Homo sapiens
tgccaacctgccagacaccttgatctgttcacagagacatttctgtcaatgagagaactggctaattccagccatgggcaaaaacgggataggaaccagattcagggtgggggacagcacatacgtgagagcagccctttgcctgctgctgtcctcctcccagtgccccaggctgcatctggaccttccacgtccacacacctggcccgacatttcccaacccacgctggcagcaacaggtagggaacactgatgggcccagtgccagcctcgcctcacctctgcgcctccatccttggcccagtgtcctggctctggttgcagtgctctcttttttccttttaaagttctggtaaaatatacatgacataaaatttgccattttaaccattttaaacgtatagtt

SEQ ID NO: 219792 - DNA, 606 bp, Homo sapiens
tatgaaatataccttaataaagctaattttaaagaagaaattaccattatctttgaaatttctgagaaagtcacaattacatatgtagtatcataactaagggcacaacttgcctttcagcttgtcgaacatgtaaaataaatgtcaaattaaagagaacattattctgcaggctcttcttagatggttcctctgagattaaaaaacaacgacaacaacataaatacatatatgagtttttttgtatacacttcctccaaacagttgctaaaatacttctcaagcaaaactggagaaaatggtgtatttatgaaaattcctgttttaaaaatatttttatttctaccattattcattcaattattggaaaattaatatttcatttttaggccaagcgtggtggctcatgcctctaatcctgatactctgggatgccgaggcaggtggatcacttgacttgaggtcagcagtttgagactagcctggccaacatggtgacaccccatctctaccaaaaatataaaaaattagctaggtgtggtggagctcacctgtaatcccagctactcgggaggctgaggcaggagaatcactagaacctgggag

SEQ ID NO: 219793 - DNA, 128 bp, Homo sapiens
agtaaaaaagtaattatgattccttagtggctatcatttctgaaatcagaaattatcttattctgtctttcaggctaagaatacctttttgttttgttttgttttttttacaatatataaagtgcttt

SEQ ID NO: 219794 - DNA, 883 bp, Homo sapiens
ggccctcagaggactctctacggaagctgtcttcataacaagggaacctcaggggtgaaccagagttgtcatggcctcagccctgcttgcccagctctgggaatagagctgaagcatgcgcacacacagacacatgtgcacttacagccagaatcacactcaaaggagagtgttttggtaagaaggaggcatctgaaaagggagtcctacatgggtctacttttgaaaactcaaagatgtgggaaaatatattgttaaaaaaaagaaaagccaaacccagccagcatgtcagaagtgcttctgaggtggaccttggaaggatcctgggccagctgaggtctcctgagagtgtgggaggtgacagagctccaaggtgcagggctgagtgatgctgccaggaactaggagggcagcagggcccgcccggggctgagaggtggttggtggccaccagccaggtatttcctagtgtcaggccagggatagctacctgtggggagtgtgtctagccctcagggcccttccattgggttttggggatggaccaggaatttggtgggagatgagactcatttggcatcttgttttggtggaacaaatgtgttctgtaagtcaggggagccctgcatcttcggctggcagtcagtcccaggggcagaggcacagcagggctgtcagcgttagcttactctagagagagttaatctcttcaggtggaaaattgagtcatggaggaagctgatcagtaacatgaacacaccctcagaggcggcagatttattgacacatctatccaagtatcaggtataaaagatgctcgttctgccacagggcttggttttaagtggatttgagtgtgattcgtgaatggctgggctgctaa

SEQ ID NO: 219795 - DNA, 389 bp, Homo sapiens
ggggaatttgctgggacaccttgaaggccgcaggccagaccccaggggttaataagggaacaaagtccttgggcgaacacctgcatttactatctgagccagcaggcagctaggatgctgggtgagggggtctctgggctgctgggcggccaggcgggggcatcggggcaggagctgagggctgcactgggcaaccaccctgagctcctgtttacccaccaggggcagtgccagggcgggctgggctcacagcagagcccagaggaaggggctcaggctgagcaggagctccctgacagcctggcaccagaggccacgccgcactgtggccgccttgttacggaggctattttcacagcaggtcatgtccagcttctcaatcttcgagt

SEQ ID NO: 219796 - DNA, 469 bp, Homo sapiens
aattaattataaattattaattataaattaattaattataaattaataaaaattgtgatcccacaattaatttcaaatttattaaatagaacctgagaaaaaattatgcagtatttttttcattagatgattgtcagcctcctaccaacaagcatatgctagatgttacccatgaaaacttaagtagtcaggccaggcacagtggctcacgcctgtaatcccagcactttaggagattgaggtaggcggatcacctgaggctaggagtttgagaccagcctggccgacatggtgaaaccccatctctactaaaaatacaaaaattagccgggtgtggtggcgggcacctgtaatcccagctactcgggaggctgaggagaatcacttgaacccgggaggcagaggttgcagtgagccgagatcgcgcaactgcattccagcctgtgcgacagagcgagactgtctcaaa

SEQ ID NO: 219797 - DNA, 291 bp, Homo sapiens
gccggccagcatcccgctccctttgacccgcagtctgtgcgggaagtaggcccggagtggtgccagcaggaggtggccttagaaaggcggagacccaaggagcagagtgagtcggcgtccagctccacctgaaagcgccatcttgtcgccacttccctcaggagcagatcaaaaggacctaatgaaatgtttgtggaacctgtgtaaaacatgctgcacaaagatgtaaataaatcaacccatgaactcctagtaccctgaccgcagcgtatgtaagatcaataaatagct

SEQ ID NO: 219798 - DNA, 522 bp, Homo sapiens
tcgatctagaggatccctgctgatgtactgctaaatggaatttgaatctagaccccctgactttagaactgtggccttaactactgctctatagtgccttctttactgcccagtaaagcagtcattagggaggctggattaaaagcaaagtcaaagcacttatattctctgttgtgatagacacttggttgtttatcaaatagccatttctactttctgccaattttgttcagatattgggcagccaagaacttcaagtacttggaggaagttaaatagtgattagtctgaacctaagagtggtaatttcattattttgctacaaattagttaggaatggcctaatgacacaattcctatcaatcatacatagcaaagatttaaaggctgggcatagtggctcatgcctgtaatcccagcattttgagaggcagaggtgggcagataacttgaggccaggagtttgaggacagcctggccaacatggcaaaaccccatctctaccaaaaatattaaaattag

SEQ ID NO: 219799 - DNA, 536 bp, Homo sapiens
gggacaatggcaaacgtgcttgctttcctcttttgctatcagcaggttccagcgttcacacatgggtcttgagtcaagctcgggtcactggcctgcaccatcactccctgtgtgatcctggactgcaagtggctccacctctctcagccgcagtccctcctcagtcaccccacagtggggctacaggggtgacagatcaagcagacagcagccggcagtgtctgaggtcccacagtaggtccttaataaatccagtggttactagctcagtaatgctagaggttacctgctcagacactcaggcctctctgagtacaggctaagtcactgcccagggcagatccttcctgtgatttgttccagctctcaggacactgtgtcttccctcccatggagaattgagaaaggctccttgctgatctgtctacactacatgcatcttatctctagccacctctgcctggtgacctgcactgggtcttgatcacgcctggattcagtgcaggctgctctgcccagcccgagctgcttcccgg

SEQ ID NO: 219800 - DNA, 281 bp, Homo sapiens
ggaggggataggagggtgagggacgagagacgacactcagcaggtgtccagggagtggggggtgtcctgggctaggacagaggtgacaggtagacaatgtaggatttgttctggagactgagcctttaggatgagggagagattagatggagacgggactaggggctacactgtggtcgtcagtgtggcacacatttagggcagaaacaggagcacgaaatcaacagtagcaatgaatatgcccgaggcactccagacgtatctgatgctgaatctgcaca

SEQ ID NO: 219801 - DNA, 169 bp, Homo sapiens
tacactcatggaattccttgaaaacatttcacactgtatttactacattatattgaaatatttgtgccacatctgtctccctcaggagccactatcctaaagagtaagtatcggttcatttttatattctcagagcctagcactggcatacggtaaatagtcctaaatg

SEQ ID NO: 219802 - DNA, 578 bp, Homo sapiens
cagcacacgcagggactactacctgagtctgcaaaacacatagcatttttgtccgtggatggtacacaaagctcaatctttttgttttcttctggggaaaaaattaaatctttatatgttaatatgattgatattcattgtgcaaaaaaaatcagtgtgtttttaaagaagtataagggaaaaggaaaactcatatgtccttctgtcactctgagacatacactggtaacatctgtgcaagcccctttccaggattctgaatgtacagtatatatgaatgcatacacagagaaatttacattcaagagtgtactatacttgttcttctataacatcagaaataggtttttactcagatgtcttcatgtcggtaattatagaactacataattatttttatagctgtattatgtagatttaacaggttcctcattgataaaacaatgtttttttggttgtttattcagtatctgaataacgtttctatggacatctgtaaacatgtatgaggggacttttaaaagttcatggaaaatggaattaaaagaaaaataaaaaaatataaactttaaaaaaaa

SEQ ID NO: 219803 - DNA, 604 bp, Homo sapiens
gcgcggtggctgacgcctgtaatcccagcactttgggaggccgaggcgggcggatcacgaggtcaggagatggagaccatcctggctaacacagtgaaaccccgtctctactaaaaatacaaaaaataagccgggcgaggtggcaggcgcctgtagtcccagctacgcgggagactgaggcaggagaacggcatgaagcccggggattggagcctgcagtgagccgagatcgcaccactgcactccagcctgggcgacagcgagactctgtctcaaaaaaataaaataaaataaaattttaaaaaagcatttaacaacaacaacaaaaaattcaattttaggattcacctgagaaaagaatacctcaatactgctacactttcaaaaatgtttagaatcacataaaaattcacttcaataaaagaatgcttctgcagtttggggataaaagtttctaccaaataatcagtccctaaaacgctaaaactaaaaatttgctacaagaaacttttcatgtaatatttaaagatttttagaattaccaaaattaaatgtagatctgtttaactcctatcaattttaggtatcaccacaaatataacat

SEQ ID NO: 219804 - DNA, 474 bp, Homo sapiens
aactgaactggaatcagaagaaggtaggcctgaagtttgcgtcgggtacatacttggaaagttatgtaagctcttgagaataattccttccttgcctgcctttggcagtttgctgtgagggtgagatgaacgaatgagcaaagccctgggtcagggctttgtaaatagcagtggcagttctttcctaatggcattgcatcagtagctggagagcaagcagtaaggtgaggtcctctgagtcagtctactacgcccacgttactgtctttaaaagttacattgacctatgggcggttgtgtttttcccatgtcactgtctttagaagtgatgttgacctatggactgttgtgtttctcccatgtcactgtctttagtagtgacgttagcctatgggctgttgtgcagtttgtttaaaaacaaaatatgggtgacttatatgcacactagaatggctaattaaaaagataaaaaaa

SEQ ID NO: 219805 - DNA, 356 bp, Homo sapiens
gaattgtatggtaagagtacatttagttttgtaaaaaactgccaaaactgtcttccaaagtgactgtaccattttatattcccactagcaatgaatgagagttcctattgttccacatccttggcagcatttggtggtgttagtgttttggattttggccattctgataggtgtgtagtggtatctcattttacttgtaattccctaatgacaaataatgttgaacatctttttatatgcttatttactagctgtcttctttagtgaggtatcttttcaggtcttttgcctatttttaaaatcatgttcatttttgttttaaagaattttaagagctctctctctcttttttttta

SEQ ID NO: 219806 - DNA, 172 bp, Homo sapiens
tgcttccctcttccactgtaagtttaaaggagaacttgggctttggagtagttgtgctgattggtgtttacatactaactctgctgcttcttagctgtatggccttaggcaaataatttaacttctaagcctcagtttccccatctaaaaaataggggaactttacagggtt

SEQ ID NO: 219807 - DNA, 268 bp, Homo sapiens
aaaaagttgtagagattattttaagagaacagccctgcctgaaggactgttactgttatttgaggctaaaggaaatcttgcaatttgcaaaaaaagttaaatctgaaccctcccctccaccgtgggggccagggacaaggcacaattccatttccaccccccagctttcttattggaaaaataaacacccctgccagacacagtggctcacacctgtaatcccagcattttgggaggccgaggtggatggatcacttgaggccaggaa

SEQ ID NO: 219808 - DNA, 411 bp, Homo sapiens
ggtttggtatttgggcacctgtgccaccctccagcccaggactctctctgcccctcctcagcaaagaccctcagcaggatccccgcatccctggccaccctgtggggcctgctgctgtctcttccagcattggtgtgtcctccagggaaccacacactcaagcactttggaacccatggaatccagtgagcacgtgctgtgggctctgcctagaagcttccaaaacctgtttgttccagtggacacagagtaggaaatgctgactcgttcagagcgctagtgcccttgggtccttgcgggtgtgctcttctcactcctcaccccatcagcaccttctggggtaatgcacacaccagtaaaatgtacagtgcatgcttttaaaaatttttaaataaatgatactatgctata

SEQ ID NO: 219809 - DNA, 504 bp, Homo sapiens
tgcctaggtttacctctcagtgttcacatttctgcctgttccactccatcttatctggattttcaccaattaactcagattgggattttatttccttaaacttttgggagataggaagagttgggagagggaggggcttactttcctttgtggtctttggttgtgagttgccctcccatctccccagttcaaagtacctctcctctccagccagacctttatttatttctcctttgcaagagctgctcacagatggcctaggactttattgcttattcggccagtactaaaagctgccaatggatccccactgtgggagatcccaggacagagttgtctgacattggagtttggagtggaaacaaaatggtataaagacattattggaatgattgttcagtttaaatagggatagttattgtataattagataatattgtattaatgttaaatttcctgatttgctcattgacagtggttaaataaaataatgtgttttctggc

SEQ ID NO: 219810 - DNA, 313 bp, Homo sapiens
cccccatgactatgactatcattgttcttgctattgtgcccccacttcccaatatctatccaggatgtgcaccccatgttctcttacctggcgtcttacttttttctccctcaaatttcagcaagcctcatacttgcagtctcatttcgccagcatgcaagaactgtctcccccttccttttctgggactcaataatcttttccccttaccactccctcaccccaggcctattataagcaggagcatgtcctcctgccaaattccctcccctgttcccaacatgccctgtaataaaattagagaagactaaaa

SEQ ID NO: 219811 - DNA, 485 bp, Homo sapiens
tgaaaatgacccaaacgccaacttctagtagaacaaatgaattgtggaatattcatagatggaatactatagagcaatgagaacaaatgacctgaacctaacaaaaacaacatggatgcacagtacaaacgtaatactgaacgaaatacataattttaatatacacaatatgattccagctttataaaaacagtcaaaactacattggtttaggcatatacagacacacaaaagtggcagaggtatttggaaaaaaaaaccaaggaagtgataaaagtcaggaaaataggagggaggggagaaggtggggaaggattaccaggggcaaagaaaacttttggcatgatgagtatgtcttgttagattgtggtgatgatttcacaggtgtatagtatatatcagaacttatcaaattgtgtgtatactttgaatatgtacagtttattatatgtcaaggatacatcaataaaacttttaaaatcaaa

SEQ ID NO: 219812 - DNA, 468 bp, Homo sapiens
ttgtgctggaaagaggaatgaggtgatacaattggaaatattcccatcaaatggttaatcttatttagaaaatgggcatattagaaaaagtccttccaagatgattttggataataaaagttgtatttgtggaaattggtattatctctgttttatgcacttatatttatcccttacattttgtttttagtgaccctacatgacattaaatttaaagtaaaacattgtttaatgttaccttttggcttgagaatgtctttcagctccagaattattgttactcatattttaatcagtaagtcatttaagctatgacagagtaggaattgagaaattatttcatatgctacagtattgaaatgtggatgctgccttgttttataagaagatgatcaaggtttgtgtgcccattacctttcctctgcctgaaagacgtgtctcaagaaaaataaattctattttagatgc

SEQ ID NO: 219813 - DNA, 478 bp, Homo sapiens
cagattcgttctggaaagtctttgtgtggccctgatgcatgtactccagtgttaagatcatgaccactggggccatcctttttccctggggagtctgagccagggacatatcatgcccagcatttgctaatttgaattttgacttctgatccttgttgggatgtgcgtttgggagagagccagtcagtgctgtggttcttatactgtggtccacaaatccagggggggtaccccagatccttttagggaggttctgtgaggtaaaaactatttttatagtaacacaaagatgtttgtgatttttactgtgtggataatttgccctgacagtgcacaagcaatggtaggtaaaacaactggccctttatcatgaattaaagcagtggcacaaatgaccaggggtcattgtatgttttggctcacatttgtggtttaaaaaaattccattttcacttaagaatatcctcaatgaagcagt

SEQ ID NO: 219814 - DNA, 587 bp, Homo sapiens
ctgggattataggcgtgagccaccgcacctggatatttttagttttaaacctattattttgcttttgctttctatctttcctgaaggaattcagaaccagatacccccaaacatgccactttggcatattgatttttttgagttaaagacacttgaaaaatagcagatgcaagaaaagcactctgattttcctttaaagcactctgattttcctttttcttaaaagtaggaggtaaaatttctacatgaaagttgccctctttatacaagaaggaaagtaacagtctcatcacccaggatgagaagttgaggcaagggaaacctgtacaaacagaccttgttaaaccaacccttatcctgttaatcacctcttcacccaattaactacactagttccagctcctttgtcttgtcatatttcacaatttactactctgtgtctacttcagaacataagtgattatgtcatggagtcttccttccttaaagaatctcgcatgccacataatacatgcattaaataaatttgtatgcattttcctgttgatctgtcttatatcaatttaattctcaggcttagcagagga

SEQ ID NO: 219815 - DNA, 581 bp, Homo sapiens
atggccatactcccaccactgctatatgaatctgctcttttctccactcccagctaacacgatgttgtttcaaactttttgatatctgaaacctggtagtctgataatagtctgaaacctgataatggtatcttgtgattttaatttgcgtttattttagtatgagtaatgtaaattatcttttcatatgttttagagccattcatattcccttttgttcatatcctttttgcattttctttggatatttgtctcattgatttgtaggagatctttaaatattaagaaaattagccttttgtttatgctatgaattgcaaatatttccccaaatttgtcattcatctcttgactttcatttttctccaaatggcatgaaaagctgaggtgggcggatcacctgaggtcaagagttcgaaaccagcctggctgacatggtgaaaccctgtctctactaaaaatacaaaaattagccaggcaggagaatcgagaatcgcttgaacctgggaggtggagggtgtagtgagctgagattgtgccaccgcactccagcctaggtgacagagtaaaactctgtctta

SEQ ID NO: 219816 - DNA, 407 bp, Homo sapiens
ctgtacttgctgatttttcacaataaatatgtattacttgtgtaattaaatatatattttttcaatcagaggttgttaaatagttgattctgaggctggctgggagatggctgaggtcttcaaggaagcctttttttttttttcattttaaagttctactttctgttgcatcaacatgtttagcctttatggaagcgcacggcaggcctcctggatcccagagttggtgtataagggccatttggcttggctgagcaggctttgagtggtaagtgggctttggaatctgtttacttagaatagaaatatctcagttcagtttgcagggaaaaaaggggctgttctatgatatatttgggcaggggccccagtttaagctttcctttaaatacaaaaaaaaacccaaa

SEQ ID NO: 219817 - DNA, 563 bp, Homo sapiens
ctgcctgtcagagccagcgcttgagaacgtggctgctagtgaaagtgtttatgtgtttatgtgaccacaggagaaccttcaggagtgaggctaactcatctgtgccacttaatgccggagtaacaaagcccccatccactgaggacggagagagcagattgtaaggagagagcagattgtgtggagaggcaggggtttctgtcacgtagaaagcatcttgtacaatgtctgacacacagcaagtgaccaaaatgtgccaggctggtccacccagtgctctccaaacaccgtggtcgcttgcatctgtgggattttgctggtgatccttccctatttatctgagttttgcgtatagacaaggttgtctagatggttctcatttggggatctcttctacagccgcagtcagatggtgcaggattcctcagaacctttaagaagctaacaggcaacatggctcttcagaaatgggatatgctgggccctaacataatgggaattgcacatcccacatctggaaagcaggtttgaaatatctaataataaagctgaaagaaaaatgc

SEQ ID NO: 219818 - DNA, 742 bp, Homo sapiens
catttaagacacctcttggaatctgtgcatctgctgcatagggacaggaagatgatgataatggataggagttctttggggttccatctttctgtacatcccaggccataagatgatggaaaagcaagtgaggcatgtgtgtctctatgagcatttcccttcagaaggaagatgttggagactcatctcccatgcacagtgacttctctcttactaaatttgtgatggtagggggtactcctcattactgtggctcagcagggattgcatctgtgaatatgccaagggagggtctactattggggaatggtgagaggcaaagaggagaaaagaacattataggcactttgaatgttacccagcaacattttttttgttgtttcaaagtaacatctttctataatgctttcaaatttacctgtctggtaatctgttctaagatgggcagcccatgaggttttgacttttttcactttggctattgcatttcaaaatattactcacaattaggaatttataccatttgaaacaataatgtggtatctcatgagtaaatgctgccattaacatcttccttcttttaaactgaaaacaagcaaaccagaaccaaaaaaaaaaaaaaaaaaagcagaaacatgctcccccaagaaagcttgtttttttctttgagatggagtctcgctctgttgcccaggttggagtgcaatggtgcgatctcgactcactgcaacctccacctccc

SEQ ID NO: 219819 - DNA, 369 bp, Homo sapiens
ctgctgggaactgtagtcttctggacgccggcggtagcaacgatgaactaaagtggccaacccagggactacatctcccagcaagcaaaagagcgggtgcttcagttaagccggtaaatattactgctcagagcgaccactgcgatcgccggtcttacaaaggtgcttgcactaggcagtagctactcttcggcgagacggaaacctaagtcacaggtgactaggcgttgagcgaaagatcaaactcagaggagacaatatataagccagattgacgcgatgtcccctaggagtgtgagggaggaaacctcacctggtctagaggggcggggtgggagaacgagagactgacgcgaaggagaaggaact

SEQ ID NO: 219820 - DNA, 413 bp, Homo sapiens
tgtctggcacacaggacaggaccaacaaatactgaatgagaaaagtgaatgacagatggaaaagaacagaactaaacagggagtttctccactgggaccacaagagggcactcaagatacgtgtcaaacccttgaagccccaaggtgggtggtctctctgctcctcagcctggaggaccagggacaggtgacctggaccacgtcctttctcctctgtgagcctctatttccccatgtgtagcgtggagatggaaatgcctgaaatacgttcttgtgagaagcaaaaacccaacaacgcatgcacgtgaatgtcttccaaggggttgcacgtgtccaaattcatctaattgtgtacattaagtgagagggttttttagtagaacaattatagctaaacaaagctgctaaaatgt

SEQ ID NO: 219821 - DNA, 696 bp, Homo sapiens
gccaccatcactgtggcttcctgctgcctaagatgacttgagttcccggtaggaggagtggcagccatcactgcagctccagtctgccatttttcccctgccagtgctggggagactgggtagtttggacccaggaggaattgcccacagcacagcacagcagctataaaaggttataaccagactgtctctttaggccaggccctgatcaatcctcctcactgggtggggcctccctgcaggaacttcagcaattcctgccaggagtttagaaacagaactctgatctctctgagactgagctcttgtggggaggggtggctgtggtctccatggatcaacagacttagtcttttccccctgctggctctgaggaatccgggcagtctggacgagtgggattccacccagcatagcacacctcctctgccaaggggcagctagagtgatttgttaggtgggtcctggatcccatgcctcctgactggggagatctccccaacagaggtcaccaaacaccgtatacaggagcattcctgctggccttagtttggtgcccctctgagacagaaatcccagaggaaggagcaggcagccatctttgctattttccagcctccactggtgatacctccaagtatgggagggacccccagcaaattgcagtagccctatgggagtggaacctgactgtta

SEQ ID NO: 219822 - DNA, 453 bp, Homo sapiens
atgggaacagtccctatcatccatccagggctcccaatctccaccccgagctggtctcctgccctccctgccttaccttaacctgctcctgagtggagcctaagggaaggctggttctagggaccccagtgggaggcaagacaaggaggtcttgctgggagatttctggttcccacacaagggtccccaagactagcttctccacctggagagggtgggagaccagctggaaccccaaggagagtcaattttctggccttggaattaggtattttttgttttgaaaattccttggtatcaagtttacatgactggggccactggaccctgtaggcagggctgggggtacaaagaggatcacaagcctggcctctttgggagccatagctcaggcaccactcaaggaagcacatttgttcaagggattagcatttctggatgtcagttcagcga

SEQ ID NO: 219823 - DNA, 613 bp, Homo sapiens
tcatgatagaatcgagctctgtacccagcagcatagatattaccgaaacaaagtacacagaaaaatgacttacagtttgaaattggaaagtaatacagatgctccatcttagagggacaagtggtgttcaaaaaacaaaacaaaacggatgatccatctggttaaactcattctaagttgaaaataccttgtcgaaatgcattgaacacacctaacctaccaaacgtagctaagcgtagcccaccttaattgtgctcaaaacacttacattagcatatagttgcaagtgttgaatacctcattatttattgaatactgtactgaaagtgaaaaaacagaatggttgtatgggtaaatgaagtatggtttctagtgaatgtgcatcatttctgcttcattgtaaaactgaaaaattgtaagtaaaaccattgttgcctgtacataaaaccagttagaacaactggctagccatttggaaaaagataaagcagaatctgtatcccagtttttaagtcaaaataaatcttaatacagaatttaagacaaaaaaagtatgtgtggaagacaggacttactaaaactaccagaaaaatactgacatgtattattctaa

SEQ ID NO: 219824 - DNA, 435 bp, Homo sapiens
tgttctgtgaccctggcacccatggttggcagctgaatagctggcatatggtgacttactgggctggcaagcattaacgcactttgtaattttattatgacagtagtggagtcttgttcattgagtctctgccacaatgtgatagccattcctccagggaggcagagtcatttcagtcgtctctgggtggcattaagtttctccccatgaccaatatattgtaaatagcacaagggatgatatttctggaagtaggatcccatggtaatctgacaaataactgctgtgggatcagggtcagctcagaatacatgaggatgatggcagccacagcccttgttttgcctttatagactatggaggcagataaatatcgcagatatggtacagtttagtttcgcctgattctttgtcactgtagatcattgaggagtt

SEQ ID NO: 219825 - DNA, 154 bp, Homo sapiens
gattccagatctaccctttagctagtactggctgtgtgaacttaggcaagttcttgaatgtttctgtgcctcatttccccatatatgaaataggaatagtaatagtacctagttgataggatactggatgatagtaatcattcaacaagttaca

SEQ ID NO: 219826 - DNA, 644 bp, Homo sapiens
tagaaaagaattacataaatcttttcgtgcttgctagatttttctccccaggattcagggcatggaaatgtcatccctattaagaaggatttatgcctttagcaggtagttgctgaaactggctctagcatctatggttttattgatgccacaaaactctagactaggaaagaataaataaaattcacctcctcagctgattcttatggaacttcagggatgcagaaaggggcagctgttaagtgatgtaaaataaattattctggaaggcacaattagtatgttaaactgtggtcctaaaaacatctgattcagttttagtactctagtaagttgacaccagtggatgcatggataaaaatgaaaatatcatgaaaaaatctggcggtgctggtcattagcatagattcttccagaaagtgtcagaaacaaaactatagcctctagaataaagattttaaattggaaattcttaagccttgggatgattttttttaacaataagaagttaaaaaaacttgaaatatatgaaattatttgccacctctttacaaatctgagggcacacttaactttagaagcataaaatgcatctctcatagcaattttgacttacatgaaacatttagagaattcaaaaccta

SEQ ID NO: 219827 - DNA, 494 bp, Homo sapiens
ttagccccaaacaaaggagatcaccaccacgtggagtcaggatgggccaagcttttattctgaagcctttcctctatttcctaacttgttggggctttttccctgaaaaaattaaaaatcaaaaaacccatccatgacttttcaccatatcacgactgtggtccaaactatgcaggcagaatcggcagctatccagttggaggcacaaagatcttccttcctttaaagaaatccccctctaacctgccagaggaccccaaatggactcctcagaagcccctgtaaaggagcaatcatgttatttggccaatactccccaataactaatccatctttgtggcctcaggctttgcaccattccaggcaaacagcaggtgctcattaaatatttgttggctaaatgaatatacccacccccagttgttatccacttcgtcctgactagctgatcagattatagtctgcgtctatccctaagcaatgtccagagaggc

SEQ ID NO: 219828 - DNA, 364 bp, Homo sapiens
gcctcttcctgaaatgtggcagggagcgcaaagcagacatgcagacaaaagcagaaagccacaataacacacagacacacacgcgcacacacacacacacacacacacacacacaggttagaaattaaccagcacttgggagttgcctggagttataatgcctttttttttctttttggccacgtacacaaatggtaaaatagactttatttttaaatgtccagagcaagtaattctatatttttatactgtttgcatatttagttattcttgcagctcaatttttctccatacctatcaatcatctatctactctacctacctacctatcatctatttttaccgatgcaaaattttatgtaac

SEQ ID NO: 219829 - DNA, 512 bp, Homo sapiens
ctcagtacgtctgactccaaaaaatgggctgctaatccctttgctatacaatctgagtttctaatagtcagcttcttggtagaagactgaaatttgaattcatgaaagcagaccctagctgtatggtattcccagttttgagtctccagtctgtcgtttcataggaaaagcagggcttcttttggagattgggacaccttgctccagagaacctaccagttttccactatctggaaagaaaactaatttaatgttagactctaaatgcagaactttaagatatttcaagtatggctataacatctctctcttctctgaatataccaatctttgtttcagggtgaagcttacaatgcagttgactcttaactacatcttactgattcgcacttgcttttccaacagattcctttttaacttctttctttgctttttgaatttcctgattttaattaaatagtgggactatcagactcttcctcctcaaagacgtctagtacaagcacttgagt

SEQ ID NO: 219830 - DNA, 533 bp, Homo sapiens
catgtacacagtaaatcctcacttaatagtgtcaacacgttttttcaaactgcgactttaagcaaaacaacatacagcaggttcttgaataacaccattccattataacactgatgaggcagacaaaactggttcagttctatgtcattttgcttaagtttgcagcttccaagaacctgttaatggtgttaagtgaggacttactgtatgaccaaagcacaggaagcgctaggactggcaccgggtaggcacccaaggtatctgctgaatgaattagtggccaaaaattggtatcatttacatacattcacttataaacaaaacatgaaaaatttaattattacttgaagttgaatgatactttaaaaatacagttggaattaagaaaacaactctttcagtttaaactctggatacacacgcattttaagaaataatttgaaggctgggcacagtggctcacgcctgtaatcccagcactttgtgaggccaaggcgggcagatcacttgaggccaggagttcaagaccagcc

SEQ ID NO: 219831 - DNA, 200 bp, Homo sapiens
aattcaagtgtggctggaatggaggacgtcagtcacggggactggccacatacagactggccagttccattctccaagtacaggaatgtaaccctcagagcttaattccttgtagagggaaatgcaatgtgcataccaaaaaagtgactttccaagaaacgtgtattaaaccagaaaaataaaatagtttaacatttggt

SEQ ID NO: 219832 - DNA, 744 bp, Homo sapiens
ttcaagtccctttccacacggggctgctaagagcagtggtcagaaatgtaggaggtcaatttgggaacagcatgaggaagggtctgatcctgatgggactccgcgatcatgggacggggtgtttgtgaccccagccttcctcctcatggcatgtgttcaggcaggcccagggtggtcatttgtccagcgttttggtaagggaattcccacactgacaggtcggttagacttgaaacctttgtcttttcaaactcttaagacacacttcatcctatccattaggaaggcatagaatttccaagtggaaagttacttctgaatgtagcttgctgcttagcaaagttaggagactttccctattcacaaagcaaggtgatgcagacccagcaccagagacagatgtggaatgaaaaccatgcagttccagtgttctcgacacccacagaagcaactgccaggattgccatcaatctctcttgcctcttaaaaattttttaaattgtagaatgcatcatacaaacaaaaaagtatgtgaaatatgtatggacacttaaaagtactggaaatctatgggcccactgcctatgttaagaaataattccttaacttagcagtcaggaagtccctctctgatcacagccctccctcatcttcgtggaggtagccactgtcctgaagtttgagtttgtcattctgttgcctataaagcaaggatcagtgaacttcttctataaggggcagata

SEQ ID NO: 219833 - DNA, 587 bp, Homo sapiens
ggaggatcacttaaggtcagaagttcgagaccagcctggccaacatagtgaagccccgtcactagtaaaaatacaaaagttatttgggcgtggttgtgggcgtctccagcctgggtgacagagtgagactccatctcaaaaaaaaagaagaaaaacaaaaacaagtaaataaatgaataaaaataaaggaatccagccatctgttagtatagccaaagcagaggatattgcatcaaatgttaaacgctagtcctgtcagtcactcctgagagaacagggcaacaagacccagaaagggtatcaacactgcctgagcagatggaggcaaagctgtgcatgggctgcttatagggcacagtctgaggccttgcagcagtcacgtggaaactgaggctgcctgctttccaggtgcaaggtgatggacagtggcaggaaccctgtgctagatgactcttgtgcgatcttatttctttgttactgggacacaagcaccaactgtcacaagggaccaacaagaggaggtgattttttttttcagctgttaccacaaagcttttcatcttttggtttgaaaacatagctgtggg

SEQ ID NO: 219834 - DNA, 539 bp, Homo sapiens
ggaaacagaggccttcctcttttactaatccttctcagcacagaccctttatgggtgtcaggctgggggacggttaggtctttcccttcccacgaggccatatctcaggctgtctcagtggggggaattcttggacaatacccacgctttcttgggcagaggtccctgcagctttctgcagtgcatcatgtccctggttaatagagaatggagaatggcgatgacttttaccaagcatacagtctgcaaacatattgttaacaaggcacatcctgcacagccctaaatcccttaaaccttgattcaatacagcacatgtttctgtaagcacagggttggggctaaagttacagattaacagcatctcaaagcaaaacaatttttctttgtgcagatcaaaacggagtttcttttgtcttccttttccacatagacacagtaacagtctgagctctcttttccccacacaaaactatgtttaaaataatttaagtatgattatataagatttgggggccgggtgcagtggctcacgcctg

SEQ ID NO: 219835 - DNA, 435 bp, Homo sapiens
cattgcaaagataaaggagaaagggcacaatcaccaatgtcatgaataaaacaaggagtattactacagatcttctattctttaaaaggataattaggtaatactattaaaaacttcatactcataaattgtacaatttagtagaaatggaccaattccttgaaaatcacgaacttctaaaactaaccaagatgaaatagacaatctacatggtataaaagccattaagtaacttaaattcataatgaaaaagttcctgaaaaagaaagcctcaggactttctttttggtttcactggagaattctaccaaatatttaaaaaagaattatcatcagttttagtcaatctcctccaaaaaaataaaagatgaggaaatacgtttcatgagtctagtataatgttgataccaaaaacagagaaagacagtgcaaaga

SEQ ID NO: 219836 - DNA, 328 bp, Homo sapiens
ggtggggttgctaatgcatttaactgagtgctttttaacagcccagctggagaaacaggaagtgggacaggatcagtggaaacgctgcttgggtatttgaaattcaagcagtgagacctgagagactggagttcctcgccaattccagaacctcagtgcagggcattactcttttagatacaaagattgggtgtagaaactccacatctgtcagccacgtaacacagcccatcagataatcatgttaaggctaacagccagttcgaaacattctgtagaactatatctgttcaagggctaccaggtcctacctatctgtctcacctcc

SEQ ID NO: 219837 - DNA, 481 bp, Homo sapiens
cttcagcaatttttcttgttctgatgtctacattatctgatactaagttagtccttttttcccatgatcaatgtcttcataatatattttcccatgttttgccttcaatttgcctaggttattatatttgaagtgagtttcttgtacacattatatagatgggtcatatttttaaatccccttgaccaatctttatcttttagttggtatatttaggacacttacttacacttaatataactgattagagtttaactatggcaatttttgtttcttttctgtttcctcatttccgttttctctttcctgccttcctgaaggttacttgaacatgttttttcagaattatataatgtttttaagtgtatctcattgcatagaatttctagtggctgctctagatattacatcatatttacataacttattactgtataccaatgtcttcattttaccaatttgagtaaagtataaaacctta

SEQ ID NO: 219838 - DNA, 372 bp, Homo sapiens
ttgcattcccaccagcaacatacaagagttcctcttgctcctctccgtcagcagcatttgatgctgctggtgctcttggttttggccattctaatagatgtgtggtggtacctcattgtggttgcaacttgcattttctttatagctaatgatggtagcagcttttcatgtgagtgtagatgctctggtcaggtgtcacttcaagtcatttgcttcttttttaactaggttggttgttttcttatggttgagttttgagaattctttatgtattctggatacaagtctcctgtcagatatgtgacttgcaaatattttccccagtctttagtgtgtcttttcattctctaaaaagtgtcctttgcagagaaa

SEQ ID NO: 219839 - DNA, 262 bp, Homo sapiens
gccctctgaatcatttttaagaggtaaaaattagtatctttttcctttaaaaggaatttctttctctctttgcaaactttgagtttctctgttttgaagttttcagatatggactataaactgtcttctgtggggtttcttcttaattgcctgcaaaatttcatgaaattagcacctactgtataccttcttgtgtctagctaggagactctcatcacattgttgagtgagtgaataaatgaatacatttcactttgtggaa

SEQ ID NO: 219840 - DNA, 411 bp, Homo sapiens
gtctctgtttctgccaaaccacatctcgaaaggctcaggatgaaaatgtaggtgatagactcggggcctcaggtggaaggaacccctccttgaaacccccaggacaccatgcccgtgaagagtttcactgattgtctgcccaaggttctgagcagcaaaaaggaatccctggacccagcaagtgcctgaaatcccacatagtctcaggtccctgaggatcacccaatgtgtacttggcttccccttcgaaatgcctttccttggtcataagtgaccaaaaactggggtagcgttggggtagccgctttccagaagtgtatcgtgccacatcgtatcatatttgctgctgctgtggaaaagtgcatgcatggctcataaaattacggtgtttggagttttaaaatctggccc

SEQ ID NO: 219841 - DNA, 509 bp, Homo sapiens
agctgaataaaattattttcataaaaatgtactaatttgtcctatgtgaaaaggaactaagagattaaaatctagaatttgcttattaaagctagaattataaagtctagaagtctccatatttttatatttaaaggaggaatgactgaggagttctagcttccagtcttaatgtaagtggtttgaaatgctttactgttaaaaggaagttacagagctgggcgcagtggcttacacctgtaatcctagcactttgggaaaccaaggctggcagattacatgaggtcaggagtttctgaccagcctggccaacatagggaaaccccgtttctactaaaaatactatatatatatattagctgtgcgtggtggtgggcgcctgtaatcccagctactcaggaggctgagggagaatcacttgaatccgggaggcggagatcacagtgtgccgagatcgtgccactgcactccagcctaggtgaaagagcaagactctgtttcaaaaaaaa

SEQ ID NO: 219842 - DNA, 330 bp, Homo sapiens
tagtagagacggggtttcaccatgttggccaggctggtctcaaactcctgaactcaggtgatccacccgccttggcctcccaaagtgctggcattacagctgtgagccaccatgcctggccaataaaaactcttataaatgaaaatctatttataattatttgagcctagaagctaatactgttatacagacatgaagtatttttcagttttagtgtacagtgaatatactggtttttattctgatatctacctgtctacctttttattttctgtatgatgtatggaatggcttctgatcccctctcaaattcagaattattcattagaa

SEQ ID NO: 219843 - DNA, 1083 bp, Homo sapiens
ttagacataatccaaatgttcttcaatgagcaaatgactaaaaaacctacagtacatccataagttggactactattcagcaataaaaaggaacgcactggtgaatctccagagaattaaactgactcagaaaaaccaaaatggtacattccttttggggaaaagttctccttagtctggcaactattaatctcctccatttctacaattttgtcatttcaagaatgttacataaatggaatcatagttgccagactaaggggtaggctgaagaaggagggaagtgagtgtggctagaaaagggcccatgaggattcctgtgggcttggaaatgttctgtgtcttggctgtatcagcatcactatcctgggtatagtaatagtgtacagtggttttgcaatgtgttaccattgggagaaactgggtaaaaggtataagagatctctgaatttattatttgcacgtgaatctacaagcatctcaaaataaaaagctaaaaaacaagcaagtggccagatacgatgtggctcacacttgaaatcccagcactttgggacgctgaggcagagggattgcttgagcccagcatgaacaacatagggataccctgtctctccaaaaataaaaataaaaaaattaggcatggtggtgcatacctacaagttccagctacttgggaggctgaggtggaagaatcccttaagtctgggaggctgcactgggctgagatcacaccactgcactccagccagtgagactctgtcttaacaaaactcccaaaaaccaaaaaccaaaaactctttattgacaaaaacatttgtctctgactgtggggtaccttggggctaacctcagtgtgtggaagaacacttaggctgctaaatgtttagtgtagagaaccacccactagctatacttacccatggtcaccataaatgctgtgcatgtgggggtgactgagtgttcatctgagaggcacggtgtaggtgaggagctctcattcaatgtgaagatgctgggtttgacggggggccgacagaaaggatctatgtgaagaacattgccatagtctctgtaacagag

SEQ ID NO: 219844 - DNA, 542 bp, Homo sapiens
gtatttctgcagcctaagaaaactgcagcattctgttcactgagaaatttgtgcttccataaaaaatgattttaaaaccctatctattattgcagtgaataaaatgagattttgagcctattgttggatttaatcattatttttatggcagaactggggttgtgggagtagttataaccagttgtgttcttttaatctcttttattaagtcatttatcataagtaaaattcagtttctgaccttggtgctttatttaagtttccaacttatctgtttcttagcatgttttgtgttcccattttaagtctgtaagggttatagaatacttatttcattttctctataagaaactgtttagcaatctaggatagtgttatgattaaatggcaaaaagaagagataatgtcaaaattaaagctacttaacagtaaggggcatggaaggctacatatcaaacccatctacactcaagcttcattttcaataggggattttctatggcctcttggctttcttgcttagcttaatccaagatttctga

SEQ ID NO: 219845 - DNA, 463 bp, Homo sapiens
aaccaagttcaggctctcccccagcaccccctctcttcctgtatggctggccatgcccggaggcgctccagccagagaccctggtgtcctcagcggctcccttgctccatctcacctgctctcatgttcagtcaccaaagtcctgtcagtgccttgcagatgtcttattttttcaaatatggaaataatccttttatttggaatatattattgtaaaatatgtaagcaaatttgtcccctccccaacccagggacacccatgattaacactttgctgtagaaggtccttcacactctcgaatttgttaatttgaatgtgtaaagatctcccttgttctctttaaaggctgcatagtagtatttcactgaatgtaccataacttatttaaccgatctgctttcagtggacattacgttgtttccaccttttcactgtaataaacaatgccgcaacaaacaaccg

SEQ ID NO: 219846 - DNA, 430 bp, Homo sapiens
catactgcttctctattagcaaaaggccttgtggaaaacttaccttgtctgcttctgtttgtcactgcccagaggaaagtaaacctagttgtgcagctttggccaatattattattgggttacatttaaaaaagttattttaaaaataggctttgtcttttaaagcagtttcaggttcacagcaatattgaatagaaagtacagagggtttctatatacctcttcaccaaccttatgcccaaccttccccattatcaatgtcccatcccagagtggtacacttcctataattcatgagcctacattgacacatccttatcactccaagtccatggtttatattggagttcactcttagtgttgtacattttatgggttttgacaaatgtatactgacatgtatttattaaactatcatacagaatcgttt

SEQ ID NO: 219847 - DNA, 427 bp, Homo sapiens
gcttttgttttctaggttatctgccatagaacctgttttctaaactgctgtaaaattaaacactgttttggttgggatgactgacaaggcatagatttaattcagtgcacaagacacagagtccaattttggtacagcataccaggtgttccatgatgaacatttgttcatctaaatgtccctggatatggtccaagctgttctctcctgttattaaagtactaaagtaataatagtaataaatcaatgttttggtgctgaaaaaaaatttttaagcagctggcaaaaacatggttcccagccgggcacggtggctcatatctctaatcccagcactttgggaggccgaggcaggtggatcatgaggtcagtagatcgagaccatcttggctaacacggtgaaaccccgtctctactaaaaatacca

SEQ ID NO: 219848 - DNA, 500 bp, Homo sapiens
tatatataatgaaaagaatatatatataccagaaataatataggaggaaatgattaactgactctagaaaagcttgtggaggagacactatccaagcactattttgcttgaggaataggagttcacaaggaaatctgtgagggaataagttgtacaaagacatggtaggatgaagcagcatgatgtatgaggaattccaggtggtttggtctgactagagtctaaaaggtgaggagggggattatgggagagataggcagggccaggtcacaaagggaagatgtgataataccatatataggaataaaatggggggttttgtgattgactctgaattcaggtccaaccaatttaatggagctgctagaaatgttaatgtacgccaggtgcggtggctcacacctgtaatcccagcactttgggaggccaaggcaggagaattgcttgagctcaggagttgaagactagcctaggcaacatagtgagactctgtctctaca

SEQ ID NO: 219849 - DNA, 499 bp, Homo sapiens
agcataatcacctgagcttcctaataagacaaagttctactgacgctggtaaccaggtcagcttgttgagaacagtcttggtaacagtcttgacagctagctagttggtggttctctactcagcactcatgcctgtggtcccggtcttttagttgtctcagaaaagcaattcatatggaggcctttatgttggttgatggcccctgcagatatcttcatcttcaacatgggcaccaaatccagtctcatctgcaacagctctttctagtttttttctacccgtaccgtggcaggccagatctcaataacgcaggcctccataacaactgtttcagcactgagtggttaagttaaatattaaaagctgaaagagtgagggcccttatgcaaaggctagaatgtaacaaaaggccaccaagggttttgcccaggccttttctgggccttgaagcatgacaagataacaaaggaacccatttaggattaaacaagttttatt

SEQ ID NO: 219850 - DNA, 149 bp, Homo sapiens
cgagtagctgggactagtggtacaagcatgtgccaccatgcccagctagtaagtagttttgacccatgaaggcagacaaagagatgtgacttgtagagttgaatttgtggcaaagaaacagtatcacactgtatgtcaacacacaagtt

SEQ ID NO: 219851 - DNA, 464 bp, Homo sapiens
ccgggcatggtagtgcatgtctgtaaacccagctactagggaggctgaggtggaagaattacttgagcccgggaggcggaagttgcaatgaaccgagatctcgccactgcactccagcctgggtgacagaggaagaatctgtctcaaaaaaaacaaacaacaaaaatagagacatcaaaggatggtctgatgaaggcaagacaggggctgggggacaggagaaggcagggttcctgtgaatgcatggggggtggtcagggcaggcctccaggaggtggcgtttgagctgagacctcagtgaaaagcaggtggccgtgtgcagggagggggaggttctcctggccagaggttggaattgcatccttctaaaataggaaacaggccaagcgctggtggctcacacctgtaatctcagcactctgggaggctgaggcgggcagatcacaaggtctctactaaaaata

SEQ ID NO: 219852 - DNA, 546 bp, Homo sapiens
ataatactttactgttagccatagtcaccctactgagcaacagaacaccagaactttttcctcctgttaaattgtaactttctagccactgaccaatctctcccatcctttcctccccagtctctggtaaccacctctctgtacctctaatatatcaattttttttcagattatacagatgagtgggatcatgcagtatttgtctttctgtacctagtctgtttcactcaacttatgtcctccaggttcattcatgttgttgcaattgacaggatttcattcttctttatggctgaataatattccatcatgtatatcggggggttcgatcttttggcttccctggtccacaatggaagaagaaggattgtcttgggccacacataaaatacactaaccctaacgacagctgatgagcttaaaaaaaatcacaaaaaattctcataatgttttaagaaagttcacaaatttgcattgggctgcatgtagccgcgggctgtgggttggacaagcttgatgtatgtataccacgttttctctatccag

SEQ ID NO: 219853 - DNA, 501 bp, Homo sapiens
gaaaagacataaccaaaaacggaaactatagatactgttcttttttaaagattccaaaaagtcgttagatgtgaatacttccgcttttaagtacaatgtagtaaaaacagaaagcaattacaactagaaaaaagacattttacattaaagataacaaagatatatagatgcatatgagactggaagaaataaattctagagagagaaatgtctttgttatatgaacctagattgctggccattgtcttgcctggggcattttctgagtctggacacaggctttcatagacagagcaagcaactgtactaaagggaaaaaacagaattgtcttattgccagttgagtcagcatggacaaattggaatctacaagatcatcaaatgaatagctgttttcctcacagattactcactgaatgctagggcagtatagcagactggtaggctgagccacaaagacagacagaaatcaactggaggccaagtcatgctcaaggcaag

SEQ ID NO: 219854 - DNA, 301 bp, Homo sapiens
tgttgcaagtaaagctgctatgaagattcatgtaaaatcctctgaatgggcatatgctcttagttttcatctctaatagaagtggaatagacagctatcatgtctgtaatatgcaaacacaaaggctgacaaaactgatttctaaagtggaaactccactggataaccttgactccagcctggcttttgagattatctcctatgtttgtgcaatgattggtcctggggtagccacatgacccaaggaggaccatgtttaaacttctgagttttcatcgagattaacatgcatttgttgaaa

SEQ ID NO: 219855 - DNA, 430 bp, Homo sapiens
tgtttttagtagagacaagatttcatcatgttgcccaggctggtcttgaactcctgacctcaggtgatccacccgccttggcctcccaaagtgctgggattacaggtgtgagccactgtgcctggcaggattattttattttttgtgataaggtagggtgatgtggtgaaaagaacacaggctttcataagagaggtagacctagatagataattcttgttctgtcattcactagctatgtgaccttggaagttatgagtccctttcaaacttgcatttgattcatctataaaatattaatatttttagcttattcaacaaatatgtgttgaatacttagtatatatcctattcagagatgctataaatatagtggtaatccagataaaaaagatacctgtcctcttagatctactctataaggagagag

SEQ ID NO: 219856 - DNA, 415 bp, Homo sapiens
tgggtgacggccagaatcacactcaaagaaaaagaaatgtacaaagtctaataaagttgtaaaactatcttcaagaacagaaaagaccaccttcaagaatgcttaagtggagagagttaccaagttgcaggatgggaagacctaatgctgtaaagcttgaagttgcagttaaaatcccagtggggtttgttttaaggacctggccagttgattcaaagagtaaacctaagaagattggggaaaataagaatgaggggacttaccctatcaggtagcaaaatgaactcaagctgtgggaatcagaagctgtggtgtggatgcagaaatagaatggagatcagggcaggattaggaagtccagaaactgaccctgaacatgtggaaagtcagagtgtgtgaaaggtgtcattttgaa

SEQ ID NO: 219857 - DNA, 463 bp, Homo sapiens
aagtagatcgcccttagctctgtgtttttttcctcttgaaaaactcagatatgtaatcagttgtgcttgatattttcagtgtacaaactattttgtagtctgtttggaagattaactctttcaagaccattagattaggacttatcaaatgactgttgcatactgctaatgggcacctgggtagtatcgtgtagcatcactggacatgtgctccttagtcaagaaagcagactttttctttttttttggaaatagagtcttgctctgtcaccaggctggagtgcagtggcacagtcttggctgactgcaatctctgccttctgggttcaagcaattctcctgcctcagctactcaggagactgagttaggagaatcccttgagccccagaggcagaggttgtggtgagccgagatcgcgccagtacattccaacttaggctacagaatgagactctgcctcaa

SEQ ID NO: 219858 - DNA, 443 bp, Homo sapiens
tcacttacatctggcagttaactttcagtagagacacctacacgtgacctgggcctctgcacagtatagtggctgagttccattagtgaccatctaatgaaagagccaggaagaagaagctgccagtttctagggcctgagcctgcaaactggcacagcatcacttctgaaatatattatttgtgaggtagtcacaaagctcagagtcaagaggaagggacatagacctttacctcttgatggagaagtagcaaataattttgaggctatgttgtaaaaattaccacacatgtattcatatgtctgttagataattttcataatatcttgttctgcttttcactcttctgtggaggacagtgagctagctacatatttctttcttggtatctctcttttttccctctttaaattttttttccctttgtatcttaattaaaaca

SEQ ID NO: 219859 - DNA, 332 bp, Homo sapiens
tttaagaaaaggtgctgaatataattaatcatcagggaaatgaacaccaaacctcaatgagccatcacctcacatttacagagagataacacaatgagatatcagatcatgagatatcacctcataccgttagaatgtctactatcaaagagacaagcgatcacaaatgttggtgacagtgtggagaaaaggaaacgttgtatgccattggtggaaatgtaaattgatccagccattatgggaaaaagcatagaggctcctcaaaatattaaaaatagaagtaccatatgaacctcaattccacttctaagtatatacctaaaagaaataca

SEQ ID NO: 219860 - DNA, 213 bp, Homo sapiens
aagtgtgggcactgtcgcaccacacacccagatactactccaggcacgggcattaggggctcccacaggctggacaggccttggactttcctggttgaaccgtgaggccgcggtgtcagtccacactccactgtgggtggcgggttcggccccgcgaggaggcgccgctctcaaaccccacggtcccgcgcagcgaagaggcgaggcggccgc

SEQ ID NO: 219861 - DNA, 486 bp, Homo sapiens
gggaacaggtgagtaagtagagctatcagtatagagtcagtcacctattttacaatcaagctttcctcggtaccactaaatgttttctgtgacttcattccattaagaatagccaaggggccaggaatggtgactcaggcatgtaatcccaacattttgggaggcaaaggcaggaggatcatttgaggcctggagtttgagaccagcctgggcaacttagtgaaacccgtcttttaaattggttgggtgtggtggcacacacctgttaatcctaggttttcaggaagctgaagcaggaggatcacttaggcccaggagttcaagtctgtagtgagctgtagtcatgccactgtgctcctgtgggcaacagggtttaaccctgtctcaaaaaacgggggaaaaaaagactaaccaagcttttactttaatgtcagttgttaacttggtccaaactggtcaatggtaatcttgtttatatattttaac

SEQ ID NO: 219862 - DNA, 862 bp, Homo sapiens
agtgggtgcccaagataataattcttcttccaatgtggcccagggatgccaaaagattggacacacccctggtccgaggtgatatagcagtacccaggcaagaaagaaagaagaggccgggtgtggtagctcatgcctgtaatcccaacattttgggaggctgaggcaggcagatcacttgaggtcaggagttcgagaccagcctggccaacatgacaaaaccccatctctactaaaaatacaaaaattagctgggcgtggtggcgggcgcctgtaatctgagctacttgggaggctgaggcaggagaatcgcttgaacccaggaggtggaggttacagggagccaagattgtgccattgctctccagcctgggtgacaagagcaagattccatctcaaaaaaacaaaaaagaaaagaaaaaaagaaatatacacctactactatgtacccattaaattaaaaaaaaacaaaaacaaacaatgtggtgagaggactgcctagggaggccaagcttatccaacccatggcccatgactgcatgcagcccaggagagctctgaatgcatcccaacgcaaatacgtaaactttattaaaacatgagattcttttgccatttttatttttagctcatcactattgttagtgttagtgtattttatgtatagcccaagataataattcttcttccaatgtggcccagggatgccaaaagattggacacacccctggtcctaggtgatatagcagtacccaatcaagaaagaaagaagaggccgggcgcggtggctcacgcctgtaatcccagcactttgggaggccgaggccggtggatcacgaggtcaggagatcgagaccatctt

SEQ ID NO: 219863 - DNA, 422 bp, Homo sapiens
gaatataatgaaagttttatgaacatttaagttgcttagtgtttttaagtcactccattcattctattaagtctgttctgttatttatttattgtacaaactattctaatgctatagtaacaaacagatttctcaaaaaatagagaagtcctacagacatcacaatattttcatgtatttgtgctcttctagtactagtccattagacaaacatttctctgcagccgtcacaacttacttgcaattatttcttctccctttctcccttaatattgctggtatatcttcatattgatcattttgtatggctgtataatatttcatcaaataatgtattgtaatttatggattctcctagttttggaatttaagttgttttaatcttacctgcttcaaaaattttgttttcacccaagtccaga

SEQ ID NO: 219864 - DNA, 472 bp, Homo sapiens
acaacaacaaaacatctgttcatgtcattcctcttaaaatcctccagttgttccccattctgtccagaataaagtgcaaactccttagtttgtcatacaggcctgttatgatttagctcctgcctactttttcagctcctgcctcccccacatactctgggcatttttctcagacctggatatgcccttcccttcctttctcttcatcaagcaaactcctgctaattccttaaggctcaactctgacatcattcttgaaagctttccctaaaatgtaggtacacatctatatgttagcactttgcagttattgatactgtatatggtgtacattgaataaatgcttgctaaaccaaactgttaagggcaggactatgttattcattttatatctctgttgcttaccactgtctcataaaaggtgatattgatggataaatgaataaattattgaaagaatatatgaatatta

SEQ ID NO: 219865 - DNA, 438 bp, Homo sapiens
cctgagcatatgtttttgagtctatcagtttgatcatggaaactgacagattatcagtaaggacaacgaaatatagcggcatattggccagtctcaaatccttgaaaggtgcaaaagttaaaaagtgaaaagtgggccgggcacggtggctcgcacctgtaatctcagcactttaggaggcagacacaggaggaatgcttgagcccaggagttcaagactaacctgagcaacacagcgagacccccatctctacaaaacatgtaaaaattgtccgggtgtggtggcgcgcgcctgtagtcccagttactcaggaggctaaggtggaggaacctttgagcccaggaggtccaggctgcagtgagccaagactgggccagtgcactccagcctgagtgagagcaagacgctgtctcaaaaaaaaaaaaaaaagaaaagaa

SEQ ID NO: 219866 - DNA, 243 bp, Homo sapiens
agccacagatgaatggagctcaaaaccattctgctcagtgaaggagtcaaacacacagcattacatatcacttgattccatttatatgaaagtctagaaaaggcaaagctatagtggcataaaggtccttaacagttgccaggggctggggccaggagaggggatcggctacacagggactcaaggaaatttctagggtgatgaaaatgttccagatcttgattgtggtgatggctgctctat

SEQ ID NO: 219867 - DNA, 509 bp, Homo sapiens
gaacagtaaacacacaaatgtgtgaatccatgagtattagatacagaatgatctgtaaggtttccagggtgtggagatattggttgggaaagagagtattagtccaaatctgagaagtcaaatacaaaggccaagaatttaaatggtttatcaagttgaaggataaagcaaggtttggtatcagatggttaggcataaggttacgggtgtatatcagaagaggagttctcaattccaagaatgtggtccatccattgctgtctggtcttaaatactctgctgagctagcaacctggtcttaaagggatcgaataatgtcagacaggtctgtgttccttttcttccttccccgttcacttttattgagtagctacagtaagggaaatggtaggaaacaagggagcagaaagggaaataccccaaatatggggaaacatctttttttctgggtcaatgaaatatgtgtgtgtatatatatatgtgtgtgtgtatgtgtatatatatatata

SEQ ID NO: 219868 - DNA, 240 bp, Homo sapiens
atacataacattccaatagttttgttgactggaaagttctggtatttgccttctattcagccaaatacacactatatactaaacacacacacacacactttcctcagtactaattactgtacaatatttaaattctgtttatgtagtctctatcctattagacttcttacaggcaggaaaagcatctagttcattcagattcttagtatctagaattgaacctgacacccaaacatgtga

SEQ ID NO: 219869 - DNA, 853 bp, Homo sapiens
ctcaagcaatcctccagcctcagtctcccaaatagctgcaattacaggcgtgagccaccatgcctggctgagagggaatcgttaagaaggagtgggcaggggcaagaacactgtcagagacagtgtgttggccacggctactacagcaaattggctgcttcctgtgatcgcacgggttgagggctcagttccacaaggctgccccagcatcagatgccagtcgcaagctcacgtggtgcctgtgcttctgacacagggctataaaaattgaggttcccatgatcccctccttgggttcaattaattttctagaatggtacctagaactcagggaagccctttacttacatgtgtccccttataaaggatattatagggcctggcgccatggctcatgcctgtaatctctgtgcttcaggaggttgaggggggaggttcacttgagcacaggagtttgagaccaacctgggcaacatagcgagaccccgtctcaaaataaagatataggatattacaaaggatagttatgaacagccagatataagagatacacagagggaggcctgggggaaggggtgcaaagcttccgtgtcttctctaggcactgcaccctctaggaagctccatgagttcagttatccagaagccctctgcatcccttttgggtttttatgggcttcattataaaggcatgattgggccaggcacagtggctcatgactgtaatcccagcacattttgaggctgaggtgggagaatcaattgagccctcaggtggcaactgaggctgcagtgagttgtgattgcaccactgtactccagcctgggtgacagagagagagcctgtctcaaa

SEQ ID NO: 219870 - DNA, 283 bp, Homo sapiens
agaggccgagtctcactatgttgctcagactgatctcgaactcctggcctcaagtgatcctactgcctcaacttcccaaagtgatgagactgcaggcaggcatgtgccaccacacccggaccccaactcttggtttagtccagggacatcaactgctactcagaactacatctgatatctatattgttaactgattttaaatcacttatgataaaacacttttattatagctaatataatatagtgacccatttttagatgttttgctgtgataatatgtaaa

SEQ ID NO: 219871 - DNA, 678 bp, Homo sapiens
ctggtcttgaactcctggcctcaagagatctgcctgcctcggcctcccaaagtgctgcgattacaagcgtgagccactgcacccagcttgaaatgtcttttaaaaagttacaatgacaagccaggtgttggtggcgggcaaccaactactcaggaggctgaggcacgagaattgcttacacctgggaggcggtggttgcagtgagctaaaatctcaccactgcactccagcctggggggcagagcgagactccatctcaaaaaatttccatcaaggcactgttagaataaacccaatctgagcattgtctcttttgggctatgagctgtcttctaagcatggttttggccatactccatggatttgatctgtgttgttctcattgttaattgctaaatagtcactgatttctccatctctctctagctttttccttgcattcaacagttacatggaacagtattttaaaattcctaatttgttaggtttttgagctctctctccgtagccattcatttattgcattcggcaccccacaacctcgcacataaccctcccttttcgctattgtttctacactgccctacattatcaccccattccgctactaacactccatgctcacgccctgctacgtgctttcaccccaccttcccacacactctggctagcctctcg

SEQ ID NO: 219872 - DNA, 404 bp, Homo sapiens
atgtgtttggggaaaaaagaaagcaggattgtgtgactacgtttccaaacttcacttgcccttagccatagtgagttgggggcctggagattctgttttctttcacaatgatatagatacaattaaatgtatagaaagcaaaaaaataaaaaggtgagtaatgaggaacctctgattcctgagtggccatgtagttacccatggcacagagccacagttactgaaggtaaagtttgctggggaatttagaaatgaatccagctcttggaggagtcagtttactggatgcctaagaaaatgcaaacaaaataagaaaaaagggtaatattcaatcccatagttattgttacctgtcatagctaaagtaaaattaaaacagagtgctggcttcaatcttgatgcta

SEQ ID NO: 219873 - DNA, 504 bp, Homo sapiens
tagcagtctattgtgtatatttctctatgacagtacatagagacctgctgtcttctttttaaaggctgcttggtatgtattccaccacgtagatgtactgctagttcatctcctcccctacagatgaccacaaagtttttcaatgtcctgataatatttataggccactacatcctcatttttatacttttatgcatttgtgctagtgtttctataaaatagatttctacaattgagactgttgagttaaagggtatatacatagtaagttgtatatacttccagttgccccttgttgaaaccttgtaccaatcagtgcagtgtccttttaaatggtcttttcattgcctgttgcttccctgtctccccaccccccggctcttcaccctagtgctagaattgcttttatgaaactcagatctgaccatggcttgccctgtttaaaatacctcagtggctcctcactgtcagcaaaacccaaacattcatctaagctccttctca

SEQ ID NO: 219874 - DNA, 431 bp, Homo sapiens
tatgggaatatggctaattttctgcttgactccagacagattctaaattactgaggcacattttattttaaattgactaataaagaaatctcacaccccacaccatttcacattttcttgggtcgtttaatgttcccacttttctacagtggctcagtcctctccctgagagctgggtcgggaatgcggtggaggagggctggaaaacagttggacgcattgtcatttctcctctctcttcctctctctctctctaattttccctgatcaaaacacaaagaaaatgacaaaaaatatcaccctgaatcagatgccttgcttttatgctcacttacaccaaaaaacacgtacggctttttgctttccccaacataaaaataaatggaaaacattttgcaaatgtcaaatgctatatgaaaggaaaaaatatg

SEQ ID NO: 219875 - DNA, 408 bp, Homo sapiens
catccctacattaggataattagcaatcgtttaacagtaagaagagcgcctggaagtcacataaatttattccattaaatccaaattaattatgtccccaactctactgcccctaactggaacccagttggcctgcgggcaccacagctcaccctgcagaggagaaattgatgaacgggacatgagcatggaaaaagatccgaatccgttgctcttaaagtagcttacttttgcaaattgtattacatatgagcacatgggcacagtgttagaggccccctcaagaaatacatgctcacatggacactgcctgcggtgctcacccaggccctggaaggggatcgtgcaatgaagggcactgcagcatcagctttgttttatagtaaatctactttggacacctattaa

SEQ ID NO: 219876 - DNA, 528 bp, Homo sapiens
atgtatattaccgtaggtctgttgaaatacaaaatattctgaaatgtttgcattttgaaaaagacttggcctctaccaggcactaatgtgcagtatgcattgtttatacatgggcatatttatataaacagggttacaggtctgtgtaaagaagttacattgattacaagagctaatataagcttgggaatatttgtgttaatacttcagtttttttcaaataaggtcccatgtatttcttacatagaagactgtttcctaaaagtggtaaaaaggaaaacactcatctctaatgttttatactgtgccagctacatatttgacaagattcttttagttattctacttattagagatatttgtaaaggaatgtgttctgcatactaattagcattaagcagtatctttgacagaagcgagtcaccagctattctaagtaagaactgaagaacttttggatggcatggaatatttcaaatatttcaccattcagcagtctagctcgtgatgatcaaatacaccaataaa

SEQ ID NO: 219877 - DNA, 617 bp, Homo sapiens
gtttggatgctgcctataggtccagaaataatatgttatgtatatgtatatgtgtgtgtttaaacacatgtaatatatatgctttatctcagagaatatcctttcaaaaatatagaaacttaaaaaactaaagttactttaaaagagtacatttttaaaaataataaactatcattcgatttactgaatatgtgttaaatccacatttcaaataagacacgatgagtttatattgttttgtggtatctcatccaaaagagacaaagcagactaaaagagaggataagggtttggggggcaaaatggttctgagcccccaaaagtctttggaaaattttgatgctctggggttcagtaactgagcaggaggctccactttcttgtgaaactacccacaagattgacttgattcttcaaaccttcatctctctagttcttgtgactcttggcttagcatcaatggtcaaattaaattcttcaggccaggagaaatagaggtggcccttacaggcatccccccaacaaacaatcttagacagtattttatcaaccgggaaagcaatatttacagatgctaaaagataaaaggctttctaaaaaaaaaagaaaaaaattca

SEQ ID NO: 219878 - DNA, 429 bp, Homo sapiens
ggttttatactgtcttttttgaactcatgatgtcatctgattgcaacacttaacttccagagggcaactggggagaaggaagacgagaacagtctaagcatcacaaaacagaacagggatgtttccatatgcccctttcttctactctttctcctcaaggataaacatacaattttcaaaacattctaaaattctaagagctgttaccacaataaatcaaagaaacaaacaaaagacatgtttcctgagcacttactatcaactaactttctagacaaactctgtgctaaaacacaaggaaaacacacactaaacctcgctagcatttcaggaggtccagcagatcacagatacaaatgcagacaggcgctgaactttgagagaaagacaggtgactgattctgtagagactggtgacttatgaacata

SEQ ID NO: 219879 - DNA, 537 bp, Homo sapiens
acttaaggttcctatgggaccttcaaacacagacgtcctgatgaacagagagagaaagggacagaggaaacagcactggagcccattggtgacagcgccttaggcaactctctgaggagacaagcatagacaaccagacctaatcaaatcccagcttctgcctcttagcagctatacgacctggggcaagtaaattaacctttttgggactctggtctcacctaaggaaattccttttgggatttaatgaaatcagaaaaggacatgatgtcatggcaaacagaagagatttaatattttcctcttgcccttttgtgatcatatactgctttgtattataattgagtacttaacctttgcagcagattataagttttcttgctgtcactcatctttaaatcccttttgaccatatttgtaggcacagattctcaaatatttgaattgccacaagtcatatgaaaaactaaggccagactgttctgggggaccaggggtttcctgcttttgacattaaataacaaatgcaaagatctc

SEQ ID NO: 219880 - DNA, 622 bp, Homo sapiens
aaaagagaaacctaaccactcttcagcaaacaacaaaagcttggatacatgaacaattttacagtcatcattttataacagaatttatctaattttgaattattaggaaaagcagagggaacaatgaaacatagattcctactgattcaaacttggtattttccaactacacttcatatttctcctataactcagagttcttccaatgccataaatattgcatggtcaatttcagacctagaaattgacatttcatctagcaaaagggctgattgttcatgatggaaaattttgtgttccacctttaaaagctctgcataacataaaattctaatcttccttcaggaaccagtaacagtttaaaccacccctttacactaccttggttaacagaaaattccattcacatagaagactaagaactgatctgtgaacattttaggaaaaggtttttcattatgaaatcagaagattaaactctactaataactaactgcataatcttggccaagtcaataaaactgtctgaggctcagtttcttcatctgtaagaggatgagatttgactgacttctcatgagtcatttccaaagctctaatgacttgaaactctttattaagt

SEQ ID NO: 219881 - DNA, 227 bp, Homo sapiens
acaaaccccccgactgcatttgctattgtgccctttgtccaaagtaatcaacataccaaagtgtcatgttttggggtggcatttcctaaactccctcaaccagataaggtaatatttacaagttcctggaatgaggacacagatacatcttttgaatgggtggcccccattcagctccctacaataagagaataaacagtggttttttaatattgtctatgctgctt

SEQ ID NO: 219882 - DNA, 415 bp, Homo sapiens
aaataaaaacagccagttaaatacaaggttgccagagtcctcaacacaaatattgaaatataacttgtaagctttaagacaattttaaaaagatgttttcaagtataatgacacaaattcagcagaggaaggtaataaggtgattacaaataatggttaacaatagagatcggggcaaacccctgctgtggcccttagagctaagtgaactttggcagagaatgtcaacattctgtcttggattatatgccattaaagtgacaaaggtatgtatctcaaaaagctgccatgaggattaataatatatacagatacagtgtcataaagtttctttgtgagtgtgtgtttatacaaacatgttgatatgtttataccacatatgtgtatatagtcttaatatacaatttaacagtta

SEQ ID NO: 219883 - DNA, 367 bp, Homo sapiens
ataaaataaaataaaataaaatcccagcaggtatgacctctttgggttcctttactgataagaaagactctttgattccaaaagcctaaaaagtccaggatcatagtaaggaaggattggaagctactgatcaaatacttggtggagttccaggatcaatctatttccagtgtgttgcagaaaagttaatttatggcagaaaaccatgattaatttcagaataaacaatattcagactcaaagtgagttatgagttactggagagaggaggcacatttagtagaacatgacttattcagacatgtaattctttccttagctcagtaaagctaagtatggcaaaaatgccagaaacagctttgcaatg

SEQ ID NO: 219884 - DNA, 424 bp, Homo sapiens
gcaggaacagggaatcgggtcctctgctttaatcacccacacaaaatttaggcaaggctgtaggtttctggaaggagcagggctaggatttggagattagaggtgaaagcactaaaaaaatcacccgcgaagccccagccccatctctgcaatctttacatggggataaacgcgctgagcctgcctcctgtggtaccccaacaccccccaggccttgctaaacatggtttggtttaggtttgttttgttttgttttgttttgttcccttggactgctccctagccacctccatgttaccgcagctttccaagaagtcacttttgttgtcactaggccagaagacagttggcatccttttaggtcccacataaaataggacatttcaaaaccaggagttccactgtgtgcttttggcgcagggag

SEQ ID NO: 219885 - DNA, 435 bp, Homo sapiens
tgcttaatcatttctctatgcttgatgttccttagaaaggaaattgttagacacaaagctgattcacactgatagctatcagtttctccctgtcaaagccttgggaagcacatccctaggagagctgaaataaaacactagaagatttccccattcctaaattattccctgattttatggaaaaggttctaaagaaatgttttctctcctgacctaatactggaagctagaaatagtcaagtgggactattcctctttcaaaattaaagactgttgccagcatactgatgagatttttacctctatgaaatagccaatttcaaatagtcagtagccaatcctcagtttcctgtggttgggaagaagatagtgagatacaggacagataacgagacctaaatagtcagctgtttctggaaaagtatactcagattt

SEQ ID NO: 219886 - DNA, 541 bp, Homo sapiens
gacctctcactatcatgaccatgaatgaaaccttccagaagctggtgctgtgcactgccatgcttaggtgcatgaagtggttctgccactggacctttgctgaggacacttctttttggcatcccaagtaaaatgactcctaataaaagctctgtatattgagtgcttactatgttccatgcatcctggtaagcacttcatgtacatgatctaatttagcacttactgataatcccgtgagctgggcattaagcccagatatagaatcttaataactgatgcctcccatgattatcctagctgaaaaatgatccctcctctgtctatatccttacatagctttcacactttatattacagatcattgcatcttcttatttttcctatcagattttgtattccttatgattaaattttgttgtatgcaactttgtgcttgcagaatcttgcacttcagtaagtctgagaacatttttcttagtctctaattatattttatttcagtcactgatcacaacaaaatttgtgggcaaaagttgtg

SEQ ID NO: 219887 - DNA, 613 bp, Homo sapiens
ttcctagttatggattgatgacatctcgataccactgctgtgatgcgtaggaacctccaaacatgaaatgaaacttctaaaaggaaaggttttgtggggagattctagatgcctccatgcagcatagaaaggaatctttaggaaatatactatttcctattttataatgtctgtctctaagttgaatggtaaaattttgtcaaacctagtgtgtgttctgtgggcattttgaactcttagaaactgatgaaagtgaattctcttcctctgttcttgacccagatccttgagagcgaaagggaaaaaagattatttgatggccctattaaacacaccattgtaacttaaaatcatcctctgtggaagttcataaccgttcattatttgcatatatattagcctttaaaagttttagaagcctgtgtaaataatctgttggaaatgtattattttgctttatttcaagggctttatctagccttgttccattgaaggactctggttaagcttatgtacacaaattatgaaattaactaatactttcaatgataatattcctggaacataaaaagaaagtagacttaaataaattttagtgggattcagttgaaag

SEQ ID NO: 219888 - DNA, 109 bp, Homo sapiens
tgttagagtcaagccagcaaatacagagatggtttccaccgtgagacccaggggagcctcgcttctctggggaaggtgaaggaggcttttctgctccctgggctggtgt

SEQ ID NO: 219889 - DNA, 679 bp, Homo sapiens
acgaaaccctgtctctactaaaaatacaaaaattagctgagcatggtggtgcatgtctgtaaccccagctactcaggaggctgatgcaggagaatcacttgaacccaggaggcggaggttgcagtgagctgagatcgcaccactgcactccggcctgggtgacagagtgagactccatctcaaaaaaaaaaaaaaaaaaatacacgaaagtataaaactcactagtaaagcaatcacacaaaggaggaagagaaaagaattaaatggtattactacagaaattcaccaaaccgcaatgacaaataataaaagattcacaggttctaaagactgggaaaataaaattaattaattaaaataataagagaaaaagaaaggaacaaagagtatacaaagcaaacagaaaacaattaatatgacaggaacaaagcctcacatatcaataatatcaataataatcttgaacataaacattaaataatccacataaatgatacagaacggctaaacagattttttaaaaactatcttccaactatatactgcttacaagaaactcaacttatcaataaaacacatatagactaaaagtaaaggaaaaggaaaagacactccagacaaacagaaaccaaaagtgagcaggagtagctacaattatatcagctaaaacaggctttaa

SEQ ID NO: 219890 - DNA, 430 bp, Homo sapiens
aatgggcacaaggggttctttatagacaagtaggtcacaaagaggcagttcttgggaaactcttggaaatactgagtcctcttgagatgctcaggccagttgtattttgtttgagttgtataggttaaagtacacacaattacctaattgcagttatctaatgttaacctattttctatcatggattgatgaaaggaaatcaggttttaacagagagtagtttagagtcacctcgaactaaatcttttcacccagaatcaaagctgagcttggggcttgggcatttttcaggactttaagacatactgacttcaaatctcctgcagattttcattattctcaagagattcctacaaagagagtgcagtcttttggttgcagcttattagaagaaatgaatatgtctctctttgtgataaaataaaaagag

SEQ ID NO: 219891 - DNA, 415 bp, Homo sapiens
gcaaatgagtttttattatttttattaggaagtacctataagctgagaaaaaaaggcggcagagaaactggctctattatagccttgcaatgtagtgtcgaaggagagagaagtacaatcaggagttccacctccagagacagaagttgaattcggtagtctgggggatttccattttatcttctcagaaatgcccaaattgctaagctgaggatcacaactgaatgcttctcatgtctatctcttactcctctctgcttccgcatagtaattcctcatggaattattaaaatagagctcaaaagttattttatcaacaaagaagggtaaactggaaagactgtttcctaccccacagccaggattcgaggaaaggcaatgatatcggataaaataaatgatagctggcaatgtg

SEQ ID NO: 219892 - DNA, 197 bp, Homo sapiens
atttattttactttgagtataataactcgcttgtagttgtaacaagcaaacttaaaccaaaatattctaaattatacttgtcatattaatccaaaaagaacaatatttaacctaaatgtaaactaaaagccaacatgttgatccactaattacagaataataaaagccagactaaaatcaaagaaactgccccaggt

SEQ ID NO: 219893 - DNA, 466 bp, Homo sapiens
tgattcggattggggaactgatgctcagtgtggcacaatacctccctgcgcttacccggctagtgaggggcacagctggtttgactcccaagttcacggtgcgtaaggtttgctcactgaagaaatgtaaggaggactctggtgttgcttgggttcggggctggttcaaacacttaaacaataggtgaggtctgtatgtcctcaaaggacaggggagagactgaccccagagtgatgccgccacctaaataaggaactgaaggcaattcaagaggagggctgtctgaatggttgttgggaagtggatacctaagagaactactattttctccattcaatatatgtttaatgccatatttcatatacatatgcatttaatgcagtatgtatgctataaatatacgtgtacatatacatatgtatctctagtgcaatatttcatataaattttgtaaatacagattta

SEQ ID NO: 219894 - DNA, 465 bp, Homo sapiens
aataaagaaaacgaacggacacagactttaggaatgatgtttgattcctaattaggcttgatattaccatgtttggttactggtgtgttttcattcatgtcttttgacctgcttaaaaaaggaaagaggtcacttcaagggatccacatttcaatttcagtgtgtggcacaattactctatactaagagtctactagccgtcattcccacagtaaggcctggcttgttcgtacactgggtgcatctctgatctaattttattatggatgacagcatgacattcatttccaccacattctacaccgctccaattctgaacttggcatgtaatagccataaaataacatgagtaaagaaggggactcctgcacagaactctggaaaccaatgcccaatttacgagtccaagcatgcatgactactgtaaaccagaatggtactaaaaccaatagatatatgagaaga

SEQ ID NO: 219895 - DNA, 559 bp, Homo sapiens
ccatagccatatcttgaaggactttttatgccagccttaggagtttggactttgtcctaagaagagtgattaaaagatttttaatataaacatgataaaaaccaatttcccttatagcaccatgaaggataggtcagggagggctgtgtgtgagaacaggctgttacagtaagaaaacatggtgtctgtggagataaatatttaagtgctaaaactgataagacaaagtaactggttaggataaggttagacgaaccatgcagctgagtggatgattgtgccgtttaccaagataacatacacaagaaagaatttggaaggggtgatacttaaagtagattgtagcataagttaatggaccagtattttgtattatagttgttttgatgtccacttttttttctatcatcctccaccagtttacagaggttagaagatagatttgggggtcatttcaaatttcacatcacttattggctttctgatcttaagaggatcacttaattctataagcctcagtgttttcagtggtaaaatgataagaatacttatggtacag

SEQ ID NO: 219896 - DNA, 226 bp, Homo sapiens
tctgtcccagctctactggctgtgtggcctgggacaggtatattaacctctctgtgcctcgtcttcctaattgtaaacatgaggctggtaatggcatcctgagaggattaagtgagcctctgtattttaagtgctgagtgcagggctgggcacacctcaagtgctattgtaattgccccttctgggccatgaccaagccttgttcttagagagcattggagacttt

SEQ ID NO: 219897 - DNA, 571 bp, Homo sapiens
ttaactgaagttaatccctggctgaagttttggcttgtttttgtttttccattgctcatgagatacaaacccctgagctgattacaatttcctgctaactatccagtctggctttatcagccatttggggcatgtgtgctgatgaaagcagctcatgaaaaatacagaaaacaaaacacaccccagccataaccctggctcacctgcaggggtgtggattggcagagtggaccccagcaatccactgaagtgctctgtgcctcaattgcctcatctttaaaatgggggtgttggccgggcatggtggctcacacctataatcccagcactttgggaggctgaggcgggtggatcacctgaggtcaggagttcgagaccagcctggccaatgtggtgaaaccccatctttactaaaaatacaaaaattagccaggcgtggtggcgggcatctgtaatcccagttactcaagagactgaggcaggagaatcgcttgaactcaggaggcggaggttgcagtgagccgagattgcactgctgcactctagcctgggcgacggagtgagattctgt

SEQ ID NO: 219898 - DNA, 446 bp, Homo sapiens
caagggcagagacaagaatgggggttttaggcagaccacataggtcgttgggggaacctcagctgtgctctgaagggactgtgtgatgttggggggctcctttggactctctgagcctcaatttcctcatctgcaaatggaggcaataatctctctctctctttcagaataatgaatggaataacttgggctaagtgcctagaaatatctggcacataatatgtgctcttgtgaataccaattctcccccatttctttggataagctcagagactggcagagaggtgttttttttttttttaacttttaattgaagtgtaacatacacatagaaaagtgcatacagcttttttttttttttaatttacaatttatttcaactcttccagggctgggaatgttacaaaaccttaaaccaataaaaagtcatgtttttattctttttt

SEQ ID NO: 219899 - DNA, 445 bp, Homo sapiens
catttatatgctttcttccaatatattttcaacttgttactgaggtaaaatttaaaagtgtaccgatattaagtgtacacctcagtgggtttttatatatgcccttgaatgcaccacccaggtcaaaatatagaatatttctagcacttcagtaggtgtccttatgttccccaggcccccaccaaccccttttatcaccacggattagttttgcctgttttaaaactttatgtaagtgaaataattatatgcactcttccgtgtcttgttcaacattgtatctgtgagagtaatccatgttatatgtagtagcagttcatgttttacttctgtgtagtattccattgtgtgactacatcacaacttacccattctaccgttgatagaaatttaggttgtttccagcttgtggtcattatgaataaagttactatgaaaatgatca

SEQ ID NO: 219900 - DNA, 469 bp, Homo sapiens
ccgcccggggctcccattggctcctcgaccttttgaatcatccccggcgctgtcgattggtcgcgcgccgtggcgcgtccgccccgccccaccctgcctgggggcggggaggccggtgagcgggggaaaccgagtctggcggggcggcccggagcgcgacgtttgccaccgccttatctcagccgcccaggcgccctcgcagcacacggagcccgcgcgctcccgccctttccctcccagcgctcgcagcagtgtttggggtgccaggtggcttggcgaacgagatttttttttaagctacaaagaaaactaatacattcttgaagtgatcaccaaagatccgagctcgaaagcgtttctcggtaaaacactatgagtgccctccttagcgtgttaaaatcccacagaagcccctggaccaagcagcggcatcgaaggcgagcaggggcgcttttgtgtccgcggccgc

SEQ ID NO: 219901 - DNA, 555 bp, Homo sapiens
aagtaaacaacaaaagaagctgaagacagactggatacagacatggtgcttttatctgtcagccagcaagccatcagctttctcttttgcaaagagacatggtgtttctatagtgccatcttatacgttgggttacatgcccatcttacttgcttgtttgtcagctcttggagagcaaggaccctatcatgcatatttttattccttagtttgcagcacattctcttttatataacaggtgtttgatgtatgaagaaataaaaaagaaaggaaggaaaactctatgtcctgtatcctgaagaaatttataataaggcttattgcttttctcccagactgtataaaattcaatgatagaaaacatgcagaattatcttgtagaagaaatagagaaaatggagaacaagagaggctattaaagacaggaattaatttatggcagggtagggaggctcatgcctgtaattccaacatttcggggagccaaggttggtgaactgtttgtgctcaggagtttcagtccagcctgagcaacacggcaaaaccccatctcta

SEQ ID NO: 219902 - DNA, 533 bp, Homo sapiens
aaacgatctgccgtccccgacctcctgaagtgccgggattacaggcaggagccactgtacctggcctatttttttcctttttaaatgatttgcaattacatatatttttaacaaagcaactacaggataaccagattccaaatgaaactacgcctggatgggcgaggtacacgtggtacaactcaaagatgcacactcgtcttccagggtcgaaactactgcataatagttttgtttttttttttcctgagatagggtctcgctctgtcatgcaggctggaggacagtggagcgatctcggctcactgcagccttaaactcctgggctcatgccatcctcccccctcagcctcccaaagttttgagactataggcgtgagcgacctcacccagccctgcatgataattttaaaatagaaaaggaaaaatacaacttgggaaaactgaaattcctaatgtctagccaaaagaaaaagcaaaataaacaatacatggaggaaaattgtgtgcagctcctatccgcacacgtcttc

SEQ ID NO: 219903 - DNA, 268 bp, Homo sapiens
tgatacggggtctctcactctgtcacccaagatggagggcagtggcacagtctcggctcactgcagcctcgacctccccctcagcctcccaaagttttgagactataggcgtgagcgacctcacccagccctgcatgataattttaaaatagaaaaggaaaaatacaacttgggaaaactgaaattcctaatgtctagccaaaagaaaaagcaaaataaacaatacatggaggaaaattgtgtgcagctcctatccgcacacgtcttc

SEQ ID NO: 219904 - DNA, 804 bp, Homo sapiens
aagcacttagtttagtttatttatctatctcatttaatccttataacagcccaataagctagacatcattattcccattatgaagatgaggcagaagacctaaggaaggataaataattcgccaaatgtcacttaagcacctggttggactgcaatgattctaatctagatgctcttacccaccatgctgttaaacttgattgcactgcatcatacacttgataattcaacagttaatgataataaagtcaaatttacatctacaaatcatgcaagcttaaattgatactacaagtttatttcaacttaatagctgggaaatacttagggggtgttatgggctgagttgtagtccccccaaaattcacatgaagaaatcctaatcccagcacttcagaatgtgactgtatttggagataggttttgaaagagataattaaggaaaaatgaggtcctcagtgtgggccctaatccagtatgactggtgtcctcataagaagaagaaatttgggcacagacaagtacagagggaaggccatttaaagacacagggagaagatggccatctacaaatcaaagagaaaggcctcaaaggaaaccaaccctgctaacaccttgatcttggacttttagcctccagaactgtgggaaaacaaatttcttgttgaagccacccaagctgtagaactttgttatggcagcctaacaaactagtacagtgagggaatttgacaaaatttcattggttactggtacactgacctaacatgctgtgtggaccaacacaaatgaaaccataagaca

SEQ ID NO: 219905 - DNA, 602 bp, Homo sapiens
tctgttaacacattgaccttgaagaatttgtattccttttggatgtatgtatagctgcttaagccactttcagacttagattatcttttataaatgtgccttccatacagaattctgaaaatatttaccatggacaaagaagcagatttaaatcaggtacagacaagaattgaaagtgttgaataagtgaatatatttcccattctctctacttttttcttaattcttatagaactttgcagaaagaatgatacataccacagtaccagcaagtttaaagcgtacccttttgtgcaaaaataagaggttatctttgaactgccttaaaaatccaaaattaccctatcagtttgcaagtattaatcaactctggtacctgaccaaaggagtttaaacaatgatgtcctaattaaacagaaaaccagattaaccatcttgttgaaaagagtctctactttggttttgaaatcttacaattcaatacatacacatacacataaaaatatctatctatatgaatgtaatagtttacagtagggctgtgcttactgctttgaggtatgtgtttttaaaaccaaacttgatttatttatttcttaggc

SEQ ID NO: 219906 - DNA, 464 bp, Homo sapiens
tataattgtgagagacagacttcattagaagatgctggaaaaaaatgatttcccctctttgaccgtcagactgcctgttctctggttctaaatcttaaaacattttggctttaagagagcgaatgttaaaggcttatgttgacacataatccttataaagtattttgagcctgtcgttgatatttagatagtgtctgcgttaaatctgtgtatatattttttattttttctatatacattttgcttcccagtattgattgctgctacattccatacgacatctttaaatttaactcacattttaacgagaaaagtctagttcttaggctttcctttaaaatctctggaattttttatgagaagcctgctgaagaatatgcttgtttcataactgttatattcaaaggaatgaccagattaagttggtaggacagatttgctgtgttaataaagcttctagatta

SEQ ID NO: 219907 - DNA, 393 bp, Homo sapiens
gtccacatcaatgacctttccaaaaccttagccattcctcttaacctcattaacatttgtaccttcatttcctctgctgccatttagtcacagccctagagcttgtcgtcccctagagcttcccaatcacatctattcttcaccctcatgtggttctcctatctacttttctgttagacctttcctgccctcaattccttcccatccatcttattctcaatggccatgagctcacttattcttgggctaatctatcacttccccttaactctcattaaacgaccttctctatttcacaaagaagatgtgatcttcaggcaaagagttctctcactccctacacagtcctccaaatcttgtttgtgtccacaccaatcctcttctccattcctc

SEQ ID NO: 219908 - DNA, 424 bp, Homo sapiens
gcctggaaagagggtctcatgagtattcgtggatccatttgtttctgaggcccaattgctttcttgtagttggataactattttgagaatgaagaaaaattctttccaatccattcccattttgtcaatttagttcaagatagggttgttcctattttgagagaattgttcttcactgtgccacatgtaatcctttacctggagtgccttccctctcttgacttcttactgactccgtgatcctgtgcagggagggcgcagtgtgtattctcatgcttgcatttacatgggctctgatttttttctttttttctacatatgtggcatggataatttgatagagaatctaatatttttacaataagataatactgaatctatctttaatctgaatctttgctcaataagaacatatgagagttgc

SEQ ID NO: 219909 - DNA, 682 bp, Homo sapiens
tgctaaaataggtctatccccgtgaggagtttcatacctcatgacatctttaggataccctttctgtggtccaagcagctctctaaaggctgtttcccaggatcgaaaaaggagtggaggggatgaggaggaggcccagggattcccgtggcaccaaggaagaaggtgagcttccacaggacctctgtctaagtctgcccaggctgccataacaaagtgccgcagaggctgagtgtcttaaacagcagaaatgtatttctcacagctctggaggctggaagtctgaaatcaaggtgcggggtcttccctcgcacatggctgcatcctcctggtttcctcttctctctaggacaccagtcatattgcattagggcccaccctaatgacctcattttaccgtaattgcctctgtaaaggccttatctccaaatatagtcacatctgaggtgccagtcgtcagggattccacacaacttcagggaacacaatttggccctaacagcctgtccccacacccactgcacttagcttcatagtgcacattagcacatcactgaggtggtccccacaaaccatgattcgtaatgtctaaccctgtttctcaggtacttgataacagatcacttttctcccagaaggcagcaaacgttcccccgataaccagggaccaccctgcttagca

SEQ ID NO: 219910 - DNA, 347 bp, Homo sapiens
aaaaaaaaaaaaagaagaagaaaagagagtcctttgattttgctctattttttcaggatctttttggctattctgaactccttacaatattgtatgaatttaaggattgtcttttccatttctgcaaaaagttttgataggattgtgttgcatctgtagattgctttgagtagtattaacattttaaccttaataacaataagtcttcctatgattacaggatatatttccatttattcaagtcttttaaaaaatttcttaaagcaatacttttatctccttggttaaatttattcctaggtattttattcttttggatgctattataaatataattgtttccttga

SEQ ID NO: 219911 - DNA, 338 bp, Homo sapiens
aatctttctcattgctttctgagagttagaattgattgaaaaccaatatgcgagcatatagaagctaattcagtgtgcacgtgtgtgcctgcatgtgtgcacatgcgcgtgtgtgtgcatgtgtgcacacatgtagagcctgtcctagtgccttaccacagcagactacttggtgagcaggaaagagagctggccagcacacacttggcctggtgctgcctccactgtttctcttggcatctcaggctgtcaactggctgccacattgattcaaggctgtcatttttttttgtttttagatgatttcttccatttttgattttttattttcgaaggag

SEQ ID NO: 219912 - DNA, 359 bp, Homo sapiens
gtacaaatgaaagaaaaatacaaaaacatttaaactttactaaaaactgatcaaatctcaaaataaatcttaatcagttcatcaatcattaaaaatatatttagggtctgctgtgttttcagctctctgtgagcagttagatttgattttgaactattttcatttgtgtatggttctgtatgggcctttatttcttcatcttcataaacaccaagataaattattggtctttacattcatctttgaatcaattacattactgtaatatttaatgtttttccaagagttacctttatggagttctttctctaaaatccacactctgagttgctaattagacatttctggtctctcatatg

SEQ ID NO: 219913 - DNA, 283 bp, Homo sapiens
gaccatggagggggagaggagggaggaccatggaaggggagtggaaggaggactccatggtgtggtgagctctgccagtgctgtccctgactgatgtctttcctggcacaacctgccacctggtgtccctaaacttgagattcctcagtgagtataggagcctctgcctccgtcttcagcagggacagcaagggcgaaatgggtttagcttcgtggagtgcaggtggggcatgggagagggcaccctggttctgtccccgtcccctccctgtccctgtccctg

SEQ ID NO: 219914 - DNA, 829 bp, Homo sapiens
tattcctgacttgatacttcaaggtgctgccagatagaggttgagacaggcttggcatttaacacactcctagcagaggggaggcccagggggaagcggccaggctgggaatcaagaatatggaagacagaggtgaagaggaatggtgggtttctcatggatgttctcataagttatatatctctcaaattcatcaaagaaccaatttcagctcagagaaagtagaagcctccaggggatgcctgcatgctccacaggaccgcaaagtatctgagttacgcaatttattcagatgtgtgaggcctgaaatattacaacactctcttatctgctcccttgcgaattcaagctctcttcactctcatccactctacacaccagaatctgaccctcgcacctccaccgaagtcagcatggtcaacagctcctactgccttcagaataaagccccatggctgtctgggacttccaggataactcccaaacacattggcctccctgtccaagccttatcttccgttccacccccaactctgattgccttttgccactcttggttccacccaaaatgagtcactcaaaccacacctctccatctctctgctgttatttatactcttctttgactacagccaccatctcaagttcccacagtgtatcctgtctatcctttcagagctttgccaaatgccgtctcctccaggaagcattcccagagtccatagccagaaggaatctctgccctgcaatctcatagcacttcgtgcctcttttatggcacattatttacctttaagtaacttagagttaaataaatatcttacagttc

SEQ ID NO: 219915 - DNA, 228 bp, Homo sapiens
tcatctccagcctggcctcctgcaacagccacatacctcactgccctgcctccagtctcacgtaccttaaactgaactgcaaaccactgccagagagacctttctaaacccttcgacgctccactgctgcctaagggagaaatgtcatacccagtactttttttttttttttttttgagaccgagtttcgctcttgttgcccaggctggagtgcaatggtgctatctc

SEQ ID NO: 219916 - DNA, 536 bp, Homo sapiens
taaagaaaaacacccacacccctggagctaacctgacaactatcttcattcacagaggacacttatttctaagcacattcttttggccaaagcaggtaacatggccaaacctaacacctttgagactgggaagtgtactcttcataatgaaggctctgcacatgatagaggacattgcatgtataattctgtaaggagagaatgaaaagttgaggacaatatccaccactgtctcacagagacagagaatgttacacctttttgtggttctgctgtcgcttagtatgctctggcaaacagctgagttctagtgctgaaaaagaaaaaaatcacaggcaacactgaggaagaacaaggaaaatgacagaaccctgaggattagagtagtcaaaggagataatcacttagattgaattgcagcacaattctttctggagttaaaagacaagacttcccaacagaacagtttattcagtaaatgacagaaagcatcactgctattgaatctgaattagtgacttgaaagatcaagtaga

SEQ ID NO: 219917 - DNA, 426 bp, Homo sapiens
aaaatgggaagtattaacatacatataaagcagttctgcataccaaagtgcagtgattgtctcaaggaatggtgccttctggattgaaccagagactgcagaatcatgcatgggtaaaagatccattcaaagtgcaaagtaggctgggcatggtggctcacacctgtaatcccagcactttgggagcccaatgcaggtggatcacatgaggtcaggagttcgagaccagcctggccaacatggcaaaactccgtctctactaagaatacaaaaattagccaggtgtggaggcgcatgcctgtggtcccagctactcaggaggctgaggcaggaaaatcgcttgaacctaggaggtggaggttgcagtgagccaagatcatgccactgcactccagcctgggcgacagaacaagactccatctcaaa

SEQ ID NO: 219918 - DNA, 579 bp, Homo sapiens
cgagggtctgaggtgggaggatcacctgagcccaggaggtcaaggctgcagtgagtcgtaattctgccattgcactccagcctgggcaacagagcgagaccctgtctcaaaaaaaagaaaggagcaacagtctctactcagatctgtatacccaaatctatacccaaaagaactgcttttatataatttttaaataaaacttttcaaacacaaaggagcgtaacataatgaaaggcatgtatccatcaaccagcatcaataattataaaatcgctcttttaatgagtataaaataagaactgaacttaacgtttaattggcagcgtttctccatttctgataataacagtgcaccctaaaatcagcagcgtcttagatttagggcctcagaaacaaggccacccacactggatccgaggggcaactgggcacctccatggacacccatgcttcataaagacagctgcaccctacactgggttggactgggacgttttcagctatccaaaataaaacgttggttttctaatttaaagctttgtttcatgtctacattctgctcttgtagtctgcatcttc

SEQ ID NO: 219919 - DNA, 621 bp, Homo sapiens
tgcggtggctcacgcctgtaatcccagcagtttgggaggctaggcgggcagatcccttgagcccaggagttcaaggctgcagttagctatgatcatgccactgcactgcagcctgggcaacagagcaagaccttgttttttaaaaaaagacctagagagagaaagctatgatataaactagaaaagacagtagactagtcatagagagggtgccatagaagttgcaggagcaaggttgctttcagttggggaaaactaggagcagcttcatttgacaagcacatagtatgtgccaggcctgagctactgccaagactacaaagatgaataagacagagtcctggctgggcacggtggctcatgcctgtaatcccagcactttgggaggccgaggtaggcggatcgcttgagctcaggagttcgagaccagcctggccaacatggtgaaaccccatctctgctaaaaatagaaaaattagccaggcgtcgtggtgtgcacctgtaatcccagctacttgggaggctgaggcaggagaatcgcttgaacccaggaggtggaaggttgcagtgagccgagattgcaccactgcactccagcctgggcaacagagactccgtctc

SEQ ID NO: 219920 - DNA, 239 bp, Homo sapiens
tagcacctcaaaaatgttcaggagtgccctgtaacttttacggctttctcccacattaatgctgttatttataactcttcagtgtgatgagtaaggttttgctggtgatttagacatttaattagaaagttgcatatttagtcttaaagctgtttatgaagaactacattaaaatttggatgaattttttctaataggttatatttgctacagtgaagaaaaactttgtaaatttagtt

SEQ ID NO: 219921 - DNA, 756 bp, Homo sapiens
actggggacacctcacctcttttcccctgtgtcatctccaatcttgcctcacccagttcattctgagaaaataactagttctgaggaagtgctgatcctatcatcttcagagaacttgactaatatcacgccatttcagacctgctcaggcttttgccctagagccctccttgtcaatattggaaagaaaagtagtgttggtcactttctcctggaaatgaggtgttagcgatggcttattccccatggaaaaggcccctaaggtctaaatataaagattcagagagtaaaaggaattacattcaaggaactgcagccagtttggttggatacgacagatcaaagagcagcttgcaggacagaaggaagtcagaagacacagcccttggtgcaggccctgcctgctccgtttctgtggaatgagtaggagtttgcgctggttcatctctgctttgaggctgctctgtaaccactcaccacagacaggcccttgggagaaactgagcgagtccttccaagcagccggggctgatgagacacttgcagatttcttgggaatttggattacagcccccaacagaaggccccagctgttcttcaactgagcaatctccttcaagggcttttccaagctgaggaatgcgtaatgctgtctttgtgtgagctaatggaacttcctcttagtacagagagggggtaaatgggccaccattgagtgaagaggaaattcaataaactgtgttttcccaactttgt

SEQ ID NO: 219922 - DNA, 179 bp, Homo sapiens
tgtatctgtgctgtgtcatttcattttactaattttggaaatgctcgttttcatccttgattaatgtcactgagcctagtcactggtgataggttatgaacagattttgagacttgatattcaaattttatatttctggtcactgaaaacttggaagtaaatgtccttttattctttga

SEQ ID NO: 219923 - DNA, 259 bp, Homo sapiens
agtatagaaaaaaaatgtggtatgttactttcaaataatagcttaatcaaaatgtgagtaaatagatgaagttttatagagtaaatatttcaaccttttaaatttttttgtgatacttcataaaattcataaaacatttggagctggaaataatttttaaaatcccattttctagataaagaagtaaacccagagaggctaagtggcttgtctgtagttaaagagcaggtttgatgtattcgaaactcttctggtcatt

SEQ ID NO: 219924 - DNA, 540 bp, Homo sapiens
tcttgggactttgaagagtaaggcagggcccagtgacctttagcagtggcagcctctcttggccacacgttcttctgcacggtgtgttgtggggggcaagagtgaacttgccagatttagtgaacaggaggctgcttgcttttcctctccaccctcgaattcttttggattcaactcagaacccaaagggtgtgaaagactctctcccactcgatttctaaatcacataattacaccctttatcccaggctcccaacccccaggaggccctaaagagaaggagagggtgagagaagacagagggaaacatcatcttccccaaaacccagctccccacatcctgctttactgcccactgaatgcaagatggcccaacccccaggtgtccccaacctgaacacccaggtcaacagcaaagtcacctgccacctgcacagggagcaggtagcatgctctgtgtccagccaggtgggcatacttgtcctgtggctcaggggctcttccactgttaggccaggtgctgtgaggcttgttgtgttc

SEQ ID NO: 219925 - DNA, 461 bp, Homo sapiens
ctgaataatattccatgtgtgtatatacattacatatacaccttttggttgttgtgaataatgctggtgaacatgtgtctaccgatatctgtcaagtccctgctttctgctctcttgcgtatatacccagaagtgttgtatcacatggtaggtagttcttgtgtttaattttgttgccagcctgccatattttacatagcagctgcaccattttatattcccaccagcagtgtacaagggttcccttttctccacatcctcacaacacttattattttctggggttgcttgtctttgggatttttagtaatagccatcctaatgggtgtgaagtcagagcttattttaacttctactatattctgtttcaaagccaatcaaagagagaaataagtttgcccttcagatagcttccctgttctcagagcatctattatttttctttgatataaccaaaacag

SEQ ID NO: 219926 - DNA, 196 bp, Homo sapiens
cctgtcatcagagtattgctacttgagaggtgaggtgagaggatctcttgagcccaggagtttgagactgcagtgagctatgtttgtattactacactccagcctgagggacagagtgagaccctgtctcttaaaaacaaaaacccgactgtatcaaaaggtaacatttgagtgggacttgaaagagtgtgcatgt

SEQ ID NO: 219927 - DNA, 576 bp, Homo sapiens
agtcaggatgtcgtgttataactgaactgaacccaggtctccagattcccagatcagtattctttaccaggaaccaaaagagaaacatctctactgtcattatcaacatttttttttttttgaggcagagtctcgctctatcacccaggatggagaacagtggcacaaacttggttcactgcaacgtctgcctcacaggttcaagcgactctcgtgcctcagcctcccaagtagctgggactacagatgcaggtcaccgggtctggataatttgtttttttttggtagagacggagttttgccatgatggtctggctggtctcaacctcctggcctcttaagtgatctgcccatctcagtcttccaaaatgctgcgattataggtgagccaccgtgtctggccaaagtgtcattatcaacactttaattttcaaccagactcagaaagtttatttgtggggttactatcctaggcaggttttataaggtatgactccaaagcatataaaaatggcaattgctgacaagtaaccataaaagagaaagacacagaaacctttgatttcttcttccatt

SEQ ID NO: 219928 - DNA, 290 bp, Homo sapiens
attcatggccctaattcaccctgatgtgagcggaaggcctggctgatccggagccccaaaaggaattctgacaacatgccttttgctttgtactgttcatgctgcaattcctaggtgcatctgggctatcactgaagcaatactttctatttccaaagcactttataatcattaatgatttatgccttacaacatccctccaagggaggtcagtagcaaaacacaaggaacacaaatgaagaaacaactggaagatattaagtgatacggtggaaatcgcacagcaaaaa

SEQ ID NO: 219929 - DNA, 796 bp, Homo sapiens
cttcacttgtctcagacttaactctagaattaaagagagttaagagttatagttaaagagagttagggctttgctctggattaggctttggcttaggggaatgttgtggctagtttgatcttctttacggaccactaaaactttctgcatatcagcaataaggctattctgctttcttcttattcctgtgttcactggagtagcacttctaattaccttcaagaaacgttgctttgcattggcaactaagcctaagtggtgcaagaggcctagcttttggctgatctcagcttttgacatgccttcctcactaagcttaatcatttctagtttttgatttccagtgagagacgtgtggatctttgctctacttgaacactgcagaagtcactggaaggttattcattggcctaatttcaatactgttttgtctcagggaatagagagacccaaggaaagggagagagatgggggaacagcccgttggttgagccgtcagaatacatgcatttattggttaagtttgccatcctatgtgggcgtggttcatggtgccccaaaataattacagtagtaacaacaaagattaatgatcacaggttaccataagagatacaataatgaaaaggtttgaaatattgtgaaaattaccaaaatatggcacagagacatgaagtaagcacatactgttggaaaaatggtgccaatagacttgcttgatgcagggttaccattaatttgtaaaaatgtagtatctgtgaagtacaataaagggaagcacgacaaaatgaggtat

SEQ ID NO: 219930 - DNA, 371 bp, Homo sapiens
ataatatgtctgaagttgaaagattaaggggcatgtgcatggtcagcaacacattgagagaaaaacaggcaacataagagtaaagggacggctgggtcagtggttcacccctataatacaagcattttgggaggccctggtgcatggatcacgaggtcaggtgttcaagatgagcctggccatgacggtgaaaccccatctctactaaaagtacaaaaactagctgggtgtggtggcgggcagccgtaatcccagctacttgggaggctgaggcggagaattacctgagcctgggaggtggcggaggttgcagtgagctgagatcacgccactgcactccagcctgggtgacagagcaagactccgtctca

SEQ ID NO: 219931 - DNA, 548 bp, Homo sapiens
gtagaatcaacttataataatgacttgcctttctttggcaaccagtaaactttgcctaaagttgtatttgtttttattgaaggcatagtccaaattctgcttttgaggtttgctctatatttattttttaaatgaaatggaattgtaaggacatttttggtgagaaaatgtagtattactttttcttcagagaaagtcataaatagtgatatataaaatggggaccttttaagagaagttaatgagttgtatcactgatttccctctcattattgctagttgagtagtagataattcagtatggtaatgttttgttttaaataagaggtgaggttgaagaagccataatatagtgaaggcagtcacattgctcttaaaagataggaaacctgagtaggttgagcctcatttgatagtaagcagtagtttgctcacagcagtaacataaataaggaaggtgttgtgtaaagctgtcctggtgggtcaggggagtagacacagcagacttggcagtaggcctggcttctaaaacaatatccaagtcatca

SEQ ID NO: 219932 - DNA, 419 bp, Homo sapiens
caagggcagaggagcctgtgggaggggtaagcacgagggaggccgaggccctgagatgtgaggcccgcatcctgctgcaggcgctctgcctccagcaagaggtggctctgggggacagctctccatgggggacagctctccatgggcttggacacccgtgctcccagacaacagcttctgccgtgctcccagatgagagccagagccctgcctatcgggaggccacactcatgcccaagacttctaggcctcagcagtgctcccaagggtgtggcaccaggtgaagcagggcaggtgtgtggaccaggtgtgctgggggggcagagggagggcagcaccccgtgggccagctacctcttgtgtgggcacacagcacctgtgcactcaaggtcacccatgtgcacgccgcctctccactc

SEQ ID NO: 219933 - DNA, 451 bp, Homo sapiens
caagggcagaggagcctgtgggaggggtaagcacgagggaggccgaggccctgagatgtgaggcccgcatcctgctgcaggcgctctgcctccagcaagaggtggctctgggggacagctctccatgggggacagctctccatgggcttggacacccgtgctcccagacaacagcttctgccgtgctcccagatgagagccagagccctgcctatcgggaggccacactcatgcccaagacttctaggcctcagcagtgctcccaagggtgtggcaccaggtgaagcagggcaggtggaatgcaggagcaggcaggaaaacccagctcttccaagtcagacactggagagctctgcagacacgaagacaatgccatgcctccccctaaatgctttttgttttggaaaatatagctgttcgtcataaggtatttacgttgacgtatgacagg

SEQ ID NO: 219934 - DNA, 361 bp, Homo sapiens
gccggctcactcatggttattgcatggtatattattttccatcctttcaacctatttgtagtatatattgaatctgaagtttctgctctagacagcatatagttagatcctgtttttaaattcagtctgataatcctttactttttttttgagacaggatctcactttgtcgcccaggctggagtgcagtggcgtgaacatggctcactgcagcctcgacctccctggctcaagcgatcctcctgcctcagccacagaagtagctggaactaaaggcatgcgccaccacgcatggttaatttttttgtatttttttttttgtagagacagcgttttgctatgttgcccagcctggtctcaa

SEQ ID NO: 219935 - DNA, 555 bp, Homo sapiens
aatgctcaatttatcagaagttagtaacctccaatccaagtttatggatcctctgaattctatccataaggtcccaggttaagaacatctcaaactgagggaatctaacaaaataattttaaaatttacatgcaaaattagctttctagattcacaaaagttgtatgagatttaatattaataaatgtttcaaaaagaagaaaaagtaagataagtcaataattataaactgcttgtagagaagaacaccggaaagatgatgtgggttcaagccttgtcttcaccatgtatttactgtgtcaacttgacaagtttaatttctttaagcctcaatttctcaatctgttaactgggaatagtaatagtgtctatctacttcctttagttgttgtgaggatcgaaggacatactgtatatgcaaaatctcagcaaagtgcttaccactgactaagagctccttagatattaagaaaattgtatttttcaacaatacaactgaattccttaaaagcatgatggcattcattgcagttccagttaatcacaaacagcaaa

SEQ ID NO: 219936 - DNA, 553 bp, Homo sapiens
gcactcttactaatagtatatttactattggtattagaagcaatgctgggactatctagtcaagccaggacagttgataaccctgtgtggaccactcgtgttaaaattgtctgggtgcttatttggaaatgtgaatttggggctccaaactagtctcactgaatcagaatctctaaaattggactgggactttgcatttgaacaagcacctcaggtggtactaatgtacattgatattggggaagctggagttaaaacaacagaccaaaaaagagtatgcacaggcctgacatggtagctcgtgcttataatttccagttctttgcgaggccaaggcaagaggattgcttgaggtcaggtgttcaagaccactgggcaacatagtgagaccctgtctcaaaaagagaaaattagccaggcataatagcgtgcacatgtagtcctaactatgcgggaggatcccttgagcctggaagtttgaagttacagtgagctatgatcacactactgcactccagcctgagtgaaagagtaagaccctttctctcaacat

SEQ ID NO: 219937 - DNA, 1264 bp, Homo sapiens
ccccgtctgtactaaaaatacaaaaattagccaggcatggtggcgggcacctgtaatcccagctactcgggagactgaggcaagagaatcacttcaacccaggagatggaggttgcagtgagccgagattgtgccattgcactccagcctgggcaacaagagcgaaactctgaaaaaaaaaaaaaaaaaaggaaggaagggagggagagagaggaaaaggaaggagggaaggaaggaaggagagaaagaaaagaaaggaaggaagaaagaaagaaagaaaagaaagaaagagaattttcacagatttagttccaagcaacagatgctacctcaggggcagaaagggaatttattgagaggatttggggtcactcacagaatcccaggagtgaactggggaatcaggattggaaagtgagcaggaagaatcctggcaactggccagcaatggtaacccagccacagtgacaccacggaaccggtctgatgaggccatgctggcgatggccactagacactgtagttgtctcgctgcctctgctgccccagaaataggatatggctgctcttctcattagctgttgctggtaataaatcacttcacaacttagccgcaaatgacagcaatcattgcattaagtctcatggttgctgtgggctgggatttgaagaaaggcgtggctggtttgttttggctcaggatgcaaacaaacagtgcaatcagtgatgcttgccacagggcggctgggggtgctggacaagtgggcatctctctgtggtctcagggcctcccccaccatatagtctctgcactggccagcttgggcttccccacagcatggctgcctcaaggtagtcaaactttatatggccgctgaagacccaggcagaagctgcatggccttttctagctcattttgggagttccgcaacttcacttcagctgaattctgttggttgtatgcaagtcaccaaactgcacagatttgagaggagggtgccatagaccccagctcttgatggaaagagtatcaagctctcattgtggaaacacacatgggatgaaagacactgtcacaacatggcaaaaccccattcctacaaaaaaaaaaaaattaactaggagtggtggtgcacacctgtactcacagctacccaggaggctgaggtgagaggatcacttgagccctggaggacgaggctgcagtgagccatgatcatgccattgcactccaacctgggtgacagagcaagaccctgtctc

SEQ ID NO: 219938 - DNA, 365 bp, Homo sapiens
catcatgacctggccttttgccatcatgacagcatctgacatgtactgacatgtactgaatacttagaatgtaccaagatcgcttccttagtcatcttatttaatccttccaacactctcattgggtagatgattttaccctaattttcaaaaggttaagcagtttacccacgataggtagtgagagtcaggatctgtgtgtgactggccctaatgcctatgcttcctaagtaatttcctaagtaatcaaagctgcttttaagattaactttctccaaagatgcaggtattgctcattccttttttatagctgagtcacagacataatgaatactgccagtgagctgcagtgaaactgtatcttt

SEQ ID NO: 219939 - DNA, 300 bp, Homo sapiens
tagatttgtgatgggtggtctttgggatagtgatgaggtccatggaatcaatgattgtgggtatgtagggtcagtgatgagggaatctggtgtcagtgatgggatgtgtgtggaatcaatatgtgaaagccagatttgtggtgtcatctctcaggctgacacatcctgatctgtgtgtcagtggtggaaattctatggggtcagagtgtgactgtcaggtccctgacactgtgtgttctgggtctggccaggtgcacagattcccttgccttgtcctggccggggaggcccttctcaagg

SEQ ID NO: 219940 - DNA, 365 bp, Homo sapiens
tccaaatggcatccaaatacccatgttagcaatgggtaaaagatttaagagcaacttctaaacattgatttttttcatcaagtatgattctctttttgtgtagtttgtctctttgtgtttcagcaaggaacaaatattaagcacaataaaagtgaagccctgtgaagtccaaaatctgttaatgcaccaaatatttttctagaatgtgggatggggcaggcaaaggagacatctgaaacagaaattgcattcatgtttttattcgagatctgtccttgtcaaatgtttcctacattacctggacaatccctgtctgtccctagactcctctttgcttcctataagtctgctcaactcactggcat

SEQ ID NO: 219941 - DNA, 398 bp, Homo sapiens
aaaaacataacttaggtagctatttccttgggaaccaatatctttacattggctagaactgtgaatcgccctttaaagataaagccccaaaatacattttttttccctacaggtaaccagcagggtgaagtaacagccgaagaggaaaccagaagtgaagtgatttgtacaaaatgtcgtagtgtaatttattgagtgtcatgtggtattaatcgcaacatcctgaaaatgcaaatgaataaaagtttggtcaatgtaccatgacattccttcatgtgagcctcctaagaaaaggtcactgagcattctctgtttacattttaattttagactccagaatttcacactaagtttttcttctcatttcttatgcagtaaaagaagagtttgtatttcca

SEQ ID NO: 219942 - DNA, 257 bp, Homo sapiens
aaaaacataacttaggtagctatttccttgggaaccaatatctttacattggctagaactgtgaatcgccctttaaagataaagccccaaaatacattttttttccctacaggtaaccagcagggtgaagtaacagccgaagaggaaaccagaagtgaagtgatttgtacaaaatgtcgtagtgtaatttattgagtgtcatgtggtattaatcgcaacatcctgaaaatgcaaatgaataaaagtttggtcaatgt

SEQ ID NO: 219943 - DNA, 325 bp, Homo sapiens
tgtcacaaaagaaaaaaaagtgagtctataaaaggacagtagcactctctccttgaaagtctagctgctgagcacaaagtctctgggtgtaagacatagcattacctgggacgaccctgatcaccaggattccaagcccagaaacacaggagctaaagtagagcatatgtgtcctgggatccattgcttttccaatacgaattagttttaccctacctcagaggtgggattatataaaacactatttgataactttggaaaacctgtcagaaagtgtcccatatattcacatgtatttgtttatattttgttctaaaatctatat

SEQ ID NO: 219944 - DNA, 355 bp, Homo sapiens
gctatcctcccatctcagcctctgaagaccaaggcatgtgctaccaggcccagctaattttttaaaaattacttttatagagatgggggtctcactatatttccccggcttgtcttgaattcctgggcccaagtgattctcctacctcagctcccaaagtgttgggattaaaggtgtgagccaccacacccaaccaagttttgaggtattccgttacgcagcaataagtaactaatacagtcaccttctcaatgaaatctaccttttttctaaaacctagtctttctctttctttttctttctttctctttcttttctctctcttccttttgatagcatttattatctcctaacc

SEQ ID NO: 219945 - DNA, 222 bp, Homo sapiens
tgggtaaatgtagagacaggttttgctgtgttgcccaggctggtctcaaaatcctggcctctagaagtcctcctgccttggcctcccaaagcatctggccttgtattcattttaaaaatccattctgagagttagtcttttaattggtgtgtttacatgactcactttaatataattatggatatgtttggatttaggtcttcccttctgtcattaattttc

SEQ ID NO: 219946 - DNA, 285 bp, Homo sapiens
cttgatgtcctgccctctctcaccgctcctattcaacatagtgtggaagttctggccagggcaatcaggcagcagaaggaagtaaagggtattcaattaggaaaagaggaagtcaaaataattacgctgaaagccagccataaaatagtacatactataacattccatttatataaaactctagaaaatgaaaaccaagtgtggtgatagaaagcagatcagtggttgctgagagaatggaaggctagacacagagactactaacgagaacaagggaatttgggg

SEQ ID NO: 219947 - DNA, 552 bp, Homo sapiens
gtatattcctattagccaaatggctttattagtaaatagtaatacattgtaatattgtaatagtaattacaaaagtaatattgaaatagtaattacaaacctgggaaattaaggactaacagatctttaaactcatgtcaacgacttctccaagaaactattcaagacacagcagcccaaaagataaagacacctgttttctcaccctcttctttgcttttgttttctttacgagacagttcctccacccatatgtcatcagtatgagcatttatgagaaacatgctatcaatatttgatgtctaattctctttcatatccaactaaaatgaatcaattaatctggcattcttccccaccaaggaaatacaaggtgtttcctaatcctagattttctcatctaccagcagaatgtgatcaacactactctgacaatttacacaaacaagaagtgaccactttaaagatggaatgccaagaacaatacaataaatgctaaagagaaagagtgacaaaagtgagcaactacagataatgcagtcatggaaccag

SEQ ID NO: 219948 - DNA, 385 bp, Homo sapiens
agtttttatatttttaagacagtttattattatgtggccaatgaaccagcaggtggcactacacaacaattttacacaggcaaaaataagttcccttagggcgaaaaagatgatgttttctcaaatgggacctttggaaggatatggacctgtacaacatgcacgcctaccggggaaaaaggactgaaaatagttgttcgaataggatgcccttcaccccggtgactctccatacgaaaacggaatgtgatcaacactactctgacaatttacacaaacaagaagtgaccactttaaagatggaatgccaagaacaatacaataaatgctaaagagaaagagtgacaaaagtgagcaactacagataatgcagtcatggaaccag

SEQ ID NO: 219949 - DNA, 370 bp, Homo sapiens
gtggttcttgagtatcaaaggatccagagcagtcctgatgagatctaatcataacttaatggtttttgctgctgataaaaaaataaaagcaaaagtaatgtctttgttcatacgactgtgatgaaattcagccttattaatgagagcactatggttgcatttcactaattagcattttgattcctagggtaatacttgatatcactaatattatgatatcttttaatatttaagagtccctcttgagctcgtgtacttgagggaaagttcactttggttctgatcattagaacgtggaaatccaaagatgtgaaaggttgagttctgggttcccaaacatggcttaccttcagaatcatctagggaattt

SEQ ID NO: 219950 - DNA, 304 bp, Homo sapiens
actctggacgccaaaatttggtggagcttcctggttggtgaacacatccatgtgccaggagggtgacacaacctgattcacagagagaagacacagaagctctgcatggaagacccgcccagaccccgccctacgtgtgtcttcattagtctggtcctcctgatttgtatcctttgtaacaagcctgtaatcaactttctcagttgtgtgtgtgagtacgcctggcttttcatcaaagagctttgccgtcttgatgcttccttttctgtgaacacagcaataaatagattctgcagaacaaaaa

SEQ ID NO: 219951 - DNA, 551 bp, Homo sapiens
atctgtcactggacacttgggttactcccaccttttggctgttgtgaataatgctgctgcaaacatgggtatacggatatctgtcctgctttctatccgtttgtctgtatacccagaagtagaattgctggatcatgtggtaattgtgtacttcattttttgaggacctattatactgttactttgataagaaccatccttatgggtatggcatggcactgctgtttctggtgcctgctgtctccccctcatctgcaactgccagttgaagctcatgccagcagccaaacttctcttccctcccttctctccttacctacccccagcttctaacactctcagctgggggaataatgtatcttcctcctgctgatccatgtttcaaatgtaataactgcctctggtgtgtttaatcacctgccaagccctgttaaatcttgacagaaaccattcgcatctcttccctcctgtgtgcagactgtcatttctcctcagtggccgtgccgttttacattcccaccagcggtgcctctgttcttttacctgggata

SEQ ID NO: 219952 - DNA, 306 bp, Homo sapiens
aggaatcgagggtgagggtgggcaagccctgaggaaagaagggagagggggaagacccttggggagctaggaggagctgaggttggagagggcagggagggattccaggagatccgagcccgtagctcgcttgcaggaagcttagaacagcagcagcagcagcgagggtcccgacagcacggcaggtcactatgtagcgctcatccgagagatagggtgggtgttggcctcacggacttgctccgtgcacgctgtggctgtttaaaagcacatacggctccgcgtgctgcacgacgacctcagtca

SEQ ID NO: 219953 - DNA, 562 bp, Homo sapiens
taaagacactcaaagaaaaagaaacaggttcctacactggaagcagcttagataaccagacagcacaatagctaatcagttaagtaaaaaatatcaaacaaaaacaaagacaaaagaacaaattcagcattttgttttgttttgaggagaaaggttttcaaatttcctttcagtcctccgcaagaactgcagcccccttccccttcctgctttagctatttcaacagccccctttacgaagatttcctgcaagaaaaggcaggttgataaatctgtgaataggaagctctcatccctcctttcttctcctcctcctccattcctccccccacctcgcatggcgactgcactgatcgacaataatggaatctgtaactgactgccaacagcaacattaaggatattacaagtccacttcataagaattcgagctggtggtcggaacttgggggcaattctgggcttctagtcaatagctgtctttctttgcgaggaaagaaaggaagtgtgtgtgtgtgtgtgtgtgtgtgtgtgtgtgtatgtgtgtgtgtgtgtgtgtaga

SEQ ID NO: 219954 - DNA, 325 bp, Homo sapiens
gagaggtaaggtcactcaatcattatacccactcctttgccaccattagactctctttcctaagagttgaacagaaactagcacttttgaaagacttgctccactgctgatttcaaccaaccacctcattctgcagcagagctcccttccccttttatggtctcaacgcaactgaccagcatttcttcctggaaagaaaccatggactgtggactgcttctagctggtccatggagactgtgcatagggtgcctctgcatttaaacgttgtgtctccacctcaaagtgcacatgggatgtatgtaacatgcatgtttgcttacta

SEQ ID NO: 219955 - DNA, 480 bp, Homo sapiens
cagtagtgctgagattgtgccactgcactccagcctaagcaatagagcaagactccatcacaaaacaaaacaaaacaaaacaaaacaaaacaaaaacaatgttttggccaggcacagtggcgcatgcctgtaatcccagctactcgggaggctgaggcaggagaatcgcttgaacccgggaggcggaggttgcagtgagccaagatcaagccattgcactccagcctgggcaacagagcaagactccatttcaaaaacaaaacaaaacaaaagaatcaagttcaggggtcaagggcaacaacagcttttaggtgtttgttctgtgcccttagcagtagtcatctattctaactataacattgatgatataacatttcatggaatataattttgattctttcctttatcatgcaagggctgaacaccaggctccgtgctgtgtctgcccatagccctccttcactgactcaatgagtgttc

SEQ ID NO: 219956 - DNA, 532 bp, Homo sapiens
tgagtgatgctagaaagcgtgttgtatcatggtgaggggctgagtagataaatgcagatggcctgattgtggactgaagggagacgtggaacttgaaacattggtaagttccaaagtaaagatgcatgggggagtagagggaagagagaagcaaagttgacatgggaaagaagaatttacccccctagaatggggcatggagatgtgaaagcagaggtggtttctgggaatggggaatagtttcacttaaatgtgggacacatgaaaggtaataatggtagatgacaggttgggaaggcagattggtgcaaggctgtggaacaccttgaatttcaagcttaggcattgggattttactctttgagaatttactaaagttctctgaaagaagttgatacttgtcatttggaagaagagagaagtgctttcagttttttagctaggaaactcatgtcttaagaggctaaataagtttctgaatgaatgacaacctctggcatcctgtagctgttctggggcttgtctgatgctc

SEQ ID NO: 219957 - DNA, 366 bp, Homo sapiens
cacattcatgcaacaaatatttattgagcatctgctatattccaggtgccattcaggaagctaaagacttcttacctcacaagctgcatgttctcattctgctttcctagatccaccacttccccctgagtttttaacactggattctcaaaagctccaaccttagattctttgtatatctacactcattccactggtgatcttaaccagtttatatgcaatctacatgtttgtaactcccagagtttcagctataccctggattcgccccataaattcagattcatctggccaactgcctgctgtatctctccagttgaatatttaagaggctttcaaattaacaagtccaaaaaccatgtccct

SEQ ID NO: 219958 - DNA, 501 bp, Homo sapiens
tactgctggtaatgaaataagacatgaaacacttgagagtctgttcataaaattgtatttatcagtagaagggaaaattgccttatttgtgttttagggaaagatgctaccgtacctgttaaaaacaacagattctgttatattattctaataatttaaagcatacattaagcataggctgtttgttttaaatggctaaatatcatgaaagggtactttacagctcaaaattaagttctatagttttataacgaacaaaatggtgtagatccataaatacataatttggtattatgcgtctatttaactgttaatcgagagagagagagagaagagagaatggctttgaaatattctgagtacctctatttgactcgttgtagaaaaattggaaaaattgataaataataaaaaggaaatttaagtcacccataatcccacttcagagttcacagctgtgaaaggcatacctagttgttgattcagaaagtacttacctaa

SEQ ID NO: 219959 - DNA, 377 bp, Homo sapiens
gtttcatgttgccctttttggtttttttcctataaattttaagaatttcaaaatgaaaaattaaaattataaaaatacactaaccctctgtatgggcaagggtggttacttgtgatatgtttattattgagtgaaaaatgcaattgcagaaccatatgcaaatatgattccatttgtttaaaagatgcatgcacatcatatacgtgcacgtgtatatgattgtatatttgcaaaggccagaagaggatatggaagtttgaaagaaaaagactatattgacaatagttacccctttagagtgaaatttgaaggcaagagttttaactttgtattctatacacatgcatatagtttgaattttcaacatttttttcatt

SEQ ID NO: 219960 - DNA, 200 bp, Homo sapiens
aaagtaagggagctcctgggaagacagctccgagcaatctctacgcacagaacgaaggctcctttctgatcctacgccctttaaaaacgaatggcacaaatacagtattgtaatcccaaaaatggcctggacagaaaccagccatgtcaaaaaggtgattatttccctctattgtttgcttttagctctagatggcattc

SEQ ID NO: 219961 - DNA, 472 bp, Homo sapiens
ctaccctgcctataggataaagaccagattccttggctggacattcatcctctccatcatctagccatattaacccctccatttctgcccaagacctagtaagtaggcagaacactgggttcagcccaaccatatttaatgagcacttactatagcctcagcatttcacaccatgtccttctccacctgctgatgttcatgccctgctccttgcctgccataccttctttctagagaggcagcgctgcatggtaattgatggtgttagatgtggatccagccttcctgggttcaaattcttgctttgccacttactagctgtataacctgggaagtcaattcaggtttctgagctttcgtttcttcactcgtaaactggagatccaacctcatgggattgttgtaaggatacagtgtgtcagaggcagtgctttgtccacagcagtgctaaaatgctaggtgttatattaat

SEQ ID NO: 219962 - DNA, 432 bp, Homo sapiens
atattagtattattttagaaagtatataattataactttttgttgtaaaatatagtgatacaggaacataaatatataatacaatgaataattataaattaaatatttagcatacatctttgtaaccttagagtattactggcatcccagaaactcttgatatgctttcttttctttagaggtaaccagtatcatgactttaatggtaattatttatacaatttttaatataactttgtcactttacgtgtattcctaagcagtatgtttacttttttcgcctcattttaatctttatgaatcgtgtattctttcttcctttgctcagcattatgttttgaagagttatccatgtagttatgtgtagttttatttcattcatttttgttattatgtattatccctttgaattaaatgtgccagaatttattc

SEQ ID NO: 219963 - DNA, 401 bp, Homo sapiens
gaaatattctggtttctgattccacttagtaaggtaacatattctgtagaatttgacagatttaacattgtgagaggactcagttcatgaaacaaacactaccatcttttttgttgttgttgtaattaaatgaccctaagaaataaaagtggaatgcacagtctcactgtaatgtgatttactaggatatgagctccctgagggcaggggcttgatctgttttgtttcctgatgttcttttcagtaggtggttatatttgttgtatgaatggatgatgaatgccacagagtaagcacaatgttttgttatttgaaattttgttaaaataactactaagatgtctggaaaacacattcacagcctaggatgaaaagcatccattgactgtaatgaataagtg

SEQ ID NO: 219964 - DNA, 510 bp, Homo sapiens
gctccctcctcctttacccttcacaggagtttcctccccataaatttcttgtgtatctagtcctgtcttggcatcagcttcttggaggacttgaactgatatgcactcaacagccagtaaatcctgctaattcacaaaatccttgattatcagtactaaagaaagacactgggggtgaagatgtcatcttctaaaagacttactggggataatctaccaccaaatgtaggtggcaaatgccatctttgatcacataatggaatcaatgaaggaggttattgatctggttcagaggtgactttagaatgtcccaaaccctttaaatatgtgtgtattgagtatgtgtgcaattctccttgaagaacatttatacctttcatctcattaatctacaaaattatcagcagtggcagctaattgtcagttaactaggtagttgacaagtcacattaacatgaaatctgtgtttcatgtaaataaaaaaaataaaatgacttattttatgcaata

SEQ ID NO: 219965 - DNA, 210 bp, Homo sapiens
tgagctttcctcacaaccttttaaagcactgcatatatattcatgttttcatagtgggcatgtaccttttactgtggtccttttgcacatattataaatagaattcttggtgagttaagagttctctgtttttgttttttcaggacagagtgcacagtttcctctcctgtgggaaggagagttgactcttgaggacccccaccctcctgc

SEQ ID NO: 219966 - DNA, 557 bp, Homo sapiens
gtagtgagccgagatcacaccactgcactccagcctgggcgatagagtgagactccgtctcaaaaaaaaaaaaaaagaatgtcaactgctcctggctctgcagaggtatggcccaggtgacagggctattgagaggccaaagggaccctgatcagccagtggtgtctttggaataggtgctgcaagctctgggaggtgctactgcgcaccagaaggttggtgagttggccaagggtgtggagctggctccagaggggaaggaacaaagggaagggaccctctgggagctggagagacttgggagcctggaggcaggaattccctgccattgcctgaggcctggtttggaaagtacaatgcagttttggcatggtggttgctggcctggaatgtggtggggtgaagagcgtggtggaaggacacactgagttcctgaccatccagcaacaaaggagcaaaaagaccttggaatccatgagaaggtaggagaagtttctgccggggtgggacgggagctctgaactggggctggacagtcagatgggtttctgggtgag

SEQ ID NO: 219967 - DNA, 647 bp, Homo sapiens
tgagccgagattgcgccactgcagtccgcagtccggcctgggcgacagagcgaaatccgtctccaaataagaaaactgcaggcttagaattctaaaccagccaaaatgttcttaaaagattaaggcaaaacaaatatgtgttcaaacaaacaaaaacagagacaatttggcaccagtaggcctgcactgaaaaagtaaaggaagtttatcaggaaaataatccaagatagaaatatggacttggaagaaagaatgaagaacactgggaaacatatgtaaatgaatagtaactgtacaaaataataatggtacaccctgaggagtttcaattttatgtactgtatatctaaaattcatggtagcaataacttaaatgatgagagggaagcaaatagagtttaaaagtcctaaggcttaattggtatcagccaagtagtaaaagtaataatttgcattggccttaataagtaaaaaagcatgttttaaactctaggctaacaactaaaaattatttttaaatgtaacttaatagaaggaaaatggaatcatgtagaacatttgattaatccaaaggaagtcaagggaagataaaggtacataaaagtagagcacaaatagtacaatggcgaatatagacccaagcacat

SEQ ID NO: 219968 - DNA, 373 bp, Homo sapiens
tggagtatttgcttcctgaggggttattaaatagatagaaagggggtatgtaattttgggaaagaagaacattaaaacctggcttcagatatagaatacctcacataactaaaaatattttgacaattttaatatgttgatacattcttaaagctacacactaccctctcagactcctagaaaggttcagcttccaagaatatggtttacaaaagtatttaaatagaataggaaatatattacagccccctacctcacatatctcattttcttcatgatgtctactgtgatgttggcaaatacttggcttccaaaataatacccaatcccaccatcaccctttagatgagaggctcccagctgagaaggaagc

SEQ ID NO: 219969 - DNA, 412 bp, Homo sapiens
atactttgtttatgtaaaagggagtaggttatatgctcagctaattattatataaacttttttcacctaccaaatatctaggacatctgatagttgtgcaggacttaggacaatttgtagtacacgactaccccaggcaccaggtacagtggctcatgcctgtaatcccatcattttgggaggccgaagcgtgaggaccacttgaagtcaggagttcaagaccaacttgggcaacagagtaaaaccccatctctacaaaaaatacacaaattagcccctggtgtggttgtgcacatgcctgtagtcccaagtttcctgggaggctgaggtggtagcaatatgcctgagccctggaaagttgaggctgcatgtgagctgtgatcacgcaactgcactatcagcttgggttgac

SEQ ID NO: 219970 - DNA, 118 bp, Homo sapiens
aaatgccagtctcactctaaacattcccttccttttagattggcacacatttgcccacctggtgctcagagacagttcccccaggtgtggacagtggctcttctcctgaggtcttgaa

SEQ ID NO: 219971 - DNA, 370 bp, Homo sapiens
ctctccacccacctcatccccaccacgccctgatgtcactccctgctgtacccaccccggaaacccttagccacttcccacaggtccactcccagggaagttctttaattggtggatgtgggaaagaggaagaggaaaaatatcatttctaccttcccaattccctgtatcccatgagcctccagtctgaaaatgattacccatctgacctggagctctcatcctaggtatcataatggctcttcttttacccataaggagaatgggtaatgaagaaatgcaaaatcccaactcatgaaaatgtggttgaaaaagggaagacccataaaagttctcatttgttgaccagagacaataaagtgattactta

SEQ ID NO: 219972 - DNA, 317 bp, Homo sapiens
cttagtaagaggggtgggttttgttagctactcggcgagagcatccaaaaccgcttgtgtctgctggcacccctgacagtaagtccattttgcctagatccaggatcgggctctgaaagaggctcatctcagaataaggattttcttgagtcccgtggcttttcagcctggttctgtaatgctctggtcagttcatgggcacacttaaggctaaaaggaaaatcaatcagccaaagtgctgctctggcagttgatgggaagtgaaacaaaatagctcaaaaattaggccgggcgcgatggctcacgcctgcagttcc

SEQ ID NO: 219973 - DNA, 302 bp, Homo sapiens
tgcagtgagctgaaatcatgccactgcactccagcctgggtgacagagcaaaactgccttaaaaaaaaaaattaagagacagcccgtgtcccagtccctcgtcttgcactgcagaatttacatctaagaagaaaatgtatttttgaaagggtgatggctggcctcatccctcactaattgacaacccatctgtcgatgccattttttcccttcctgttctcactccacagaaagaggagatacggttcttgtttggtaattgctaaaatctctttgaggaaagaaataaagatgtcaactcc

SEQ ID NO: 219974 - DNA, 885 bp, Homo sapiens
tattgagcacctactgtatgccaggcactcaactagatacttttcctagattatttctgagtcttccaaaaattggataaagtggttgtcattccctctgttttatacacaaataaatgaagacttaaagaagttagataagttctcaaagttctacaagtagtgagaataaggacctatatatgataatttccttgtccttgaagagttttaggaaacaccatctcccatctgttatccaagaatattctcttgcttctagtctcacatcaacattcattcagtcaataagtttttatatagcgcttagtatgtgtatctgcaaataccaccttgacaacagagagaaaatacacagaacaattattcactcaaagctgggaaatgtaatgaaaggtcagagacagaaatcagtgtgggctggagaagtagggaaaggttttatggaggagtgggactggggttgggtcttgcaggataaaagaattattcaaagagcattcctggccaggcgaacaggataggcaatggcactggggcatgaataagcatgacagggggaagtacattgggaggacacagaaatgtcataagtggaagaaagaaactattcagatgccctatggggattggacaagaggatggcattcatctaggaatttatttgggctattgcaaatgataatccaacgcttcaagtttcttattacctgaagatatggagtacataaaaatgatgaatgaaaacaaacaatattattttgcagtaacatttaaattactaactcttctataagagaagcagtctaccaagttaaggagtggttaggaagattaggaaagtgtttctgtccctcactgagaattaaactttgtttgtttgtt

SEQ ID NO: 219975 - DNA, 498 bp, Homo sapiens
cagtagagactctaattctgattccactgcagagtagaactttgtctgattcatcgcccccctatcccggcctccaccatcttccagggtcctgccctgggcttatactcaacctttgagtcaaaaaggatggaagctcttgataaacctgtcactttcccccaaatcatcctggctttcctgtttctgttaagagcagcccttggccagatgtggtggctcacgcctataatccccgcactttgggaggctggggcaggtgcatcacctgaagtcaggagttcaagaccagcctggccaacatagtgaaagcccttctctactaaaaatacaaaaattagccgggcatggtggcacatgcctgtagtctaagctactcgggtgtctgaggcaggagaatcgcttgaacccgggaggcggagactgcagtgaaccaagatcacaccattacactccagcctgggcaacacagcgagactctgtctcacgaaaacaaac

SEQ ID NO: 219976 - DNA, 691 bp, Homo sapiens
agagtgttctcactgctggcataggagggtcttcagcctccagtgatcaaagtaccaggctgacctgtgactgcttcggccaactgaatagggaagagtgatgctgtgctgtttccaggcctgttctttaaaagtacttggaagcttctgccttggcctctttgtgcctgagttgctgtataagaatctgactaccttgctggagagaccttgtggagaagacttgaccttatatgcagaggtagaggggccctggttagtccagccatctagccatcctgtcaaaatagcagatccatttcctgcccttcttttattctactctgtattacagccaaccacatttccaggctcccttgtcctctgctatctaggtgagttttgtcagtggaagacattggtggaaggttggatgcttcttcttctagcatctctggtggtggctgtgtttcctccctgactccagctcccactgggtgtcattcactttgtggttttggtgcttgcccaatggcctggcttctgagccctgcttctgcagcccagggagagtagcagcagtctgctgtttttagtgtctgggttgccactcttttcctgtttgacctctctgggcttccatgacccacataagtcattaaattccctctgtcaaaaagacttaggttcctgtttcatgactggatgctga

SEQ ID NO: 219977 - DNA, 545 bp, Homo sapiens
gcttgcaggccattcaagttcatattagtcacaaacagaaaaaagcatcaatggtggattaaagaaaactgcaaattctttgatatttttcccatttagaggcggggtctactttcccttttcttgaatctaggctgacctgtgactgcttcggccaactgaatagggaagagtgatgctgtgctgtttccaggcctgttctttaaaagtacttggaagcttctgccttggcctctttgtgcctgagttgctgtataagaatctgactaccttgctggagagaccttgtggagaagacttgaccttatatgcagaggtagaggggccctggttagtccagccatctagccatcctgtcaaaatagcaggtatgtgagaaaagctgtcttgattcctccagcccagcccagccaccaactgaataataccaagtatatgtacctcaaatggaggaaaagaactgctcagctaagtcctgcccaacgtcctgactcagaagataatgacagataatgaaatgattgttgttttaagccactgtgttt

SEQ ID NO: 219978 - DNA, 789 bp, Homo sapiens
agcggaaaggagaacacaaagtaaaagtgacactgcctatttcttcacgggtacaagggccacttaggctgggatgcttttcctgaaaatgcagaccatacagaacaaggccatgtgactaagaatccacaacagaaacaaacacaagacacatatgagttaggaaagttaaggaagcagtccttcctttcggccaaaactgccaccttccagtaatttgccacaatgatgaacacaaagggggaagaggagaggcaccggtatacattctctaggccttttagaaaacatggacttgttcctttggttacaaatatgcgaatctataagaaaggtgatatggtacacatcaacggaatggatactgttcaaaaaggaatgccccacaagtgttaccatggcaaaactgaaagtctacagtgttccccagcatgctgttggcattgttgtaaacaagggtaagattcttgccaagagaattaatgtgcatattgagcacattaagcactgtaagagccgagatagcttcctgaaatgtgtgaaggaaaatgatcagaaaaagaaagaagccaaagaggaaggtacctgggttcaagtgaagcaccagcctgctccacccagagaagcgcactttgtgaaagcttgtgggaaggagcctgagctgctggaacctattccctgtgaattcatggcatcataggtgttaataaaataaaataaaataaaataaaatacctctggctgtaaaacaaaacaaaacaaaaaaatcaaaaaacaacaaaaaagaaa

SEQ ID NO: 219979 - DNA, 459 bp, Homo sapiens
acatagcaaataggtgatggagggcaaattaaaacccagattgaccctggaatccccatgcttcaccgttgtcctccatggcctcttggcatatgggactgcccaggtgcactgagaagaaagcttttctttcactctgcttattcgaatcagaagcagacctagttcaaaaaaacagaaacaattgttattttatgaactaatgctatttatgatcaccagcagcacaatttttacccgcccccccgactacaaaaggaagcagcatggcaatcactatatccaaaaacatacctggtaaggggccattgtcagttccagagaaccaaaccacctggaacctcagcaaaagtgatgaaataccagcatctcagaaagttaaagtggatgatccttcacaggggttgcccaatggtgctgtaatctgaactattgcacaaataaaggccttttgacagc

SEQ ID NO: 219980 - DNA, 272 bp, Homo sapiens
tccagctgctcctggggtgctcatggtctaaggggatagagagatgtgtacacaagaaaagcagcagtcacactgttcaccaacatccagtccctctttttttctgggcacaagggaggctaatgcattccacactttcgatgttagttgtggtcaagtgtcttgtcttagtcaatgaaatatgaacaaaagttgtgtgtgtcatttctagaagaaacgtacaaaaactaacacacggttctttagctcctctcctctgctgcagtgactgg

SEQ ID NO: 219981 - DNA, 587 bp, Homo sapiens
cccctggtacgggagtggcggggtgggggggtaagaaaatacggttaaatcattgggaggcttaattgttttaaagactttacttgcaagactgaaaagacaaatgggctccattttagaaaattctaatagattcacttgaatcaatttttgctatttttatttaaaaaggcaaaggcaggagaaacgggttcaaataagtcaaatgaaacaaacgtggtgctttctgtggagacagtggctctgacacaccactttatgctagaaaggcgcaagggccgggtgggtgtggacagagggtccactaccaagtcagctctatgcctgaggccacgaaaagccaaattgcaccaagaataggttttgccaccagatatccacactaatattctactaaactgaattgaggctaatcagaaacttctcttaaggtgcaaagatgctctacagatgacttacctaggttcccactcctgaattaactaaactcaaaataactgaagtttttaacagcagaaatttgatgtatcaagagcaacctgtgtctgaaaaatatgccaaattagagccacaataaagaataactt

SEQ ID NO: 219982 - DNA, 488 bp, Homo sapiens
ggtgttacgtgggttaaatttagattatgtatttaagctggctggcagaattttaagtgttcaccatacctcatgtccttccccagtattttgttacagatatacttaccaagaatgaactatcatttataacaactgaaggacggggtttttaaaaattcacgttattatttctttgtaaatattattcagggtgggggggtaagaaaatacggttaaatcattgggaggcttaattgttttaaagactttacttgcaagactgaaaagacaaatgggctccattttagaaaattctaatagattcacttgaatcaatttttgctatttttatttaaaaaggcaaaggcaggagaaacgggttcaaataagtcaaatgaaacaaacgtggtgctttctgtggagacagtggctctgacacaccactttatgctagaaaggcgcaagggccgggtgggtgtggacagagggtccactaccaagtcagc

SEQ ID NO: 219983 - DNA, 528 bp, Homo sapiens
taggtagagggggcacggaatgtctctgtattatttcgtaaagcttcatgtgaatctacaattatctcaaaaatttaagttaaaaaaggaagaaaaataagaaaggaagtcccaacttggagtctgatttaaagggtctattttgtcaatggtttccatgcacctgaatttgggactaaaatacacagaaactcagaatacccaaacaatccctgcaggggaaaaggccatgttcctctagaaaaattagtatgtgaggatgcctaacccccactgtcccataaattattaatgatgaccttcatttgcttgagatagatgttctcctcctgtcaataaagactggccttctagcaaatgccacaactgtctgctgctcacagaactttatgcacgggataagcatgaaataatgggaatttaggcatgatggagttagaccctgtgcctacgtgtttttttgcaataatatctgcctgggagcagagaaccttcatcagttcttaataaaccactctgctaatgagt

SEQ ID NO: 219984 - DNA, 545 bp, Homo sapiens
agccagaatgaaagttctatgtctacccagtgccaagttcaccatctctgtaactatttgttggatgaatatgtgaatgagtagaaaataaatcaacatactttttcatcaagacagtaaagtgggcagtgttaaactcttagggtgacacagacgattgctttaaagaaaaaatcataaagagtgaaaaaatagaagacttggcttatggtgtggtggcatttgaccaactgttcttgttgaggtagtgatttttgaggcatctggtttacaaacacctcaagggtatagcccaaacttggcatcttctggtagtggcagaacacccagtattcagggcattgttaagtatgacaaagggagagtcaataaatctcaaatgcattcagagacctggctaagatgctaaagcagccaatctgtgccttcccagtggcttcaatcacaatccccacttgatcattgtttgactctcctttaacccactatgtccatggaattcctttggtcagtgacacccagagtgggcaaaatccaccttgaaa

SEQ ID NO: 219985 - DNA, 396 bp, Homo sapiens
gccttgctgtattattatttgccaagggatcaaggacctgctcagggccaccagtgtcagcaactagattctgaataaatatttgattaataaatgaattactacaagttattgatagaatataggcagaatgtttttttgttttttttctcttcagattttataggttcttaacaaaaaaccaaaatgaagacataatgtttttaatgtaatggtaaagaggaaacttctgtgttttgaatactctacttgaattgtcattgctgtaaagagaaataattttgattatttttgtttttactcaggtatgaagaatttattctcaaattaatactcatgcttatgagtgtataaatgctcatatattgatttaataaaggtttctgttacttgata

SEQ ID NO: 219986 - DNA, 431 bp, Homo sapiens
gcgtgagactccatcttaaaaaaaaaaaaagaaagaaattttaaataaagcaaaaattcaaaataggcaattaaataaattattactttagtatgcaagtaatgcatatagttacattatataaaatacatgattttgtcgtgtacacgtgacaatgcaatgtaaatatacatacgttatgatgtataattgaatatatatcataaaatcttacatttcatataatgtaatgaattatatataatgtataaattttacatggtaagtatatgcattatttatacatatgagcatagcacatgatataaacagtgcaactttgtttttctttcgatacagaggctccctctgtcacccagtctggagtgcagtgagccgagatcacgctagtgcgctccagcctgggcaacagcgtgagactccatcttaaa

SEQ ID NO: 219987 - DNA, 457 bp, Homo sapiens
ctaccattgtgctgtgtagtttgataaatgcggtttgtcctaatgggaacaggctagaagagttctccaagacccagtttctcttgtaaataagtgaccttcttatggtctatccaagatagttcccccttctctgatattttattgtgatataaaagaatgcttggccgggcacagtggctcatgtctgtaatcccaacactttgagaggctgaagcaggcggatcacacctgaggtcaggagttcgcgaacagcctggccaatatgacgaaacccccgtctcgactaaaaatacaaaaaaattagccaggcgtggtggggcacgcctgtagtcccaggtactcgggaggacgaggcacgagaatcgcttgatcctaggcggcagaggttggtactgagccgagatcacaccacttcactcagcctaggcgacagagggagactccgtctcaattt

SEQ ID NO: 219988 - DNA, 528 bp, Homo sapiens
aaataactaatttgcttttgattttacaggcccctaggcagaaggacttcccttgtctcagatgaaactttggacttggacttttgggttaatgctggaataaattatgactttggaggactgttgggaaggcatgatttgcttcaaaatgtgaaagatacatgagatttgacaggggccagggctggaatgacatggttagggtttgtgtttccacctaaatctcatcttgaattataatccccataatccccataatgcccacatgtcaaggcagagaccaggtgaagataattggatgatagggacagtttccctcatgctgttctcatgatagtgagtgaattctcacaagatctaatggttttataagtgtttggtagttcctcttgcattcattctccttcctgctgcctgtgagaaggtgccttgcttcccctttgccttccaccataatcgtaagtttcctgaggtctcccaagccatgtgcaactgtgagtcaattaaacctctttcctttataaacta

SEQ ID NO: 219989 - DNA, 349 bp, Homo sapiens
cgagaccctgtctcaaaaacaaaacaaaaacctaaaatcccctactgacctccctctgttatgttctgtcaagatatacctcaattcctgtgactagggacgttggaaaggcattgttttaaaatttattttgcagtctttgattccaaattgcttatatcttagaattctttcccttcatgacttttgtccgttgttcatttccccaagtcacatcttgatggcccgcgctgtgagtcagatggcttttctgtagccaaggttatgtgcctggggacggcccttcaccccatcctctagaaaggcaggctttcagccccagaggtacttacagattgttaattcattc

SEQ ID NO: 219990 - DNA, 471 bp, Homo sapiens
ctagagcatcttccactaagttgctggaactgatgcctttaaaagcatcaccctagtccctcatgttaataaacagaaacctggttaatccccacaaggcagattatactgatttaaagaagggaggaagggattcttgtacttatatcaaataacagtatgtctagaatgtttgggaattgataactcggcagagttctcagcagagaaataaaacgacacagtaaagttttgtgttctccactttgcctcctttgcttaactcattctctctttgcaaccccatgctaagcatttatttattaattcaacaaatgtgtattgaggactaacatgtgccaggtactgttctaggcactggaatgaaatagacaaaaattcctgcttgcattccccaccgctcggaacttctgaaccaagtcaaagaagagctgtcttttctccctcagatcttgctgatctgcactttca

SEQ ID NO: 219991 - DNA, 373 bp, Homo sapiens
agagtgcttatttttaaaggaaaggtgactgagataaccctctctcctgctctgaaaatgttgttcctcctattccacaatttccagtacgctcttgtttgaatctctccaaagatattcagagactccctattacgaaggtgatgtccaaactcctttgcctatcatccaaagatccacacctgggtctcagatgcctctccagcctcacgtgtcactcctcgcccctaaatctcagtgtctatcctggggctggctgttgcttagcaaggcttgtgggttggcagcttgaaccatgttctgtcctgatgctcaactgcaggaactgaggtgagaggaggccatgtgacaataaagatcattatgtactcac

SEQ ID NO: 219992 - DNA, 338 bp, Homo sapiens
tcccttggagccttctttgcttgttcccactcacaagaacctgtgccgacttcctagaactcactgcatcccccgcactacttggtaactgcctggtgacatctcttgaattgttatttcactttgcaggcatgtcttccttatctgcccaactaggttgtaaactcccaactgagtggagtcggagaatctctaaatctcagtgtctatcctggggctggctgttgcttagcaaggcttgtgggttggcagcttgaaccatgttctgtcctgatgctcaactgcaggaactgaggtgagaggaggccatgtgacaataaagatcattatgtactcac

SEQ ID NO: 219993 - DNA, 138 bp, Homo sapiens
ctagtattctttctttgagaatttttaacttcaaataatcttagctagcattcaatatcttgcagaaggcaagagagaatcaaaccttaagaaaagctttcttgccaggcgcggtggctcacgcctgtaatcccagca

SEQ ID NO: 219994 - DNA, 385 bp, Homo sapiens
ccatgtatatggactatgagaaatacataaaactattttataatttgcaatgctaattgtaaacgaaccctctgtttttctgttaaattcattttcaactcttcagctaaagtttctaataaccagaagtgagattacttgggaggtacatattgccatcactgtgtggccattactgatatcaggagcaatctcaaagtgtttaacagagcaatgtgtatctcagtgtaagctgatctttgtgattacactacagaaatgggcatagagattagatgttgatttggatagagatgacatttagaattttattttctttcagtcagcatttttgtttttttaagaaacagctaaaaatcacattgagagttgtaaattatgaaca

SEQ ID NO: 219995 - DNA, 109 bp, Homo sapiens
gtaagaaaggggtagaggaagaatatgttggaagatccagaggaaggagatcttgtagaacacccagagacaggaaagaaggtctggcaagggctggagaggtggggtc

SEQ ID NO: 219996 - DNA, 1188 bp, Homo sapiens
aaatactcccagctctctcgccctcttttaatgacagtggacacttggtctcttgaaaatcaagctattcatccataactatttgaacctcatcaaaatgtctactccacatacttttctttctattactttttctggtggaagcatttttcaaatctgaggtatagaagagtgcataaaacatatttgtatcgtttagattattttacaaaagcagacacctgtgtaaccaggaccaaggtcaagcaatagaccactgccagccttccagaatacagccgctgtactcctcccaatcacaacccacactctcctatatgaatatagtcattgccctgactttgtaataatcatttcactgctttcctttatagctttatcacttttgtacgcatccgtaaacaatagagttgatacgaagttgtataaatggaatcatacggcaagtttccttttataacttgtttctttcactctgtattatacttgagactcatccatgttgttcataatagttataagtaagtagatcctttgtctccatcgactgtcgttccagcatatgcttatagcaaagtgattatggtatgattataccactccattctacagcagatgaacattaggattgcttctatttttcagcgattattatgaacattcttgcacatttctcatgggacacatgtgtaaaaatctctctagggtatatatccaagaatagaatccagggccatagggtatggatatcctgagctttactagatgatgccaaattgttctctgtagtgattgggcaagctgtcaatcccaccagcagcacagagagcccctactgctccacatcttcacccacaccaagtattgccagaatttaaattttgccagtctactggtgggcaatacccaaattactagtaagctttagcacattttcgtgtttatgagccttttggagtgtctactccgaagaaggcctattcaaatttacctcttttaacccatgtttctattctattgttcatctagtacttactgacttaatgagcctgttaaatattttaaatactagtccatacctgtggccaaaatattcccttgttctgtttgtatttcccattgctttgtgctgtgttttgtgaacagaagatcttaattataatatagtcaaattcatcattcttttcc

SEQ ID NO: 219997 - DNA, 389 bp, Homo sapiens
taatgtctcagatccttagtttcctttttggtttttaagattaaactaggcaatatgcgtaaagcatttagcatcagaaatacttatatataaacacatagaaaatgatgacgagtaattaattttattaacattattatatatttgggggaaactgcaagtaaaaatagaacatagataaaactaaaagatgcaataggaacctcctaatcattttgatagctgtggcatagctgttttctccaagacagcataagcacttgttgaaaatctacttattttctaaggacttgtcagagctgattgattgaatccttataacaagcttgcatgctggatacttatttttattcctatttttggataagaaaactgaggcttaaaaaaat

SEQ ID NO: 219998 - DNA, 448 bp, Homo sapiens
tcccaaagagcatgagcctacttacctgtgattcctccctcacaggtttacaggaacctcacctctggagttgggagggaatgctttgtagatttttgtccataccctaacatcatgcttctgtctccagaatagacattctttctctaacgctttgattgctcgatctcttggtaaatacggcatcatctgcatggaggatttgattcatgagatctatactgttggaaaacgcttcaaagaggcaaataacttcctgtggcccttcaaattgtcttctcaacgaggtggaatgaagaaaaagaccacccattttgtagaaggtggagatgctggcaacagggaggaccagatcaacaggcttattagaagaatgaactaaggtgtctaccatgattatttttctaagctggttggttaataaacagtacctgctctcaaattgaaa

SEQ ID NO: 219999 - DNA, 425 bp, Homo sapiens
tttatcccttgagtatcagctttaagtcatttccttaaggaagcctttccttacctctaagattaggttgaatacttccattaccttatactttttatccttcatcacagttgctatgactacatatttgcatgatcattaatttctgtctgtcgcttcataagatcacactctccatgagggtaggggcaagatctgttttgtcatctttgctcaatcagtatttgatgaatgactgaactaatgaatgaataactcagcatgtggcagtgatagagaaaagcattgtgaaccacttttgatccaataagatctgaagcttctgttttatattttacacccccgttaccttgaaatggaatatatgtataatgtctttgtatgtatacatttttgagagagtctgactctgtcgcccaggtgga

SEQ ID NO: 220000 - DNA, 516 bp, Homo sapiens
tattaaaaataagattttgcaactgcgttggcataaggaaaagtatattaatattgcatattaaaacatgttcttcagcctaaagctttacttatttttttctgattttaaaacaaatcaaaacattttcatgggccccaaaagactatggtccctggcactgggcctgcggtgcttaatgcagaagtctaccctgcgtgtctgatatttcttctgggaaataaagagctagtgagaccctccatcttttgccacagtgcttctctctactctctctcgtggtcctacttattctggtcccccacggctgcctagtctttctggtccttgaagtctaggactgtcactcactgattgccaactctttcccaggcgcactcccaccccaaggacaccccttgtgattgctgtggaataggcatagccaccgcaaatatatcgttacttatatattctcctttcacctgctttggaagaagaaccgtaagcatttattaaaaatgtctgagaagctgg

SEQ ID NO: 220001 - DNA, 1383 bp, Homo sapiens
cagtccgtagagtattagctacagaaacctttccatgccatactgagaaagtgcagcaggcagtgtgcctacaggtctacaaagaaacttcagatcatcttcttgagggaaagaagctgaagtgctacataagatgctgtgtgcttcataactctcagaagctgcagattctgtataaatccttagaaaagagcatccctgaatccataaaggtatatggcgccattttcaacataaaagataaaaaccctttcaacatggaggtgctggtagatgcctggcagattaccagatcgtcattacccggctcagaaacaggagatgaaagatgaccaggatcattataccaacattaccacatcttcaccaaagctcctgacaaattagaggaagtcctgtcatactccaatgtaatcagtgggagcaaacttgtgcagatccaaggttgccaagagggcttggatgaagcaataagaaaggttgcaacttcaaaatcagtgcaggtagattacatgaaaaccatcctctttataccggaattaccaaagaaacacaagacctcaagtaatgacaagatggagttatttgaagtggatgatgataacaaggaaggaaacttttcaaacatgttcttagatgcttcacatgcaggtcttgtgaatgaacactgggcctttgggaaaaatgagaggagcttgaaatatattgaacgctgcctccaggattttctaggatttggtgtgctgggtccagagggccagcttgtctcttggattgtgatggaacagtcctgtgagttgagaatgggttatactgtccccaaatacagacaccaaggcaacatgttgcaaattggttatcatcttgaaaagtatctttctcagaaagaaatcccattttatttccatgtggcagataataatgagaaaagcctacaggcactgaacaatttggggtttaagatttgtccttgtggctggcatcagtggaaatgcacccccaagaaatattgttgattgattccactgtccatttcaaatctttcttatcagtaaaaaaacattaattcaaacacaagcattgtgatctacattagcacaaaatgcaactgattatctaggatctgtgtattacttaagctcacccttaacagttttaccttccttctcctctgtattcttacagaaaattagaagctcaattttatggtctcataatttcctttatgacagacatctcagaattaaaatcacccaaagccaatcattagtgccaagataaccctttaacggcaacactttcttaaatgaagactatttctttcatgaaaaaattcacttttatgactttcttgttaaaataaaaagtctgcttttaaaagtg

SEQ ID NO: 220002 - DNA, 1521 bp, Homo sapiens
cagtccgtagagtattagctacagaaacctttccatgccatactgagaaagtgcagcaggcagtgtgcctacaggtctacaaagaaacttcagagtctcacactgtcacccaggctggaatgcagtggtgcgatatcagatcactgcaacctcctcttccttggttcaagcaattctcctgcctcagcctcctgagtagctgggactactgacactcaccaccacacccagatcatcttcttgagggaaagaagctgaagtgctacataagatgctgtgtgcttcataactctcagaagctgcagattctgtataaatccttagaaaagagcatccctgaatccataaaggtatatggcgccattttcaacataaaagataaaaaccctttcaacatggaggtgctggtagatgcctggcagattaccagatcgtcattacccggctcagaaacaggagatgaaagatgaccaggatcattataccaacattaccacatcttcaccaaagctcctgacaaattagaggaagtcctgtcatactccaatgtaatcagtgggagcaaacttgtgcagatccaaggttgccaagagggcttggatgaagcaataagaaaggttgcaacttcaaaatcagtgcaggtagattacatgaaaaccatcctctttataccggaattaccaaagaaacacaagacctcaagtaatgacaagatggagttatttgaagtggatgatgataacaaggaaggaaacttttcaaacatgttcttagatgcttcacatgcaggtcttgtgaatgaacactgggcctttgggaaaaatgagaggagcttgaaatatattgaacgctgcctccaggattttctaggatttggtgtgctgggtccagagggccagcttgtctcttggattgtgatggaacagtcctgtgagttgagaatgggttatactgtccccaaatacagacaccaaggcaacatgttgcaaattggttatcatcttgaaaagtatctttctcagaaagaaatcccattttatttccatgtggcagataataatgagaaaagcctacaggcactgaacaatttggggtttaagatttgtccttgtggctggcatcagtggaaatgcacccccaagaaatattgttgattgattccactgtccatttcaaatctttcttatcagtaaaaaaacattaattcaaacacaagcattgtgatctacattagcacaaaatgcaactgattatctaggatctgtgtattacttaagctcacccttaacagttttaccttccttctcctctgtattcttacagaaaattagaagctcaattttatggtctcataatttcctttatgacagacatctcagaattaaaatcacccaaagccaatcattagtgccaagataaccctttaacggcaacactttcttaaatgaagactatttctttcatgaaaaaattcacttttatgactttcttgttaaaataaaaagtctgcttttaaaagtg

SEQ ID NO: 220003 - DNA, 426 bp, Homo sapiens
atttcttcataaataaattgaggagaaattaattttttaggatccaaaataaagtgaaacaatgttgggcactggtgccagtatatgccaacaattcctgccctaggaaaggtaacgaaaggcagaggggagccaggcacagtggctcacacctgtaattgcggtgacttgggaggctaagacaggagaatcccttcaggtcaggagttcaggaacaacctgggcaacacagcgtgacccccatctcttaaaaaaccacaagaaaaatttgctgggcatgttggtatgcacctgtcatcccaactacttggaggctgaggtgagaggatcactcgagcccagaagttcgaagctgcagtgaactatgatcgtgccactgtactccagcctgggtgacagaacaagaccctatctccttaaaaaaaa

SEQ ID NO: 220004 - DNA, 379 bp, Homo sapiens
atttgactttgcttaaaatatttttcattaaccgtactctatgtgatttaaacttctctatgtcatttaacttttttatgacttctagatttgaggtcacagttaggtaggtgtttctcattccaagttttaaaagaaattctctcatgttttcttttagtgtatttttggtatgtgtattagggaaggggaattgtttctttatatttaaatcttatatccaaatgaaatttaccctgatgtgggtgtggtataaacccaaatttaacttttccaaatagatatctaattgtctcaacaccaagtacagttcttttccattttcattgagatcctcctttaatcatatattaaaggcctgtatagtatttattgggtt

SEQ ID NO: 220005 - DNA, 196 bp, Homo sapiens
cagtgtttaatagctagcggagtgataggtacgataagtttatcaagatatccttgaacaaagagctatgacaaaagaaagtacttgcttatagtcatggaattttgctatgtctttcctgataatatctctaaccaaaatagttgtgaaatcatttattcatccagcatgtatttgagtacctcctatgtgcctg

SEQ ID NO: 220006 - DNA, 256 bp, Homo sapiens
acaaacccattgctaggctaagaagtattgattccatctagttaaacatgtcgagtgagaggaagtgatcaatggattacttcttcaaaacatttatcccccctagtggaatcctctgatttttataacattaaagagccaggtataggagttgggagaagaatttaaaatttgaaatgtcttcttttttcaactctgttcatgaaaactctagttaatgcatgtgatttcctgggtctccctctctacttccctc

SEQ ID NO: 220007 - DNA, 449 bp, Homo sapiens
ggaattttatttagccacaaaaaggaaagaaattttgacacatgctacaacatggatgaaacttaaagacattatgctaagtgaaataagccagtcacaaaaggacaaatgttacatgatatgcaacttatatgagtgtcctagagtaagcaaattcatagaaataaagtataatggtgactgccaggggctgggggcagatgaaaaagaagattcatttgtaatgagcacaaagtttcagttagggaagataaaaaagttccagagatgaatgatgatgatggttgcacaacaatgtgaaaatatttaatgccacaaaactgtacattaataattaaaatagtaaattatgtgttatgtgtattttaacaacaacaacaaaaataactgcacaaacaatactccttgactcagcaaagtaaaacacagaaattctgacatatatccat

SEQ ID NO: 220008 - DNA, 607 bp, Homo sapiens
cagaacagagataactggtgattcagatttccagtacattagaaggcacctgcgaaggtacttcccttcgcctcctgggagccatcagtgagctctccaggagagcagtatgatgcagagaaagaaacaaaggagatgcagatagtcatgtttctcctcattcacggggtgaacttgggcagcacctccctttctctgatcctcagttgctttgttgaaatagggttgatgtgaggggccagtgagataatgcaggtaaagtgctgcatggtggccagcactattagctcctgatgggggctgattctcccacgtgggtgcctgtgagactcaactaaggggaggagcagtcaggatggtcagaagctcccttgttgctttctaggcccttgctgtgacccatccctctgggactggctctgttgtaagggtaaagaagttctgtgacatccatgtgccatgtcactttccacctggtagcagaggcaggcacatcagctccttggctctgtgctggttctgctggaaggttttataagagcacactgtccagtagaaatgtagtgtgagctgcatgtgtaagtttaagttttctggtaattacgtt

SEQ ID NO: 220009 - DNA, 232 bp, Homo sapiens
ttagcgtggtcgcggccgaggtaccttctgaggttggccatctcatcaggaagaatttctgtgggttcctttgatacagaacaatccttgatgtcattgactaaacaggatatttagacattttataacacctgaactgtggaagacatgtttcagggttttttttttttttttttttggactgggtctagattagactttctaacctgtataaaccattgggacttgctca

SEQ ID NO: 220010 - DNA, 602 bp, Homo sapiens
ttggtttaattttcaagactttattatttaaagttatagatacacttcggggcttttgaaagaacactaaacatactgtaaaaatatttcatttaagctactttgactcaccttccatttacaaactattttatatgttacctaaaatacaaacagcaagataattattttttggaacaatgctatctaaatcctgagggaaacagtaacaataacagatttaaaatattggatgcttatagatacttataaaatacatcacaaatattttctctaatgatcggcaatattttgtgctttttgaatccagaaattgaaaggttaatcagcttatccaagatcacatatgttttagtctcagttcttcagagaaaacagatccaataggggtgtgtgtgtgtgtgtatgtgatatttatcttagtataataaaaatatttattttgaggaattcgctcatataattatggagactgagaagtcccaagatctgcatttggcaagctggaggcccaggagagccaatggtaacagttctagtctgactctcaggccttcagactcagactagaactgttaccattctgatgttggagcggccgc

SEQ ID NO: 220011 - DNA, 687 bp, Homo sapiens
tgtctcccagacccacatttggaaagtttgcattgcattactgctcatctttagatgagcaattgagagttggctagattgtgtaaaatattttaaaatgaatgaacaaattacaatgatgatgccttttgaaattaccatatctagttcattctgtgaataaactcattttctagtaatgtttgtgaaccttagtcaagggatattcattcaactttataaatttacccctcagcaccagctatctagcactgtttaggaatttttcccttcatgatattctgtgtcacatcctatgtctatgaataacctatacactatagttgtatgcctataagcactcctatactcttgtattttaattgcaatagtatacctccactctctctctctctctcatacacacacacacacacactcttacacacacactaacacactagactgtttgccctaatgaattttcctctgtacttcgagagctattttagttgtcttgtcacttgaaatttgcgggcttcaaagaattatcgcatttgacttggaatggtccagtagtccatttacttctttcaccctgcctgttccatcttctatttctgatattttttctttcttccagttatttcaggggcaggtgattccaaagctggtttaaaaataaataacttctcttatgttgtcagt

SEQ ID NO: 220012 - DNA, 475 bp, Homo sapiens
cagagatcaggcttgtgtgtctagttatggtctcactggtttacaatgttggccctagctacccctgttccaggttgtgattcacaggtgagggattggctttgtctataagatggacatggtagatatgcagagggtaataacaggtgccaggataggttttcctacttcagtgcaggttcagtttggatgcctgaaaaaattcagaggtgaagtggtcaacttgtaaatcttacagctaggctgatcatggccatgccaaaccttgtagcattatatgcagaagatttgggaacctgtgtttggataatcattttttggtagctgaaacacagtcactggactgaagttgaggattcttttccagaaggactgactataatcaagtcaaatagcaatgacagaggtccatataattactcctaaacagggaccaggttgggaggtaattaaactaattgagggacttgaatca

SEQ ID NO: 220013 - DNA, 648 bp, Homo sapiens
atgcacgggttgcttctcccgaatcagccctcagcgggttttatattatgctttgcaatctgcaacaaccataaataagtgtaggtttttcttagggcaggcagctctcctgtccaaatcttagagctttttcctaaaagaggtctattgaaaactggacttctttgacacacctctaactgagatttaaatgtcttagtctcatacctcagactcaaaagccccccacctccagagtttggtcaaggaggccccaaggtatgacagacaccctggggttaaaaacagaggctggagaccgggagcagtggctcatacctgtaatcccaggactttgggaggccgagggaagaggatcactttaggtcaggagttcgaggccagcctgcccaacttggtgacccatctctaaacaattttttaaagccctcaatgaacatttttatgtgcattcaactcatctttgcgtactttaatgacctatttttaggataaattattacaaatattattgggtcattgcgtctgacttttttttgctaagcatttgagccagattgccttctgaaggatcaatttttacttctacttaccagtatcagccattttttggccggctgcagtgctttatgcctgacaacttgctgc

SEQ ID NO: 220014 - DNA, 475 bp, Homo sapiens
caggagatgctgtctatttgtaaccacatatagaaattcattcccaaactacagatgatagagttttacagagaggtgcaaaaatatatttttgcatcaagcattgtctgtagcttgaatacaaaattatgttgcccatataccactggtttttgtaagtaaagcagttgtgttacaaagcatacaagtttttatcagctaatagccttttctcaattagcagatactaagtagtacttttattatgtggcaattctccagtttttggaatgttattgagaaatacacagggttaaaacaaattagaaagcacctctcccaaaatactgcagtaagatgtaggaaaaactgctctaacatattctaaactataggttgctcttatgtaaatatttcaactataatatctagtctgatgtgcccactggccagagttttgtaaaagctaaaagtaaaggaaataaaaaaaagaaag

SEQ ID NO: 220015 - DNA, 1576 bp, Homo sapiens
ccggaatgtcagactctgctagcaacacaaggtccctgtcctcaaaatcctattcttaatcagcatttctaatttctgccctttgctcattttaatacagagcctgaggataggagagcagcgtggtgaaagaagcaatagttaccacatttgcaaaggcacataccccaaagagaagtttttaatatgtcacacccatattttatagatggggcaatggaagtccagatgggagaagttatttcaggtgaattatagaaactggatttcaagtttctgataagtattgaatttgggaaggctgtgaacattcttgagcccccctcccaagttcaccttcaacatcctaaagcaggttgaagaggaagatggttccaggtcacttacaagaacaggaacagcccctccctccaaatttgagcccagaaaggagaacctttgttactctagaaaacagtgtgtgtgctattgttttctccataggtcacaaacatccacaagatattggtgattttacatattattagagccactgaaatttatgatgcaggatattaacgtcaaagaggccaagatgcatcattcagaacactggcaggtcaagcagaaaccaccgtagtaaaattgaaagctggagtcagcaaagtatagcccacagccaaatctggcccatcccctgttcttataaagttttattggaacgcagccatgctcatcggtttatgtattatctatggctgtttccaactacagtggcagagctgagtagttgcaaaggaccatagggctatcaaagccccaaatagtcattgtctgacccttcatagaaaaattttgctgaactgtagtctagctccaaggattgttgtatcacctgtgatcgtgcctattaagcaattaacgtcatgtctagtacttagtaatgactcagcatgtatcaattacgatgataaatattatcatggcatccaaaccaaaatactcatgccaacatctctctgtacagaaacatggaaaaagagcgatgctattaaggaggaaaatggagccaggagcaaaacctaaggctatttctgaactaaagaggcctgaataaggtagtgaaaggaccagggaaagccttcccacggggatggagagccacctcctccccggctttctggttcagatgtcttgtctcaacagacggcagattcgcagggaagcaggccgagcctgatcttttctccgctagaactgctcaacaggtgaagaatctttttccagcactcctgagcccttcgggtcgcggaacagtgcgaagattattccaatgcctcattcggagaggtgataatctggtctgtggtttctttttcggtggggcatggggtgggggtgagtgtcatgctttctaaggcacagggctgactaaagggtgtcctatttataagtcagtaaaacacagcggcttcatactctgtgcttattacccagaagccccggctcttagagtttctattaagatgtacctcataaatatatacgcctcctatgtacccacaaaaattaaaaataaaaaaattgaaatcactca

SEQ ID NO: 220016 - DNA, 356 bp, Homo sapiens
gtggggggtagtgggggaatctatctctagctttttcttattgttgtaaaaataatttcccaaaaataaaaataggctgggcgcgatggttcaaatcttgacccttctgagctgtgtgactttgtccaaattcctaaaggtctcagaagctcaatttatctcctttcagggaccgacttgaggttgagataaaatggattacacaagtgtctgatggtgtaaaggtggcactaaataaatgtacgctgctacagttattatttccttagtgacttcatagctgtctgccctgcaatgtacaagttcccagactggaaggaattatggggaaaagctaataggggagggtggaaagg

SEQ ID NO: 220017 - DNA, 411 bp, Homo sapiens
ttgtttctctccttggccagtgtactttcactgctttgcaccctgcctggcatagactaggcatttagaaaattgttcctgagagaattaaagaataaatttcataaaaaatgtcttcagtttacaacatgtagttttatgcaacacttggcaaagtgggttctggtgggagctggtaatatcctttaaatcatgggactgagcaaatgattctagttgaatctgtgttatttaatctgtgtttttaaatctgtgaggctcttgccccagactctacttgaagtctgctgtgcttgcctgtaagctcataatcccaatgacagatggtttttaatctttgctatttggcttctagaatgggtatgtattactaactcatgtattttctctaacatgtagaatctgattctg

SEQ ID NO: 220018 - DNA, 427 bp, Homo sapiens
tctctgtcagcttctttgtttggttctcataacattatacataaagcaattatgcaggctttcttacccatacataagtgcctaattcacacagcactgtctgtagtccattcccatgaggtttgcccagtgacaggtcttttttcctcctcccattattatacactgaaagaagtactaagtggaaaatacctctatatgcaatgtgttaaaggcatttcgcaattacacctacggcactttaagctcctcaaaatctatgcatagtgttcttcagtcaatcaataacactggttggaagacaaggcaaaattgtcatatataatttttttaatggtctaggtttgagtaaccctcatttatggctatttaagaaaatatttttaataaaaggaagttttgagagagatggccatcttttaaactt

SEQ ID NO: 220019 - DNA, 754 bp, Homo sapiens
ggggggaagggtgggagggtgcagagcaggccagctacccaaatctctagacgccttgcaacaattcgcaacggaactgttctgagccctgtttcatctcactcactctacacgttttcactttcattgcatttttgcaactcctttggaccaatccagagatacagccacaggagagagagaggcaccctgggagcaaacggtggtgttggggtgacagagagagagaaatccccacagcaattccaaataaaagtcgtccccacttagtaacgcatcggaagaagggcctggagggaagacaggagaggagagggtgcagcaagccaaggccctcagttgagagcaaaggcggtgcgaggtcccccacactccttacccagggagccgccggggtgcccctgatgctgatatgtccacaagctgccaacccagagggcccagagcacataccagctggaggatgagtggaaagaaggaggagaaaagtccatatttatctgtttttataacctcggcctggtcttattttttctattaagtacaataaaatgggtgagcttgcagtgaacaccacacaaagcaatgttcagtgaggtctagaagcgttcggccgaggaaaactgacaagacaggctaatgaaccgtacagacagggagaaaatagccagcatttgctagatttcaaactctcgctgtctttcttagaccacctatcttggatttattcctaataaaataagaaataagcaga

SEQ ID NO: 220020 - DNA, 386 bp, Homo sapiens
gacttatacatgcatttgagacagaaaattttaataacaaaaactaagtttccccagggttgataccctgatggagcttaccagctaccttagatacaatccttcagcaactatgctctttaaatcagtgagcttctttcattatttttattttgaattttgtttttttttttcacttctttatcttccttcaagttatcctaccactccagtaaaggaaacaattacacacactccttttttgggggggagagtaacatctgaaaacagaagttttttgtttgtttgttttgttttttgttgttgttttgttttgtttttgagacaaagcctcgctctgttgcccaggttggagtgcggtggcacggtctctgctcaatgcaacc

SEQ ID NO: 220021 - DNA, 492 bp, Homo sapiens
cacttaattaattttatgagctttggtttcctcatccataaaacacctaccagacagtgttggtctcagaactggagatgatggaatgagcccagcactatgactggcctcaagaaaattgttggctaaacagaggtgcagcccttagagcaggcaacttcagtttttttctcccttccctgtgggcgtggcttcccaatcacccacccaccgagaggcctcctccccagcacgctgcaagggccactttaaggggatcagaaatatacaaaaaccacggggaaacatttggtcaggacctcagcttggaaaaaaatgaaacaatcatgaaaataagtattttctcttcttttttatatgtatgtatttttttatttttatttatttatttatttatttttgagacagagtcatgctctgtcgcccagaggttgcagtgagctgaggtcgctccattgtactccacctgggtgacaagagcgaaactccatc

SEQ ID NO: 220022 - DNA, 194 bp, Homo sapiens
gtttcaccgtgttagccaggatggtcttgatctcctgaccttgtggtccgcccgcctcggcctcccaaagtgctgggattacaggcatgagccacagcgcccagctctagtattgtttctctaaagctcatccacattgttgaatgtagtttatatttttcacttttgtgtaatatttcattgtgcaagctata

SEQ ID NO: 220023 - DNA, 399 bp, Homo sapiens
ttgacttcagtgagtgttgtcatttgggagtggcattccaggcaaaacctttcaccttactcctatcaaggggtcctgcaagaagtctaaagggacactgaatatttgctgtcatagcatgagtgcattaaataaaggcacatctacttcttaaatctttagagattgtctttagctttaagaatttctctaaatatatgttctacttaaaaagtagtcataaagcacaaatgaagctaataaatgctcaacagacattcctttaaggaaaaaaatttgtgaacaccattggatgccaagcagatgtttggctttgaaaagacttttacaaactgttaatgaatgtcaaccctatatttgcttccaagaaaatatgaataaatgttggaaatgttgaga

SEQ ID NO: 220024 - DNA, 588 bp, Homo sapiens
gggtcttgctctgtctctcacactggagtgcagcgatgcgatcacagctcactgcagcctcaacgtcctgggctcaggcgatcctcctgcctcagcctcccgagtagctgagagggcaggcacgagccaccacgcccaggtaatttttaacttttttatagagacaggtctcaccctgttgcccaggctggtcttgaactcctgggcccaagcaatcctcctgccccggccttccaaagtgctgggattacaggcatgagccaccgtgtgcagcctaattactttaaggaccatggtcagtggtgttctggtaaacatgtaacaatcagttctccaaaaaagggatgaggagcattgatttgtaagcctttcccaatttcactggtataaatacttccacggtgcctggtttcaagccaacaacctgagttggaaggagaggcgcaggagcacagtgctacatagtatttccaccttacagataagatagacaaaaataacctgaggagcacacctgatagtaaaatgtagtaaagaaattagggccgggtgcgatggctcacacctggccttgggagccaaggcggg

SEQ ID NO: 220025 - DNA, 382 bp, Homo sapiens
tttttttttttgagacgtagtcttgctctgtctcccaggctggagtgcaatggtgcgatctcagctcactgcagcctctgcctccctggttcaagtgattctcctgcttcagcctccctagtagctgggattacaggtgtgtgccaccacacccagctaatttttgtatttttagtacagacagggtttcgccatgttggctaggctggtcttgaattcctgacctcaagtgatccacctgcctcggcctcccaaagtgctgggattacaggcatgagccaccacgcccggccccaaatgttaatagatcaacttatttgctttatcattcatattctctccctctgcctgcataaacactaacacgtcattcacgttctct

SEQ ID NO: 220026 - DNA, 392 bp, Homo sapiens
tttctcatttatttcacctctgcttggtgttccattgtacgactatgttgcaatttagcctttctattgtttattgacaaacagattgcttacaattgttgactgttacaatggctccttgaacattttaatatatgatgtctatacatatgtttaataattttttcaggttatgtcactaagagtagaattcctctatatatttgacaactttaaaattcagaaagctcttaaagcagaagtacattaagatagcatctaatgtttaagtaatagtgtaactgatttcatcatgtcttttctgagtcagggtttaattgtgtaaacattattaaatgtatcagagacctggttgcctcagggacgtggaaggaagagctacagaatgaaga

SEQ ID NO: 220027 - DNA, 473 bp, Homo sapiens
aaaaaaacaagaaaacaaaaacaaacactatgggaaaatggaaagataggtcacagaatggaagaagacatttgtaacacatatagctgtcaaagtgctcatgtccagaatatataagtaacttttacaaattactaagttaatccaatagaaaaatgggcaaaagacacagaagcacttcaaaaatgacatacaaaagtccaataaacaaaggaaaagttgcttcattagtgatcatcagggaaataaataatattaaaacgacaataatagctctatacattggcaaaaaggatgtggcaaagtgggaggtttcatgcattgctgtgggaggagtataaatgggtacaaccactttggagaatagttttgcattttctcctaaagttgaagataacattccctaccaaagtcaccactctgtacacctccagaagcttcattcatgttgttatctatagaaatgctactgc

SEQ ID NO: 220028 - DNA, 355 bp, Homo sapiens
agtgtatcacaatgtagcagtttaagtataacgcaatcaacaatatccaaagagccaaaaacataatatgagcgaatactctatctcactactaaccagcaaaattaaaaaagatgagatggcatatttgttacccaagttcacgcaaaatttttaagttcaataacatccaggactggtgatggcgataaacagcatgtacagctggtaggaatataaattagtacagctatcttgagaacaaactggcatcttttaaaatttaaaacacccatgtccctatgactgagtaaaattctatttcctgggatcagccctatcttctttaagcaggattcaaaaagatatccattac

SEQ ID NO: 220029 - DNA, 323 bp, Homo sapiens
gggactgcctctctacaaaaaaaaaaaaaaaaaaaaaaaaaaacatataaaaattagtcaggtatggtggtgtgcacctgtagtcccagctactttggaggctgaagtcagaggattgcttgagcccaggaggtcaaggctacagtgagctgttatgccactgcattgtatttagcctgggtgacagagcaagtccccaacttaaaaaaaaaagaattaccagatacaagttatagaatagctatatataaagtatatatacatatatatacctaaagctatcagtataaacatgtaaaatgaacattttaacaaacattttt

SEQ ID NO: 220030 - DNA, 554 bp, Homo sapiens
tgcggtagctcatgcctgtaatcccagcactttgggaggctgaggcaggaggatcacgaggtcaagagatcgagaccatccaggccaacctggagaaaccctgtctctactaaaaatacaaaaattagctgggcgtcgtggtgggcgcctgtagtcccagctacttgggacgctgaggcaggagaattgcttgaacccgggaggcagaggttgcagtgagccgagatcatgcccccgcactccagcctggcaacagagcgagactgcgtctcaaaaaaaaaaaaaaaaagtagactaaagggtaagagatgaggaggaaggaggcagaaataatgcaaggagaaggatacaggcaaaatacagatggcaataacagtgtcagccaatcaattgcagttcaaaaataggccactacacatacatcacacccactgaaacctcacacccagcccttgaggtgcatatgcatccttacttacagaacaggaaccagagatgaagtaagttgccacatgtcatgccatttgtaagcgacagaaacaagatttgaaccc

SEQ ID NO: 220031 - DNA, 441 bp, Homo sapiens
cgtggtggctcatgcctgtaatcccagcactttgggaggctgaggcgggtgggtcacgaggtaaggagatcaagaccatcctggccaacatggtgaaaccccgtctctactaaaaatacaaaaattagctgggtgtgctggcacgcacctataatcccagctacttgggaggctgaggcagaatagcttgaacctgggaggcagagattgtagtgagccaaggtagcatcactgcactccagcctggagacagaatgagactccgtcgcaaaaaaaaaattacaaataaaataaataaataaataaaaataaaaagtcctttggaaatgaaaatgggatttcctaatttaggtgtttcttctttctttctttcttttttttttttaggtgtttcataagtaattctgcttattgtattttcttaaaaatggaaacacacct

SEQ ID NO: 220032 - DNA, 811 bp, Homo sapiens
aaggatttttgtgcagaaatgggtcttttgttgccatgttagtcctccttggaaggcagctcagaaggcccgtgaaatgtcgggggacaggacccccagggagggaaccccaggctacgcactttagggttcgttctccagggagagcgacctcgtcccccgatcctgaccgcccttccggcccacgctctcctgtttggcttccacaggcctggacttctctggcttctctgcccacacactccctgcccccagtgtccctgcccctgccccagcacaggtgacttcatttctgtcctctcagctcagtggactcgctcaacttttgtataagtctccacttggtggtagcagcttgctgatgacttgttttaaaactttcatcctaaataaccttttgatacttgaatatttgtaagttttatacatagtttctaattttttccccaacagatccagatacctaataagatgctggaatgtaatccctgggcaatccgtgtcctggcagcatttggtcttcctctaagcgcctggctccgctgttctcaggagtgggttctgaagtctctggagaacaggatacgtggagggttaggaaggggccaggcctagagacgggagactccctcccggagcaggtggaggcacaggaccattcgctaccccatctgccggcacctgcgggggagcccaggcattctttgtaagccctcctgactacctggctcaaagaaaacagaagcatggaggccgccaagtattttcaagaaataaccccatgaacatggcatcacttttttagaaagag

SEQ ID NO: 220033 - DNA, 492 bp, Homo sapiens
aaggaataatatagggattttatcatatgcataggtttgtgtattgcatcacctccaggatccttgtgttctcgtgcccccgctgtcttcatgttgcccttttataactacacccacagccccaagccctggaaaccactaacctgttctccatttctatcatttcatcatttcaggaatgttatataaatgaaactgtatcgtgtgcaaccttttgggattagcttttttccactcagcataatgccttggagattcatccaagctgttgtatgattccattccacttcattgctaggtaacattctatggtatggatataccatggtttgtttgacattcacccattgaaggaatttgggttgtttccagtttggggctgttaacacacacagtgctgtaaacatttggatacatttttttttgtttgaacctgagcttccatttctctgggataaatgcccaagagtgcagttgttgggttatatggta

SEQ ID NO: 220034 - DNA, 6793 bp, Homo sapiens
tctgaatgaacagctttgcccaagtgactgaaaaatacagcttcttcctgaatctaccggcgtagttgctgaagagcgctctagacaggacatggctctgaagactcactctttggaatgtcctcttgctcccggcttataaacaactgtcccgaggaaagaaaggttttacatagccaaatacagcctgacaaatggcacttcggaactgtgctttctgatgacaacgcgttcgatttctgacaaagcctctcgcacgctgcccctggagggaagtcctaagtaaaactcagaccctccttaaagtgaggagcgagggcttggacggtgaacacggcagcatggcatccgcggggcacattatcaccttgctcctgtggggttacttactggagctttggacaggaggtcatacagctgatactacccacccccggttacgcctgtcacataaagagctcttgaatctgaacagaacatcaatatttcatagcccttttggatttcttgatctccatacaatgctgctggatgaatatcaagagaggctcttcgtgggaggcagggaccttgtatattccctcagcttggagagaatcagtgacggctataaagagatacactggccgagtacagctctaaaaatggaagaatgcataatgaagggaaaagatgcgggtgaatgtgcaaattatgttcgggttttgcatcactataacaggacacaccttctgacctgtggtactggagcttttgatccagtttgtgccttcatcagagttggatatcatttggaggatcctctgtttcacctggaatcacccagatctgagagaggaaggggcagatgtccttttgaccccagctcctccttcatctccactttaattggtagtgaattgtttgctggactctacagtgactactggagcagagacgctgcgatcttccgcagcatggggcgactggcccatatccgcactgagcatgacgatgagcgtctgttgaaagaaccaaaatttgtaggttcatacatgattcctgacaatgaagacagagatgacaacaaagtatatttcttttttactgagaaggcactggaggcagaaaacaatgctcacgcaatttacaccagggtcgggcgactctgtgtgaatgatgtaggagggcagagaatactggtgaataagtggagcactttcctaaaagcgagactcgtttgctcagtaccaggaatgaatggaattgacacatattttgatgaattagaggacgtttttttgctacctaccagagatcataagaatccagtgatatttggactctttaacactaccagtaatatttttcgagggcatgctatatgtgtctatcacatgtctagcattcgggcagccttcaacggaccatatgcacataaggaaggacctgaataccactggtcagtctatgaaggaaaagtcccttatccaaggcctggttcttgtgccagcaaagtaaatggagggagatacggaaccaccaaggactatcctgatgatgccatccgatttgcaagaagtcatccactaatgtaccaggccataaaacctgcccataaaaaaccaatattggtaaaaacagatggaaaatataacctgaaacaaatagcagtagatcgagtggaagctgaggatggccaatatgacgtcttgtttattgggacagataatggaattgtgctgaaagtaatcacaatttacaaccaagaaatggaatcaatggaagaagtaattctagaagaacttcagatattcaaggatccagttcctattatttctatggagatttcttcaaaacggcaacagctgtatattggatctgcttctgctgtggctcaagtcagattccatcactgtgacatgtatggaagtgcttgtgctgactgctgcctggctcgagacccttactgtgcctgggatggcatatcctgctcccggtattacccaacaggcacacatgcaaaaaggcgtttccggagacaagatgttcgacatggaaatgcagctcagcagtgctttggacaacagtttgttggggatgctttggataagactgaagaacatctggcttatggcatagagaacaacagtactttgctggaatgtaccccacgatctttacaagcgaaagttatctggtttgtacagaaaggacgtgagacaagaaaagaggaggtgaagacagatgacagagtggttaagatggaccttggtttactcttcctaaggttacacaaatcagatgctgggacctatttttgccagacagtagagcatagctttgtccatacggtccgtaaaatcaccttggaggtagtggaagaggagaaagtcgaggatatgtttaacaaggacgatgaggaggacaggcatcacaggatgccttgtcctgctcagagtagcatctcgcagggagcaaaaccatggtacaaggaattcttgcagctgatcggttatagcaacttccagagagtggaagaatactgcgagaaagtatggtgcacagatagaaagaggaaaaagcttaaaatgtcaccctccaagtggaagtatgccaaccctcaggaaaagaagctccgttccaaacctgagcattaccgcctgcccaggcacacgctggactcctgatggggtgagactatctactgtcttttgaagaatttatatttggaaagtaaaaaagtaaaaaaataaatcatccaacttctttgcattacttaaaagagatttctgtaatacaggaatgactatgaaggtgttataataaattattctacatactcatttgactggataaactttacataaaattaactaattttttaaataaatgcattgcttaatggtttctcattatgtttatcaaaaaacaactgtagctgttattttcagtacttggctgcttttctgtgaaaattattattttacttttggaagacaagattattagaatattgaagaaaaattggagacttataatcatggtaaatataaaactaaatatgttttaatatttctgaatttttcttttccatcacaatgtaagatatgcagaatacaagatactttggcattctcatgtgaactttctgtactctttaaggattattttattagtgttgtttaagccatgagtgttaagtagcaggtgtgttgtgagtgctgtaacccatgaaaggaaaaatgtcattctgaggcttgtgcccttcgtaaaatattcattaaagtacattcacactatttttgctttataacacagtctttaattttcactcactgtggaaataaaaactaaggtaacttctcagaaagatatcaaatctcagaaagaatgtcaaatcagatgaagttatagttaggattctaactactgtaaaagatttttgcttccctcttgtggtaaaaaaaattatattctcacacatttcttttttctctacagacggatatctgtttaggaaagatttgaaagcagattatcagtaggtacatggatacatcaagttcatttgcagaaacaaataactgaaataaaaaacatgttaatccttgtatcatactttaatatgaaagtattgtttatagataatttatctcacaagtcaaaaatgaagattttgcagcactgaaaatctattaaagctccaaattttaagtttctaaataatcttcgctgaaatctaaaatatactataacaaccgtgttttatttgtgaaaaaaatattaaagtgatttgctctcaaatatcaaattttcttctctcttttatattaagagacagaaaattgtttcatgagttcacttaactactgagatattcagagcatttttacctctctcttaaatgttataaaaaacaattgtatttttaagaatgtttatttatcaaagtctttccttcttctattaaatatttagcaattacctttctaaaatatgaaattttgtaagatgttttcacctaaataaaaattgaaagcaagtggattacacaggagaaccattatgaacatttatttagatattaatcttaaacagtgtttatttcagttttcaaagttagcttataggttatacatttaagttaaagtgctcataatcacttgcaatttcattgtaaaatgaacaaatacataaatattttaagaaaaatttaagtttattcagataagtcaccatgcttcaaaagatctaagaaatgcaaatatactgaaaattgacatcctctgaaaattccacttgctatttacccaagaatccactggaggtcattactgccattaaataataactgaaaagactatgtagtgaaatgtatttttaaaaactatattcagtaaaagcctgctcaatttggagaaatagaaccacaaacacagatcacaggggccttacaaagtttatgtctgaacaaataagtcaattaagtacactttattgaaaattgccttccattaacacacaagaaagaaagcaggattttctcctgtatctgaattttaaaattaaaaaggcagataagacataaatagttatcattttaattgcaataacacagacaagtagttaatgatgataacaatggtgtaacttgtaaactaaatatttggtaactgaagcaataggcagaggaaaatagcttttctatgacacaagtcataagaagtccatatactgaagagcgtttgattaaaataaagtgactattaaccagaaaagaaacattttacataaaatgctaaaatttattataggaaaataaatcaaacccaaagaaagtttattcaatgctaatttgaaagaaaattgataagaaaactttgagggcccaagtccacaatttggtgagaccactaaattttacatataattatacacacacatatgtacatatatatgtatataatcttgcttcccgcctgtttatggcagtactgaagagaaatgggaaagaagagggagggagagagaaagacgaagggagagagaaagcagtttccaaggatatgtttcatgtcccaccattttctcagtttctccctctctctcccaacacacacacacacacacccctcacatactataaaataaatcttcactgccctatcaaaatacaaataaatcaatctatgctgttctgtccttcttgagaatctaaaacataccacaaaaatacatccccagtcttttgttctgtctgaggttagaattaattcaaattcagaatctgttgtgagaaatgcccaggctttaaaaattaaaaatggatggatcttctctgaactcagggagggcacatacttagatacctacaagacttggaggaattaagagttcacccttcatctcaccaaattttccccatttttctctttcttgtagaaggagagaaaccatgctctctagcaacattgagcaaaaatcataaccactcatctaatttctaagaggcacctccatcgagggccggtctcctgcttctttagacctcttctatctttgttacaggagaggacctgtggatagacttagttttgacataaaacaatgcccattcacctcctccttcagcacaacgtcacccattgggcaagagatccagatttgttaacaaaaaagattttacttcgtgattccacgtctataattctatattgctaattttttcttttgtgtgaattactgaatatttcagagcaaagctatcaacttggagaaacagggattaaaaataaggataaacactaataagagctctagaaaaaagggaacagaaagtctgcctgtttagtaagtggcaattccatacatattttagagttttttctatctaaaattagttaaatacttagaatgtttgtaatgagtgttcgatatttgctataggttttagggttttgtaaatcttcatagtaattataaacatttgtaaaatttgtaaaatactataagtcattttgagtgttggtgttaagcatgaaacaaacagcagctgttgtccttaaaaatgaattgacctggccgggcgcggtggctcacgcctgtaatcccagcactttgggaggccgaggcgggtggatcatgaggtcaggagatcgagaccatcctggctaacaaggtgaaaccccgtctctactaaaaatacaaaaaattagccgggcgcggtggcgggcgcctgtagtcccagctacttgggaggctgaggcaggagaatggcgtgaacccgggaagcggagcttgcagtgagccgagattgcgccactgcagtccgcagtccggcctgggcgacagagcgagactccgtctcaaaaaaaaaaaaaaaaaaaaaaaaaaattggtttggctggggaaccggtggccaataactttttaaaaagtcttgttgggtcacgaattttggggcttccccgagaaaaaggggtgctgtttgtattacataaaggaagggccgcaaaacttttattataaaaggaaaggcggtctacagatgggtccattttaaaaagggagcctattttcgcggggcaacgacgtgggcggtggagaaccagattttaactatatgatttgccaaaaagcaagcgttgtttggtacgccggttcactaagcgggcgtggtgtacactttatctgggaaggaagcttaattgtgggctataatacaagtgggtccggcgggtataaaagggctaactatagggcacaaccataggggggggggtgctatggtaggatgctgatgggagaggag

SEQ ID NO: 220035 - DNA, 548 bp, Homo sapiens
ccgtgtgcacggtgcacgaggacccggcaggcagggtgccggcgcagcaggttacagatgaaaggcaggaccatgagcagggcctcagggggagccgtcagggccaggcgggccagccgcttggcgaaggcggccaccaggtaggcggggaggtgggaggaggacaggaagaggtcagccaggtggaagaagcgggcgcggtacttgacgtgaaagacagaggggtccaagaggcccgtagagcttccggtagaagtcagggtactccaggttgtgtttgtgaatcaagatgaacagcccgttcaaggccaagaggctgagggccccccaggaagcgccaggagccggagacctggctcgcctttccgggcgctgcgtccgtcttcgaccgccagggcccgcgtcctctccccggccacggcccaccagagggaccccgcggcgggtcctggctcgggcgcgtccttctgcgtccgagttcccaggttcccggccgagctgcggagacggacgcggagccctcggggaagacgaggcggcggcggccg

SEQ ID NO: 220036 - DNA, 491 bp, Homo sapiens
taccccgcgttcggcggctccccgaatcccgcagaaagacacgtttgcagcgaaaggctcttacacaccagccgggattttattcgttccctaccgagagtgcgctctgggagcgcgggaaacaaggaaaacgcacgtacctggcggcgctccgagggcggcctcgcgggccctccgctggcgaaggcccccagaagccactccccgcccggctgctcgccccacggccagtccctccctccccggcgacgcaccccgccgagccagctcacaggaagcgccaggagccggagacctggctcgcctttccgggcgctgcgtccgtcttcgaccgccagggcccgcgtcctctccccggccacggcccaccagagggaccccgcggcgggtcctggctcgggcgcgtccttctgcgtccgagttcccaggttcccggccgagctgcggagacggacgcggagccctcggggaagacgaggcggcggcggccg

SEQ ID NO: 220037 - DNA, 664 bp, Homo sapiens
gaacagcaaagagatagttgtctgcaagctcattaaaagctttaaaaagaacatgagggacaaataatttcttagtcctctgcaatttaaagatcaaggtgatagtacagaaaacacagatctgtgaggaaaacgctaaagttgacagtttaagtacctcaataaaaaatgaaaaataattttaaaatcaaatgcaccattcatttaaagacaaaaactacactgccaattcaaagccaccaaaaaatgaaagttacttttaagaaattgacttttaaatgccaaacatatatttttcaatagttatagtaataatcatttaaatatatgatactgaaaatgtataacaccttaagtggtttatttttcacactaagctccaaaataagatttttgcttttggaggatgtggttcttctccaagatatgagtcaatgaattgaactctttccctcttgtggttttggtactgccaaaatccaactctcaatgtgttttcttgcatcaaggcatgagaaaagagaagtcttagaaaagatacatctaattcctaactgccttccactggcaatactggatatatgataccacctaattgcaagggatccagagaaatacagaccctgactaggcagctacttcccagcaacaacttagcactgtg

SEQ ID NO: 220038 - DNA, 478 bp, Homo sapiens
actgaattctctatctacaggttcaaaccccatattagcattttactctccctagcatccctactttgcatattatctgtcctcgcacatcactcttttagagcacaggcactgagcactccttatctatgtcagcacatgcctctgaagccagcagcagaggacaagctatgatgcaagggaagacattacatggcttgatgggtagctctatcctctgatgaatgagaattttccagttgtctgaaatcataatttccagtgagatgtgggatcagtcatgtctgtcctgggtctgaactagagccggtctgtgtgtctcaatgctctggtcagtagtgcagtcagaaaagcaggagctttagagccatgctggtatgaattctaattccagttctgccacttaatagtcaggaaaataattactttccaggaggcttggtttactttcctaaggcaagaacgctaagtggaaaaa

SEQ ID NO: 220039 - DNA, 399 bp, Homo sapiens
ccaagaagtcccctgccctgctaaaacagaatgagaatgacttttgggtgcagagggtatttgtattttttttcaaaagctccttgagtgggattggcagattcaaaatatacaaacacaggttggccgggtgcagtggcttacgcctgtaatcccaacactttgggaggctgaagtggacagatcacttgaggtcagaagttcaagaccagcctggccaacatggtgaaacctgtttctactgaaaatacaaaaattatccaggtgtggtggtgcatgcctctaatcccagctacttgggaggctgaggcaggagaattgcttgaacccaggaggtggaggttgcagtgagccgagattgagccactgctctccagcctgggcaacagagtgacagaa

SEQ ID NO: 220040 - DNA, 287 bp, Homo sapiens
tctttttaattttagtcattacagtgtgtgtctagtggtgctggatattaataatattgagcacattctaatatatgttagccatttggacatcctcttttgtgaattgtatcttcaaatccttcattcattattctactgggcagtctgttgttttcttattgggtgtagaattcattatgaattctggatatgagccctttgttggatatatgtattgcaagtagcttctctcactctgtggtttgcattttgttgtgtcttttgatgaacggaagttctttttt

SEQ ID NO: 220041 - DNA, 89 bp, Homo sapiens
ccttgtaaagacatgtgccaatttttctgtgctttctaaaatcattgaaccatttattcacaatttgcctttaaacactttttttccga

SEQ ID NO: 220042 - DNA, 404 bp, Homo sapiens
taaggtaagtgatggaagtcagactcaaaaggctacatactatatgacccgatttatataatattctggaaaagtcaagactacagagatagaaaaacagatcagtggttgacaagggttgcagatgagaggagaggattgtcaaagaaaagtggaaataaagccaggcacagtggctcatgcctgtaattctaacacattgggaggccaaggcaggtggatcacttaaggtcaggaattcgagaccagtctggccagaatggtgaaacccggtctccactgaaaatacaaaaattaggccaggcacggtggctcatgcctgtaatcccagcactttcggaggccgaggcaggcggatcacgaggtcaggagatcaagaccatccttgctaacacggtgaaacc

SEQ ID NO: 220043 - DNA, 470 bp, Homo sapiens
gtactcttaatacattggaggactttgggttggaagaggaatatgagagccagtgctttgagaatgtcttctttgtactgatcaggattccttaagaaagcttgctaaaattcctcatagcaagtgcagtgtggctttgtactagtgtcctaccaagagctacccttgatcccttcctcctagcaacagaagtcattagtctttagagagtgaaaaggactctcaaagacttgcagattcctagaaatagaatgccttctgtgtgtctgggggttttcccccctgaatattaagtaaagataaatctttccaaattttagcccaacttttttatctatactatttaatatgtaaatcagctatatacttgttcagtgtatgtctatctctcttcctgtctctccgtacatattttaaataaattttttcctgatgaaaagttatgagtggtcattgtgaaaatttggagg

SEQ ID NO: 220044 - DNA, 761 bp, Homo sapiens
caagccaaggaaccccaaagattgcaaccaccagaacctaggaagaagcacagaaagattcttccttagagctttcagaaagcatggaactgccaatgccgtaatttcagactgttagcctctagaatggtgaaataataaatttctgttgttttaaaccatcccaagtttgtagtagtttgaaatgaaacctgtaggaaactagtacacttgatgttgggggtggtatgtttgcttttagataatttaaaaggaaatgtgttgtaactattgttggtagaaagattgatatggaatcttggcacatactttcttccttgtgttcacaggattaaagtccactccttttcttttggggaaggcagaaattggagcagaaaaatgaatactaaaatcaagactaaattaaaaaaaattaaaaatcagactgaaaccagaggcatcaatgtttaaaagacacacaaaaaaggaagtggtgtgggacttatctcattcgaggagaagtagaaattcttcagaagggaattggagcttctggaccagggagggacctaaagaaggcctgaggcttgatgattagaaagcataatggtggttgagaggaaacaagacagtgttggagtgggatgcctttcaaaaatacacttcttcaccccttcttttatagtataaatgcactctttatttagcgtatgtttacttcatacattttggatgaaatttggaagtagttttcataagtaaaagaactgctcaagcta

SEQ ID NO: 220045 - DNA, 434 bp, Homo sapiens
tctcttccccttccctaaggaacttcaggtaagtgtagatcagatttcagatctagtgtttctagaacttatttcctcagtctgtattctcaacttctagcaaatggatatttacagagcattataggctctggaactagaagatactgcattcttaacaatataacaataacatagcttaagcacttatcaagttatatggtagattaccattagtaatacattgaaatatattaaatttagtttttggcaggctggataaacaccctactaattttctaaatttgtaagtagaactcttcatattttgattattcatgccaatacttcctcttcactgtatactaaactgaatgattaagattcatttgctcaggagcatgaacatttatgaacttaaattttgtgataaaaaagctatttaacgtcgacgc

SEQ ID NO: 220046 - DNA, 301 bp, Homo sapiens
ggtgggatgttaggtaggacctatttacttcttggaaatcttccccttccctctctaaatatcctcctaagaaaaaagtctaaagacatgactccctggcttggcctctaacgtcgtgtccggacaagtgaggaggcctccagaagccctgggggacctgctctctgggaagctgaggtcattctcctctgaagtagcaggccatgaaatacatctcagtccccgacaggcaggctgctcccacgtatcagccgaatgaacatagatggtcacccaccctccctccaagaaaacctgcttg

SEQ ID NO: 220047 - DNA, 296 bp, Homo sapiens
gtatgctcagtctattagtggactaacagtggaaataaagacctattggaaataaattgaaatcttgaaactaatgatagtggccctgtgacatttctgaatgtaaaagttgggtgtgacttccagttgtctccatttggggagatatcgaatgcatttatagttatatatgtactaatgaatgcatgtcaggtagagaaagcttttaaattatgtatagaagtatatgtagatggagcaactaaggtgaaaggttttgtggagtaattaaaacttcccaacatatccaacaaaat

SEQ ID NO: 220048 - DNA, 295 bp, Homo sapiens
gttaaggaaattggtgtctcaactttggtgctatctgtagcattctgtccaactcaggcatattggcctgggtgagtgataatcttttctgaaagtacagtgtttgaactgtactctacacactttacttgtatttatctcattttattcatcataaaaccttccaggattggggaatgcaggggtccttattattaactctatattatatataggataattgaaacttagaaaggtgtatcggccgggcgcggtggctcacgcctgtaatcccagcactttgggaggccgaggc

SEQ ID NO: 220049 - DNA, 817 bp, Homo sapiens
cattgcttataaaaagtcatcagctcagctacctgcatttgggagtctgggtgttgagggcggggatttatacagcacctggccttataagttgagtattcatgataggtgaagaggtgaagttttttgttcatgagaatcactaatgaaaatcagttgtttagaatgtgaagggcacagcctacactgctaaaacactccccctagtgggagtttggtagaatacaaccaagccccctgtgtccaaagagggagttggcctttcattgtactccgggtgatctctctccattatccgcgcaaaggaagggcccgagagcaggaacaatttgatcttatatttctttgggttttgtttcaaaatttattttactttctttaaagctctatcatgttaaatatgttctgtgcagttaaaataatgcatgttctttgctgaaaaaaaaaaaatagaagtgtagtctaggatatactggggacaaaggggaagtaaccagagattaaaccttcttttaaaaattaccagtcgggcgtggtggcgcatgcctgtaatcctagcccttttagaggccgaggaaggtggatcacctgaggtcaggagttctgagaccagcctggccaacatggtgaaaccctgtctccactaaaaatacaaaaattagctgggcatggtggctcacacctgtaatcccagctacttgggaggctgagacaggagaatcgcctgaacccaggaggcagaggttacggtgagctgagactgcaccactgcactccagcccgggtgacagagcaagactccatctcaaaaaaaaaa

SEQ ID NO: 220050 - DNA, 950 bp, Homo sapiens
tagaacaaagacattcatgtaaaggaagtcattcacaagtgtttgccaccaaattataaatttacatttttttagccagtaaatagaagaaacaacctatggtgtataatcaaatatattacaactcaagtgggtaaaattattaaaattaccaggaagaagaaaaatctaattaaaaaataagtggtacatcagatgttaagtgaccttagccagctcattttaacatctgagcctcagtttcccctacagaacagggacagaagtacctactatacttaaaatgcagggctgaagtaatctcttaaaatttgtcatgaaagctataaagtaccacgtaccagtattctgtatattacatgttttaacttgaaaaaattaaacttacacaaacagtatttctttggtcactgacactactatgtaataagtagaaccggcagtttagaacgaatagttcatgagtaatatactgtgtggtaggaagtggtaggaactattctttacccttgcaaagcaatcatcttttttttttttgagacggactctcgctctgtcgcccaggctggagtgcagtggcacaatctcggctcactgcaagctccgcctcccaggttcacgctattctcctgcctcagcctcccgagtagctgggactacaggtgcctgccaccacgtccagctaatttttttgtatttttagtagagacagggtttcaatgtgttagccaggatggtctcgatctcctgacctcgtgatccgtctgcctcagcctcccaaagtgctgggattacaggcgtgagccaccgcgcccagccataaagcaatcatctttaatacatgctgttcttcatgtgaaatgtctgttacaagagcaaattcaggagctgtacaacatactggcattacgttaaccgtcgacgcggccgcgaatttagtagtagtaggc

SEQ ID NO: 220051 - DNA, 421 bp, Homo sapiens
aaggcacagtgccagaggtctgtggagagggggtcaagcacctgggttcctgaagaacatggaggtgtgggagtgattccagacagctgggatgtgcagagcctgagagagtgccagggagcgggttgggagttgaaagttgggtgtggtggctcacgcctttaatcatgacactgggcggcagaggcgggaggatttcttgaggacaggaattcaagaccagcctgggtaacatagcaaggccccatctctactaaaaataaaaaaactaacagggcacagtggtccaagcctgtagtcccagccacttaggaggctggagcagaaggattgctttggcccagtagatcgaggctacattgagccatcattgtactccactgcactccagtctgggcaacaaagtgagaccctgtcttaa

SEQ ID NO: 220052 - DNA, 443 bp, Homo sapiens
tatgcttctcacagacaacgtggttcctactgtcagatcacatttggggcgggaagggtggttttttaaaaaaactcgtttttatgagcaggctatcttgatcaatagcaaactttttttaatggattagtgaaataaatgtccccatgcatcatttatagtctgtttctttctccgtgtggaatcaagataagactgccagcactagacggtttctgttagctgctgagaccagggcctcaccttgctcaagctagtgggtgaatttgcaaccagctaatactcttccttggtttgtttccactttttatctgttggttgttggctttcttttccattctgtattttctatctgactctgtatactgtataaagcagttttttcttgtctgtttatctttcttcaactggaatatttacaataaaacagaaacaaatcctga

SEQ ID NO: 220053 - DNA, 247 bp, Homo sapiens
ccagctccgtctctcaccagttatgtgacttcgtgaagcacccaagtttccttacctgtgaaatggcaactcgaacatctctagtgctgagctacagtaaaggaccacttgggacaacacctgcacgtcctaagtgctcaaaaatggaaactgctatatggtaaaatagccctatacagtccaaattcctgtgcctgacaaaaaggttttttgaataaatgaaagattcatttctttcagcccacgg

SEQ ID NO: 220054 - DNA, 364 bp, Homo sapiens
ttcagctcggtaccggaagtgaaacgcagctgcaggagacggatgcaggaacttggggcagtgagggatgcccaggcctctctctgggctgcctactgctgcgtgattccagggatctgccacctccacggccatccatcccaaggaattgtttagatgttaaaatccacagcacgttcctttgctagagtctccaaggttaaggctattagggtggtaaatctccatttgctaagagaagcgggaagatccgtacacagggtgaccatctgagaaggagctatgtttttaactaaagaaaaaagaatgtcaggcgtagtggctcatgcctgtaatcccagcactttgaggggaaaagaccctg

SEQ ID NO: 220055 - DNA, 1998 bp, Homo sapiens
ctggcccacctccagaagtatggctatctggctttccacaactgaccaaaggtacaagagcaagtccggcctggacgagctgagccgcacaagatacagactcagaagcaaaaatacaagtgaaataaataaaatgaagtttggtcatttaaatttgtgcttctttgcaaggcaccgtttttgcagcagtggataactggcaaaacaactcacttgtcattattctaattttgataaaagtgaagaatctgaagctttctgacttgcaaaaggatttgtcaggtaagtaataaagctcggggaaatttaacaactagtttttccaagactcaacaaatgactatttgttgctatgtttttagttagaagcaacttttaaaaaacatacagagaaataattggaaaaatcagtgttgttcacatcaatgcacacttgtaacacaatgtattttataaagtatcacattctttgaaaatatttgcaaagttgcagagttcgcttattcagtttatataaaaatataaccaaagttttggctgggcatggtggctcacgcctgtaattccaacactttaggaggccgagggggcggatcacctgaggtcaggagttcgagaccagcctggccaacatggcgaaactccatctctactaaaaatacaaaaattagccaggcatggtggcagaggcctgtaattccagctgctcggaaagctgaggcaggagacttgcttgaacccgggaggcagaggttgcagtgagctgagatcgtgccactgcactccagcctgggtgagagagcaagactctgtttcaaaaaaagaaaagaaaagaaaattaaaataatgtttaatacataatcccaagtaactgcaagagtaggagaaaagacaatagtgataccaacatggacaagtggtaacagacttaacacacctaaaaagacaaatcctaaaccagcagcagagaactggagaacaaaccaatctgtagttcagggtgctgaaaagacccaggaattatcagcatcaagataaagagtcattagtgctgttcacccactatttatgggttctcctctgagtataagattgtacatttccacacctctgaagtaaggagcggccatgtgacttactttgaccaagaagatgtagtcagtcctacttgtggatgttttggatggggtatattttacaaaattcccttttcttctgccttggcaaatatgaaagcacagagacagaggctcccttaggttgggtactttgatggatggcataccacacaactttgttctttgaaggcagagatgatttggatttgcttattaccaatatcaataatctatcctggcacatgcagtcaggtatctcaaaaccgaagatatgggaagaatggtaaaagaaagaagacagaatgacagctatataaaaaagttacatgctttgttccaagcccactcttctagcactgaacagttttcttcactcagctccaaggatgagggcagtcagacatttactctccacagaagagaaggaaagaatcttccgtggaaaatctggccagtttaagaagaaatatatgacaatcttactatcagaagctctttagaaaattgtgcagccacatcatccaacagaaaagctcaagtttaacgagcatcacggcttcacactcacatttagaatttccaatcagcttcttaatcacttcttcttaaatctgagcagatcatctgagaaaaacctctaccacaaaatgtaatgtcagaaaaaaaaaagtaaaaggaacttggagaaaatcaaattattcaaggaaaagtaaacatgtaaaaaatactatcaacattctcagagcgataaggaacctgtttcatccatgaagcaggaacaaatgctataaccaagcaatattcagagaacaaaagcccactaaaacaaaaaactttaatagattttttttagatgttaaatttaaagatttcctaaaaa

SEQ ID NO: 220056 - DNA, 740 bp, Homo sapiens
gaaagaaggaaataaacacaggcaccaaaccactatcctaagttgactgtcctttaaatatgtcaagatccagacttttcagtgtcacctcagcgatctcaacgatagggatcttgtgtttgccgctattccagttggtgctctcggacctaccatgcgaagaagatgaaatgtgtgtaaattataatgaccaacaccctaatggctggtatatctggatcctcctgctgctggttttggtggcagctcttctctgtggagctgtggtcctctgcctccagtgctggctgaggagaccccgaattgattctcacaggcgcaccatggcagtttttgctgttggagacttggactctatttatgggacagaagcagctgtgagtccaactgttggaattcaccttcaaactcaaacccctgacctatatcctgttcctgctccatgttttggccctttaggctccccacctccatatgaagaaattgtaaaaacaacctgattttaggtgtggattatcaatttaaagtattaacgacatctgtaattccaaaacatcaaatttaggaatagttatttcagttgttggaaatgtccagagatctattcatatagtctgaggaaggacaattcgacaaaagaatggatgttggaaaaaattttggtcatggagatgtttaaatagtaaagtagcaggcttttgatgtgtcactgctgtatcatacttttatgctacacaacc

SEQ ID NO: 220057 - DNA, 429 bp, Homo sapiens
taaacttcaacagttaaattaacaaaactgctcgccagacacactacgagccacagcttaaaactcaaaggacctggcggtgcttcatatccctctagaggagcctgttctgtaatcgataaaccccgatcaacctcaccacctcttgctcagcctgagggactctgaagctgggagtccatgctgttggatgctagcatctgggagtccatggtgttggacgctagcatttgggagtccatggtgttggatgctaatatatgggtctccatggtgttagaagctaatatatgggattctggggccatcaagggatccactcctactgttacagaagtctcccccactaatgtagtaggcagctcctgtgctaccgtacttataggattccagcgctgtcgtcgagggcacactccagggaatgcgaca

SEQ ID NO: 220058 - DNA, 439 bp, Homo sapiens
acacaagataaaataaagaggacaaaaaggaataggagttacatagaactctggggaacacttcagcttaaaactcaaaggacctggcggtgcttcatatccctctagaggagcctgttctgtaatcgataaaccccgatcaacctcaccacctcttgctcagcctgagggactctgaagctgggagtccatgctgttggatgctagcatctgggagtccatggtgttggacgctagcatttgggagtccatggtgttggatgctaatatatgggtctccatggtgttagaagctaatatatgggattctggggccatcaagggatccactcctactgttacagaagtctcccccactaatgtagtaggcagctcctgtgctaccgtacttataggattccagcgctgtcgtcgagggcacactccagggaatgcgaca

SEQ ID NO: 220059 - DNA, 517 bp, Homo sapiens
ctcagtctctgcctgtgtgtgtctgtcttcacgtgaccaccttagaagaatactagttctattaaaaaatatatatatactacttcttctaagtcaccagcccatcatactgtactataacctcatcttaactaattatatctgcaactatcctatttccaaataaggccacaattctgaggtactgggagttgggactttaaacatatcttctgggggcaagggagatctgcatacaattcgatccataatactgccttgtgtgtttcttttctcagctgattttaatcttaattccttgagttgtttccccttttcaactattacaaacaatgaattttgctgtgtatgtgtcttggtatatatgtgcacacatatctgctgtttgtatacctcagagtgaaattgttgggtcaaatgctaaaatctttttaaaagtagttgtataattttacattgcattggaatgacataataagctatatatcctataataaattgtaaccatgaggctaac

SEQ ID NO: 220060 - DNA, 439 bp, Homo sapiens
ggacccgccgggccagatcccatctctggcgacgcggagaaaaatctggaagccgtcgtcggaggatgaccaaatcctcgctcctctgggagtgcgattacgggcctctcacttcgtaaatcacgcaggcctgaaacgctcacatttgtttaccacgagcatgtttgattttgtaatttaacaaataaaattgcagaggatttttaagagccctggcctggatttaggggaaatctcgcattaattccagctctgccatttccggtctggagaccttggccactttctcttgggaccttgtcttgaagctgtacatccaaggtgcttaccctagctttgcccagccagtatgtttattgggaatactgggggccgtgggggctgcacagataggagcaatgtcgctgtcgacgcggccgcgaatttagtagtagtaggc

SEQ ID NO: 220061 - DNA, 1401 bp, Homo sapiens
  misc_feature (770)..(770): n is a, c, g, or t
tttatattttacccaaacaattagtaaactggtagttgaaaaggaaaggattaagtaatgtagtttctttctccacattctgctgctgcttgaatcccattccaaaacagtttagcatcatatattattaccactctctgaatatcactgttgttgatatgcttaacataccttgatcttcaaaaaggaaaaaaagcgagaaagagaatgagttttggggagttgtctcttttgtctttacatgacacaaagcatgaaacatgttttctttttcagcagtcctttgccatgtgttatgactgaatgttgctccccaaataccatcacaccgggggttagagcttcaacctccagtatgatggtattgaggttagagcttcaacctccagtgtgatggtatcggggttagagcttcaatctccagtgtgatggtactgcggttagagcttcaatctccagtgtgatggtatcggggttagagcttcaatctccagtgtgatggtatcggggttagagcttcaatctccagtgtgatggtactgcggttagagcttcagtctccagtgtgatggtatcggggttagagcttcaatctccagtgtgatggtatcggggttagagcttcaatctccagtgtgatggtactgcagttagagcttcaatctccagtgtgatggtattagggttagatcttcaatctccagtgtgatggtatcagggttagagcttcagcctccagtgtgatggtatcagggttagagcttcagccnccagtgtgatggtatcggggttagatcttcaatccccagtggtggtggttagagcttcaatctccagtgtgatggtattggggttagagcttcaatctccagtctgatggtgtttcgggatggggcttttaagatgtaattagggtttaagatcataagggacctggtctgatggggattagtaggcttatatgaagagacacaagagggcttgctctatctctgactctcccacacacaaagtagaggccatgttagcctatggagagaagatggccatctgcaagccaggaagaaagccctcactagaaaccaaaccctgcaaaaccttaatcctggactcccagccttcagaactgtgagaaaatttatttctgttgtttaagccacccagtctatggtattttgttctggcagcccaagcagactaagacaccatgttcagacagaatttgaaaattacttttaagtttgcaccagaatgtaactacatttgatatttaaggggcaaaagcaggtgtagagtttgtaggaaacctttatgttatttaatccctgtaatcatggtaccctcttgagagtttgcatgtttgaaatatttaaatttaactcactcatgatttttttcaga

SEQ ID NO: 220062 - DNA, 512 bp, Homo sapiens
agataaatggggattcctgtatattgagcacagtaagaaagaagtccagatagatacatgaagctagtttaggaagggattcagagccagggaagaaattttaaccttgacaggataaggatgcagggtgcaggatgctaatcttaacacatcctacatgccaggatgcaggaggacacaactgggaaagagtctggaatcctggtgggcagaaatcaggacgtagagtggagtcatttcaaatagaagttaggccaggcgcagtggctcatgcctgtaatcccagcattttgggaggccgaggcgggcagatcacctgaggtcaggagttcaacaccagcctggccaacatggcaaaactccatctctactaaaaatataaaaactagccaggtgtgatggcgggtgcctacaatcccagctactcaggaggctgaggcaggagaattgcttgaagccaggaggcagaggttgcagtgacagcctgggcaacagagcaagactccgtctca

SEQ ID NO: 220063 - DNA, 567 bp, Homo sapiens
ctcagggcagcaccgttgccacaccagcctcactgtctcagccctgctatctctcactactgagaagaagtcatttccctttcttcgaaatgccatagggtgtcatcagccccaccacacccccctcaccccacggcactccctggcctctgggtaaatggtggctgttggcagtcagcctggcttgctcctcggcctgcggggtggacggaaatgatggatgaattaccaagtttcagccaaggtcattgccccagtgggaatgattcatcagcagatttctcctgtaaagaatctgataatagaccagctgcaggaatgaggggcagaggagggcaattcttagcaaatggggtgttaaatgattctggggttaactgggtgaccgagggaagtatgatgttacaatggaaataacattgtgctgaggcttggtttgtccatctgtaaaatgggagatgaccctagaggccctagcctttgtgactttggcagagagaattgcgcgctgctctggcatgagatgaaggtagggtcatgccctctcagtgccagccccacctgtac

SEQ ID NO: 220064 - DNA, 566 bp, Homo sapiens
gccacacagtatcagctctacctgtggaggtagactaaaagatcggccatgtgagcagtcaaccatggcaggccattaaaactgcacactgaggctcgggtgaaatacagttctcttgtatacggtttctacatggttttagttcctgtggtctactgcagtccaaaaataataaacggtaaatttcagaaataaacattcacctaacttttatacagtatattcttaacaattattctaatttattgttattaatctcttactgtgcctaatttataaattaagccttatcatagctgtgtctgtataggaaaaaacagctatatagagttcagtactatccatggtttcagacatccactggaggtcctggaacatatgttttgtgcataagtggggactgctctgtacgtcatgtgtattgtcacacattaatgctgggaaagtaatactgttcatattactgggagaggacaactggaagctcatatttggaacttgcctggattgtgcctatattagtttcctagggctgctgtaacaaagagctagaagctagggtggct

SEQ ID NO: 220065 - DNA, 474 bp, Homo sapiens
gttagacggagtcttactctgtcacccaggttggagtgcaatggtgccatctcggctcactgcaaccactgcctcctaggtttaagcaattctcctgccttagcctcctgagtagctgggattacaggcacctaccaccatgcccagctaatttttttgtatttttagtggacacagggtttcgccatgttggccgggctggtctcaaactcctgacctcaggtgatccactcacctcggcctctgaaagtgctgggactgcaggcttgagccaccacacctggcctgcctttcattttttgagcccctgctttataccaggcactgtactctctgctttatgtatatttgcatttttcaaatgtggatctgcagacctgttttcaagttatatttaagaatgtcttaattttgctgctcttctagaagatgccctataaccaagtttctatgtttgcatttaaaagaagaaag

SEQ ID NO: 220066 - DNA, 417 bp, Homo sapiens
taaaaatattttttaaggcacatctaaatgccatctttctgcccatccttcatcaatcgtattgtttagttacagagattctggacatttagaaagagttgaaaataaacaactgtatgcaattaagtgtaaaatctgtggtatataatataactaaagggaaaaatcattgagtggtagagttagaagtgttaacaaagaaagtggttttgaacttagtcttaaaaggaaatgtacagtttctattgaagaaggtagtgaatttatactccctaaaggacagcatgagcaaaggcatgtacctggaaacaagggagcatagaatgtaggaaacaataaaaagactaaattattacatggttgttcttttaagccatcaagtctctacatcagttctttttatttaaatgatcagat

SEQ ID NO: 220067 - DNA, 448 bp, Homo sapiens
aaatttttaattgacaaataattgtatatgtttatggggtacattgtgatgttttgatacatatatatttttttaaatgatcaaatgaggctaattaacatattcatcaactcagaaacttactatttcttaaaggtgtttaaaaatgttgtgtgttacaggccgggcatggtggctcacgcctatagtcccagtactctgggaggccgaggcgggtggatcccttggggtcaagagtttgagaccagcctggccagcgtggtgaaaccccatatctactaaaaatgcaaaaattagccaggcaaggtggcgtgcacctgtcatcccaactacttgggagcctgaggcatgagaattgcttgaacccaggaagcagaggttgcagtgatcagagattgcaccactgcactccagcctggatggcagagcgagattctgtctccaaaaa

SEQ ID NO: 220068 - DNA, 401 bp, Homo sapiens
acagtttcatggatggcagatgctggagaaaggcagatatgtgagcttatatcaaaccctaggagattcaactttaaaacctggctctttactcactgggcttgaagattgcagcccagttatattttgctgtttcctcagcagacatttcttctccctgggctttgtggctgtttacatttctgtgcttaattgatccatcctctcaatatcagagataagttggaattagcacaggtaggagcatttctacatgtttcacaagtacttcaatgcaatgtgtatatccatgtattgcagaaggaagaaaatactttgagaactgagcagttaacatgaataaaggacattaaatattataaaccacataacatcataaaaatctaattaaacagtttttg

SEQ ID NO: 220069 - DNA, 414 bp, Homo sapiens
tacatggagtcaagcctgccccccaactcgtgctcagcctgaagctcactgttaccctggccaaccccagctatagtcccacagggcctctcctgtgagtcagtggaccactgcattcattctctggctctagcctagcttgatgtgcttaaaattctcactttgccagcactttgagaggccgaggcgagcagatcacgaggtcaagagatcgagaccatcctgggcaacacagtgaaaccccatctctattaaaaatacaaaaattagccaggcgtggtggcacacgcctatagtcccagctactcgggaggccgaggcaggataatcacttgaacccgggaggcggagattgcagtgagccgagatcgcgccactgcactccagcctggcaacagagcaagactccctctt

SEQ ID NO: 220070 - DNA, 309 bp, Homo sapiens
gtggcgggtacctgtaatcccagctactctggaggctgaggcacgagaatcactcgaacccggtaggcggaggttgcagtgagccaaaatcatgccactgcactccagcctggaaaacagggagactctgtctcgaaaaataaaaaaataaagggggaagaggaatagttaatgatgtatttatcctgtgctcagtaaatctgccttttacataagataaagtaaatagagtagaggaagtcatataggcatttgtcttgggtagacagagcaatgatttctattcttatctttgtcccctgcctgtga

SEQ ID NO: 220071 - DNA, 641 bp, Homo sapiens
ttcaggagctatgaaccatccttccccaaagtgttatcaaactgtgcctttggtggaggcatagctctcgtcggattcttttttgccagaaagatctgtgaacgaaactgctactatgttaactcagagaacagcctccctaataaagaagaggatgtgttcctacaagagccaggttttagttggattgttagtgtgagtgatgaagacctcagaatggctctagaaagaagcccagatctcagctttgcactgtgattgtcccccagcaactttgcattccccctgtatgggaatagggacctgtggattctgttgccatagatccagagattggacctaggaaagtgagaccaggtggtctgacacctacctccagagcggacaacccagagacagagcaggcccctgcaggtgtaggggctggcggcgagaagacagctatgtttacccttgtagactaggaatatcagtatgaatagactagtcctaggctttgaaatgaattttagtgttcattattatttggtcattctaaaaacccctattttgaacctccacttcagagaaatagttctgatgttctcagaaaatgtcaggagtgtatggtgcacagcagtggacaacaaaggaagagaaaa

SEQ ID NO: 220072 - DNA, 575 bp, Homo sapiens
gaggtcagaccctcctcccctgctttggtaccagatctagtggtgaatggatccttgaggcccacaggctttgccctcctccagttacactcacctgtttcttccccttaaggggactgaccccaggaatgtctcccccggctgcaggccacactcaacctccagcaattcatcaaaattaccatttatgcattccgtcctaccaatttctggctctagtgatttctgctccaggtaagctgatcttggctgtgattctctgtattcacttgtttctctggattttagggttgtagtttgccctgaaacctcaatctctgatgggtccaagaaatatcactgattttcagtttgcttaggttttttcttactgcaagaaagcgaataatgacttccacgctctttacatgttggaggtgaagaaattgaattttaaattttattgatttttaattaattaaaatttacatttaaatactcacatggggctagtggctaccttactgaagaatgcagttttaaagttaatcatatctttgtcctcttcctaaactataagatttttagggaactta

SEQ ID NO: 220073 - DNA, 477 bp, Homo sapiens
gacctcaggtgatccacccacttcggcctcccaaagtgctgggattacaggtgtgagccactgtgccaggccgagctcatggtttttcattgtaaaccagggcaggtaaaaactttccttgcaggtaaaacacacctgccaggattaactgtggtaaagagaagaatctgagatactacttagagagtggggcactctggagccagcccatagcagatgatcagtgaatgatatgagcaataataagaggtaatgtttaatgtttctttgtactgacttgggcactgtgccggtggctttgtgtgcttcacacatggaatgcattccatgcatctctgtgctttatgcatttaattctcaaaacagcctcttgtagcattttattacattatgtgtaatacactaaaatatatgatgcatattattattttacacaggaggaccttgaggcttagtaatgtcacactgcttgcccaa

SEQ ID NO: 220074 - DNA, 353 bp, Homo sapiens
atcacaagaacagaacaggaaagagtcacccccatgattcaatcacctcccaccaggtttctcccacaacatgtgggaattgtgggagttgcaattcaagatgagatttaggtggagacacagccaaaccatatcagtatctacacttgtttgttcagagaacaatttcaagtctgtcagcttatcctgcaactgtgcctaaaatatgttccttttttacttaaggctacctggcactgctgtagatgtgtaatatattttgcttaaatgcttagcatgaaagggaagacttccacttttggttgctgtaacccgtgaactttcgccattatgttcagtagactttgtaatca

SEQ ID NO: 220075 - DNA, 517 bp, Homo sapiens
tctgtcttctcaagcacagaccttggtgtcatctttgagggccccatccttgagggcctagattccacatgaaatccatctatgaatcctgctttccagctgtgttacaacagggcctcctctcacctttctcggctggcccaggcctctgcctcagtagggctctaacatgattttcagaaatctcacaggtttttccttgcaagacgcgtgtttcactgtgtctccagtctgcatggatgtgggcgtgtgttgtgatggtcagatggtggagtgagagcagccatagtgtgaggtgtgggtgagggtggccagtcagccgatgagtgggagcgttcagaccggggtgcctggtgcccccataacctcctcggggttcccagggatggcgcctctgacccagcgtgcagcccgaggtgggccccgtgccattcccacttaagcgaagtgtctgttcctctctctgttcaatgtgggttttgtttctgaatatattttctcacacttcttcttcaaa

SEQ ID NO: 220076 - DNA, 641 bp, Homo sapiens
ctccagctgttagtagtagttgaagcattaactgctgttgatatagaaagagtcttttattcttttttttttgtatttttgtatgatgcagttctttttacttcactttagagtagctaccagcatgggatgttttctgtgcacagtctttttaacaaattgttttttctgcatagtactgcagtgttgctttgctaattcctatgtagtcagcttagttctgtcagttgtatttggaatttagtttggaattgttttagcattaaatttacggaagcaatctgaaagtttgttttagaaagttctttttaaaaaattctctcaaactatgcatcaaataaagttaatttttctttctaaaaatatgaagtataaatgtgaagataccttatttttagtatcacctttttaatcttagaaattcagagtatagggatttatcctactagttagtacattcatgtagttttaattgcctaattgtttgaaatttccctaatattatgccgctactcatccggattaaagtgttatgctttcacttatgcttccagtagatgagacctggaaaagataattaattatggattgaagtgaagatactagaacgcatatgtgtttattgacaagattttattaat

SEQ ID NO: 220077 - DNA, 472 bp, Homo sapiens
cacagtggctcatgcctgtaatccctttatggccgggcacagtggctcatggctgtaatcactttgggaggctgaggcaggcagatcacctgaggtcaggagttcgagaccagcctggccaacatggcaaaactccatctgtactaaaaatacgaaaattagctaggcgtggtggtgggcacccatagtcccagctactcaggaggctgaagcaggagaattgcttgaaccccggaggcagaggttgcagtgagctaaaattgtgccactggcctccagcctgggtgacagaccaagactccatctcaaaaaaaaatgatatggatcaatgggttctctcaggtgagaatctgggaggcgcaggcattcagagcttgagactcattcatggttaggagctgggggaagggctgggttctggtccttaagcccaagcctggcttaatcctccttttccataagaaatgctgcc

SEQ ID NO: 220078 - DNA, 505 bp, Homo sapiens
cagctatgatatcaaagtttaccttctctataaaaagtaactgatatggtttttaattctgtcccctcccaaatcttgtgggaaataataatccccagtgtcggagtggggacctggtgggaggtgattggatcacagggatggactttccccttgttgttcccctgatagtgagtgagttctcctgagatctggttgttgcaaaatgtgtagcacttcccttttctctctattcctcctgctccagccatgtaggacatgctggcttccactttgccttctgccatgattgttagtttcctgaggcctccccagccacgcttcctgtacagcctgtggaactgttcaccaattaaacctcttttctttgtaaattacctaatatcaggtagttctttatagcaatgtgagaatggactaatacggtaaccaaattattaagtgcagcttacctttttatagttcgtacattttaaaaataaaatactacagagccaccaattaa

SEQ ID NO: 220079 - DNA, 498 bp, Homo sapiens
acctcacacatgatccttccttcgtgttgagaacattccaaatcttttcctctagctattcagaaatatacactaacttaccgtgaactgtagtcactgtgacatgctattgaacactgggccttgttccttctccctcactgtatttttgcagccaatagccaaatcttgactattattttcaaatagatcaagagaactattatctattgaaagcccaagttgacaactcttttgtactgtgattatggggagaaggaaagtgacgcatgggtcagacgttgggctaggggttctcatctgcccaccttccttaaccatgacaataatcctaggaaggaaatagtccagctttacagatgtggccattgagactcagagcatttcaatcactagcccaaggtctgcaggaaacagcgtggctgagggaacaccagtgggcccacttcaaattctattgtctttcccctcggcatgctgcgatgagatacctgtaat

SEQ ID NO: 220080 - DNA, 675 bp, Homo sapiens
  misc_feature (591)..(591): n is a, c, g, or t
gtgaacactggagataaccaacaaaatatttcaccaagatcttatttacctaagtattccatttttctaacttatttgaacagaggaaaagtccaaatcccttcactataatagcaaatggcaaagtactacgtatttctattttgcagtattactatgaagaagattattacaaatgcatgggctgtgacgataacgttgtagatgtggtcgttacctagaaggttgcctggctggcccagctcggctcgaataaggaggcttagagctgtgcctaggactccagctcatgcgccgaataataggtatagtgttccaatgtctttgtggtctgtctcttgcttcaacagtgtttggacggaacagatccggggactctcttccagcctccgaccgccctccgatttcctctccgcttgcaacctccgggaccatcttctcggccatctcctgcttctgggacctgccagcaccgtttttgtggttagctccttcttgccaaccaaccatgagctcccagattcgtcagaattattccaccgacgtggaggcagccgtcaacagcctggtcaatttgtacctgcaggcctnctacacctacctctctctggtgagtcccaggaccccctggccctaatttcctccagctgcgcacctccgggcctccactggccc

SEQ ID NO: 220081 - DNA, 587 bp, Homo sapiens
tgttcgccatggccggagtcccctgcaaggccccggccacctctcagctctctggctctgacctctccccactcctgcaggctcttgtccccagaaaggctctgttcctcaccaccattcgctctggataccttggggtgtagcccagttgaggatctgaaccaaaaagcccccatctcagagacacagcaatggttgcatcagcactggttctccagctactgccggatgctggccaacttcactggtctggatctgctgaagcttacatgccaggaccttatccaaatctgcggggctgctgatgggatccgccttttcaatactcttagagccaggtgctggacactgccaaccagggtccccttcccactgtagtggcccttactaacttagctagcaggtaggaatctagtcctctttttccatacagaaaaccactttttttttttttttttcctgagatggagtttcgctcttttgcccaggctggagtgaagtggtgaagtggcacgatctcagttaccgcaccaggcccagaaaaccacttttatattaaacagtaaacgctttcttaaaagataaat

SEQ ID NO: 220082 - DNA, 264 bp, Homo sapiens
aaaaaaaaaggtttgactcagttttgcttttcacgtttaggtcagtaaccaactgaaattgatttttgtgtatcttgcaggtaggaatctagtcctctttttccatacagaaaaccactttttttttttttttttcctgagatggagtttcgctcttttgcccaggctggagtgaagtggtgaagtggcacgatctcagttaccgcaccaggcccagaaaaccacttttatattaaacagtaaacgctttcttaaaagataaat

SEQ ID NO: 220083 - DNA, 395 bp, Homo sapiens
gccactgtccgtgggagtgatagaaccccaagtgctgctctcacaactcaacatggtggagtttcactgggacccaacaaagaggacatctctcttcctgcagttcacacctcggaagaaaggtggagagaaaggcatccctttccgcctccagatcgacaccttcaggcccagtgacaaggggctgccgctagaccacctgcactcagctggctgcctcatcaaggtgtttaagcacaaaggagcggaaactgaaaatggaccgtgagaagatggagtttcgctcttttgcccaggctggagtgaagtggtgaagtggcacgatctcagttaccgcaccaggcccagaaaaccacttttatattaaacagtaaacgctttcttaaaagataaat

SEQ ID NO: 220084 - DNA, 478 bp, Homo sapiens
ggaactttgaaattgtcaaactgagagtttaaaataactaatatgctaagggctttcatggaaaatggacagtgtgtaagaacagatgggtaatgtaagcagagacatggaaattaagaaagaatcaaaagagaaggctagagaaaaaagctgtaacagggagaattcctttagtgggcttatcagtagtctgggcaccactgaagaaagaattggtgaatttgtagttatatcaagagaaacttcccaaactgaaatgcaaagacaaacagaagaataaatgaaaatgaaaatacatcaaaatttgtggggtttaataaaagcagttgcttagcagtgttaaatgtatgttagaaaagaaaatctaaaatgaattatctgagctctcaccttagaaaactagacaaagagcaatacctaaagcaagatggggggaggaatcagaaatcaatgaaattaaaaataggaaaaaaataat

SEQ ID NO: 220085 - DNA, 665 bp, Homo sapiens
agctgcagctataagtatttaaataaatcatcaaagggtttgttgcatcagccaagctttttagagtcccaaatttaaaagctgagataaaatcttatcttgctgtgtctttacggaaggatccccagatacctggggttaaggtctggctcaagtcaggacctaggaagcagcatatgttgactggagagacctgggtttgaatcccagctgtgcatgttattagttatatgaccttgggcaagattcacaaccttagcccttctttaccttctcaccctaatctggggtaaacatttgtaccttttggggttgttgcaaggattaaaagaggcaaactctgtgacaatgcctagctccatgctggacttaatataaatgctcaataaattttgacaccatcttctatcccccatatcctacaagataaaacaagacagaatgagaaagtgcttaggtttcttcatctgtaaaaaggtaattggaaaaagaaaattaaaggcagaagctcactcagcctctagggtctgggagatgtcttcttgttgtttaagttttagtctgtactttctaaaaaccagtagtgggcctctggcatttcctggcacatcttagcagataggtattgaatatataccatgtgccacagtactgcgccctttgta

SEQ ID NO: 220086 - DNA, 256 bp, Homo sapiens
tcctgagtagctgggattataggtgtgtgccatgatgcctggctaatttctgtatttttttagtagagacagggtttcaccacattggccaggctggtctcgaactcctgacctcaagtgatctgcccactttgccctcccaaagtgttgggattataggtgtgagccactgcgcccagctgactacctactttgtgttagatattttaataggggttttgcagacctttctcatttaattctcatagcacccacg

SEQ ID NO: 220087 - DNA, 584 bp, Homo sapiens
acccgggaggcagaggttgctgtgagccaagattgtgccactgtgctccagcctgggtgacaaagtgagactccatctcaaaaaaaaaaaaaaaaaaattataaggaacataaaattggttcagcagccatccagccagaaggtggtaagtcacccacaccatttaataaatctgaaaggtagcttaggattcatcaggttcctgaagtcttattagaatctctggaatctgatgagggccccccctgctctcttgaactagcaatgaaagaaaattggatcatcggataaaaattggagctatggtcggccgggtgtaatggctcatgcctgtaatcccggcactttgggagaccaaggtgggcagatcacctgaggtcaggagttcaagaccagcctggccaacatggtgaaactctgtctctactaaaaatataaaattagccaggtggggtggtaggacctgtaatcccagctacttggaaggatgaggcagaaaatcacttgaacctgggaggtggaggttgcagtgagcaattgcactctagcctgggtgacaagagtgaaactccatctcaaaaaaa

SEQ ID NO: 220088 - DNA, 395 bp, Homo sapiens
ttaaatataagtggtttaaatgctctaaccaaagcacaaagattttcagactacataaacaaaatctaaataaatgctgcatatgagaaataaaccttggctgagcacagtggctcacgcctgtaatcctagcactttgggaggctgacgcaggcaaattgcttgagctcaggagttcgaaaccagcctgcacaaaatggtgaaaccctgcctctagtaaaaaaaaaatacaatatttagccgggtgtggtggcacacacctgtagtcccagctgcttggggggctgaggcaggaggatcacttgaacccaggaggttgaatctgcagtgagctgagatagtgccaccacactgcagcctgggtgataaggtgagaccctgtctcaaaacaaaac

SEQ ID NO: 220089 - DNA, 438 bp, Homo sapiens
cttctcagaacagtgttcagacaggttataggaagtgtgatattatagtaaataaataagctttaggataagatagatgagtgcaaattgttctgtcatttagtagctgtgttagttgggaaaactactcatcatctttgagcttccagtgccttcactataaaacagaattcagcatacctacctcgcatgggagtgctgaacattaaatgagattatggattcacactcacataggatggctagaataaataagacagactatacaaagtattggtgaggatgtggtgaaattggagccttcattcattgctggtgggaaagtaaaatggtgcagctgaggcctggtgcagtggctcatgcctgtaatcccagcactttgggaggccgaggtgggcgaatcatgaggtcaggagtttgagaccagtctggccaaca

SEQ ID NO: 220090 - DNA, 556 bp, Homo sapiens
ctcgtaagggaaaaaaaaaaattagaggaagtgaaggcccagtttaaaggaatgggaaggagatggcacacaacgaatgctgccatctctgaaggatgaaggggctgataaagtaaggcctgagtgggaaccttaggactattttgggcaaaaatagttacagccttggtctaagcctgaggaggaaaggaccctgagaggctgggctctggatgtaggttgggcagggtaaagacaaaggaaggaggattcttgggtgctaagcttcctcttttatgaatgagaactaagtggagaggaggagaaatgggatcccagtgcaggcctcagaaggacccgagcaaagctacagcctcttggggaccttatgcatggtaaaaaggtcaagtagaaatggtctgaccattttcattccgagccaaaggaaaggccagttgagagctaaaatcacaaccccctcagcttttgctgtggaacaggagtgcccaaagaatatggagaataaggggaactccaggcaggattggcctaacctcagcctgccttgcttgtgttc

SEQ ID NO: 220091 - DNA, 569 bp, Homo sapiens
agaaagggaagaaagaaatgaatacacacgctctggggtgtcgactgttggaggaaaggctaggataagaatctaagcctcccactccagggctttgggcatgcaatcctcagatgaaccatcaccaaaggaagactcggcaatgtggacaggccttctattgcttaaaaaattgtagctgggcacagtggctcatgcctgtaatcccagcactttgggattacaagtgatttcaggagttcaatgctgcagtgagccctgagccatgatcacgccactatagtccatactatgtaaaggaaatggcacagtaattcttagaaaataattaagaaacggccaggcgcggtggctcacgcctgtaatcccagcactttgggaggtcaaggcacgcagatcacgaggtcaggagatcgagaccatcctggctaacacggtgaaaccccgcctctactaaaaaaatacaaaaaattagccgggcatggtggcgagcgcctgtagtcccagctactcgggaggctgaggcaggagaatggcgtgaatccaggaggcggagcctgcagtgagcc

SEQ ID NO: 220092 - DNA, 425 bp, Homo sapiens
tcagacagtctccctctgtcacccaggctggagtgcagtggtgtgatcttggctcactgcaacctctgcttcttgggttcaagtgattcttgtgcctcagccccctgagtagctgggattacaggcctgtgccaccacacccagctaacgttttgtatttttagtagagatggagctttgctatgttggccaggctggtcttgaactcatgtcctcaagtgatcccccacgctttggcctcccaaagtgttgggattataggcgtgagccattgggcccagcctggaaatatttttttgaaacatgactgataagaatattttttgaaagaatgacagataccaatcatgaaggaaaagattttcacaattgacaataaaaaactttaacttctgaatggtaaaaagagtgagaaaattaaaagc

SEQ ID NO: 220093 - DNA, 562 bp, Homo sapiens
gcattaattactctaatacaggcttcctgtggacttaacattacataattgtgcaatttaacgagaatatgcattcttagacatgagtacagtaactaattagcattgtatttgacaatttgtagcacggttttacagagatgcttcccaacactgtatctttacaatacctcttccattttttttcaaatgtccttgtgctcttctatgctctgaactctaggtttatccacctatgatatacactgtacatgcaataactgattcattcttttggctagagtaaggtttacattaaccttcttatgtgcgatggtttccactattcctgagctgcctgctgatctttaatttttgtttctcaactatttcctcaaaactttttcagctaccctacattttatatccattgtgataaatattagatattggtaagttcaatgctccttttgtacacctgttgtcatccattatggatcaaaactgttcaccagatacaaaatagataggaggtgaggccacagtagaggacacagcatgcattgcaaacctacctacttga

SEQ ID NO: 220094 - DNA, 442 bp, Homo sapiens
aatcccagctactcgggagtctgaggcgggagaatcacttgaaaccagaaggcagaggttgcagtgaactgagagatcgtgccactgcactccagcctgagcaacaagagcaaaactctgtctcaaaaacaaacaaaaaaccagtcatgagttttataagttggaagtgggattgttgtctaaagcttgtcatgataataatcacctttgaacaaacgcagcgggtaccaatgcagcacccaccctggctgtcattcattctaagacacctgataattttgtatgccactaagaaagaaaaaatatgctactaattaacattcaactcgcctgttgatttaaagatgttttctgacttgagagatgttaaaatatgaacactgtgtgtcttaagatggatgaaaaccagcatttcccatgcatggttcctgacttccaaacc

SEQ ID NO: 220095 - DNA, 495 bp, Homo sapiens
cattaggggttgaatttttttgtgttgtgggggattcccctgtgcgttacatgatacttaacagcatccgtcacgtctacccctagatgccatggcacacgctcagttgtgataaccagaaatatcgctagatattgctgacactttgacaatattgagttttcttatctatgaacgttgactgtctttatttttgaatagttctttgatttctttcatcagagttttgtagttttcctcttatagatcttgtacatattttgttagatttaaagctaaatgtttcaattagaaggatgctaaatgttaatgtgttttaaatttcatcttccacttgttcactgtgatatataagaaagtatttgacttttttgtatattatccttgtattctacaagtttgctgaatcacttattagttccaggaattttttttttttttttttttttgtctactctttggattttctacacagacaatcatgtcatctgcaaa

SEQ ID NO: 220096 - DNA, 226 bp, Homo sapiens
aagaactgaatttcagtttacatttaaatacccacacaaggctagtagccaccatattggacagcagcagccctagagcttttattaaaattaaatattcccaaggaaatgaagaagtagtatcagaaacaaaaatgttcgctttgttgtattaaaagtgttcattcctaagggatgtcccctcagaatatctagaagattctttcagaccagatttgagatataa

SEQ ID NO: 220097 - DNA, 581 bp, Homo sapiens
  misc_feature (7)..(7): n is a, c, g, or t
accagcntgcactcccaccaacaatggaggagtgttcctctttctccacatcctcgccagcatctgctgtcacctgaatttttgatcttagccattctgactggtgtgaggtggaatctcagggttgttttgatttgcatttccctgatgattaaggatgttgaacattttttcaagtgcttctctgccattcggtattcctcaggtgagaattctttgttcagttctgagccccattttttaatggggttatttgattttctgaagtccaccttcttgagttctttatatatgttggatattagtcccctatctgatttaggataggtaaagatcctttcccaatctgttggtggtctttttgtcttattgacggtgtcttttgccttgcagaaactttggagtttcattaggtcccatttgtcaattctcgatcttacagcacaagccattgctgttctgttcaggaatttttcccctgtgcccatatcttcaaggcttttccccactttctcctctataagtttcagtgtctctggttttatgtgaagttccttgatccacttagatttgaccttagt

SEQ ID NO: 220098 - DNA, 539 bp, Homo sapiens
acgaacaaaaataattcaaggttaactcagtgataacacttttctattcatccaattataattttctcaaaattccataataaggacacttgtggtagcagtttcataattaaactacacattttcaagggtttcacttatgtatacaccactgggttaaaacttcataacatttttggacctattaattagttggaaactggattgttgtttattagcattaactcaatatcaatcaaaaactgatgatgtgtcatcagattgccatattgtgtcagttttaggaatttatttagaataagtttagcaagaacttagacttctaaaatctgttgaattgaatgcatctgttgcatctttattggtttattaaatcaattttgcttcaagaggcaatttagtgtcatgatgatattagtatacatgataatttggcaaatgtagttttttgttttacttttaaaattgtgcatagaaatagatctctacaaataaaactgatagggaagaattatgcaaaacagctgcaagattttgtt

SEQ ID NO: 220099 - DNA, 540 bp, Homo sapiens
ggatggcagattggagagaggagagacttagactgggaagtcctttaaaaggtgcttagcagtggtggaggcaagttgaaaagttcagaactcagccaacatgagaaaatgggaaaattttgaaagtcatttcagacttaagggactagttgcaagtggatagggaggaagaaattggagatgaagatgggcctgcaggcttttggttggagtaattttgtagatgatcttgttctctgatctaaactcttcttgcttagctaaatggttcctcgttttttctttaaatcaagagatccagagatatgaaattacacttcaggtttaaaccttaaggggaaatattctttgtcaaagaattaaagattagatgccataaaatatactttctgtacactcatcaacccaggtcaggagaaactaggttctggagtcctacgtggttagttctaggaggtaccaacagtctctcaaccaaaggatgagcaatgagtcatcttagaagggataaataagaacatcatatccagatagggaaac

SEQ ID NO: 220100 - DNA, 424 bp, Homo sapiens
tggccggtcgcggtggcgcgcgtttgtcctcccacctcagcctcccaaagtgctgggattacagtgcgtgagacaccatgcctggccaatgagtgcagtttttgtgctgtatgttggttttggttttatcaaaatgtgtggttcctaataggataacttgttttactcctggtgtattatcatttatgtttatattatttgagttttattgttccaatctctaaatatatagcctagggagaatgttttatttttacatctgagttagagatgtggagaggttagtgtaagttgtcagaaactgtatttcagttggtttagtctgtgtttatgtgtatgatttagcggttagtctgttctattgtccttagttgcctatatttcctgtcttcttccttctgtcctttctttctgccttttcttt

SEQ ID NO: 220101 - DNA, 605 bp, Homo sapiens
tatggcagtagttgttccttgatgtaacacttgataatccagataggagctatttcttatcttatctgctctgctcaatgtctgtttttaacctttctattcatcaaactacatacaaaacataaatgtatttcacacagaaagtttgacaattctatcagctggattcaatttttttaaaattatttgaaagaacacagaatgtctctttttggtatagagatatccctaatgttatatccttacattgcaaacttctcgagggtaaaaatctctccaatcattcaacatgtttttactttctattcttgatagtcacacgtggctgttgagcattagaaatggcttgtgcaaattaaaatgtgtgatacatgtgaaatacacactgattttcaaaaagaataaaaaagtaaaaacacctaattaataacttttattcttctaaaccattaaatagtatttggatatactgggtcaaatgaaatatgttatcaatttcacctgtttctcttcatcctttttaatactgtgactactagaaaatttacaattactcaaaaaataaaaataaataaaagtattcacacatgggtcatatttctatc

SEQ ID NO: 220102 - DNA, 236 bp, Homo sapiens
cagtggggtattcattttcagttctgcattttattccattatatgaatacaccataatttacccattctatttggaatttaaaaaacctagaaacaacccaaatacccaccaagaataatgtggcttttaggttatagagtatgtacatgttcaacttaaaagctactgacaaaccttactattcatttttacaactttatttacttatttatttatttatttatttatttgagac

SEQ ID NO: 220103 - DNA, 464 bp, Homo sapiens
agtatgaggatctttataacaatttcgccagagctctaatgcaacaagagtgggtgatgagcgtaacaagtggtggtcaaatggctaccccttaatacctgaacaactataaagagaacaatcagtggccaggtgtggtaactcacgcttgtaaccccagcactttgggaggcagatcccctaaggtcaggagttcaagaccagctttgccaatatggtgaaaccctgtctctgctactaaaaatacaaaaattagccaggcatagtggtgcacgcctgtaatcctagctactcaagaggctgaggcaggagaatcacttgaacccgggaggcggaggttgcagtgagccaagattgcgccactgcactccagcctgggcaacgaagccagactctgtctcaaaaacaaacaaacaaaaaacaaccacaacaacaaaaagagaacaaccagcaaccaagtgttc

SEQ ID NO: 220104 - DNA, 492 bp, Homo sapiens
ttgacctggaagtcttccagcccttagatccatagggctggttctaggcaagaaggtctgtgtctccctcctgagaagcctccgataccccctgactctgggagagacttctaggcatcattctaataacccagcttcaaacttactgcctatgcagagagctgatgtgaaagtatttgcattttgaagggggactccacaggactcaaagaaatgcatttcattttgttttgttttaagatagtctcactctgttacccaggctggagtgcagtggcacaatctaggctcactgcaacctctgcctcccaggttgaagcaattctcctgcctcagcctcctgagtagctgggactacaggcgtgtgccaccatgcctggctaattttttgtattttttggtagagatggggtttcaccatgttggccaggctggtctccaactcctggcttcaagtgatccacctgcctcggcctctgaaagtgctgggat

SEQ ID NO: 220105 - DNA, 260 bp, Homo sapiens
tgctggaattacaggcgtgaggcaccgcacccgggcggccccgctacgtgtgtgtgtgtgtagtatgtgtagtataagaaagatggggtttcaggagttgagtggggacgaggcaggtggccacacagctcggagggagggcagaaggcacccgtcttcgcagagtcacagtggggcttgcctcctatacgtgccggaagggtgaagccccttatctcattgcccgatgtgatgaggtttgaagtggttgagcttggagg

SEQ ID NO: 220106 - DNA, 507 bp, Homo sapiens
ttgggtaaaagtccttcttgtgtagcattgggtttgagtcactcagagaagcactgttgatacagtgccctcctcctcagatgattcatactcagggactttgggcaaatggcccccatcttctcaaggctcagttttctcatctgtaaaatgcagagttgggcagaagatgcataagatctgagcttttgtctggccctaacatcccaggactctagaattgaaaaccatggagagcccctgagctacttcataagatccatccataagatcccagcctggccctggaggtgaacgtccattcttcatgtctgctcagcgcccactccccagtcctctggcttcagggccccatttcctgtgcagcacctctacctctcttacttggtggtgtttggatggggctaaccctcctctcaactccaaggtgagcacatgtcccaggcatagtcagtcaatcagagtggttcaggggtgagcatgtgactcaagctaagtcaatgaaat

SEQ ID NO: 220107 - DNA, 260 bp, Homo sapiens
tgttttgtagaggagacagattggcactgaactttgtggctaatattttagaccatgagataggaaatgtattcaaaaggctgaaaattacatgggagagagtaaatatgatcagagatttgacccataggctgttacctggagaatgcttgggtatacattgacttataactaagaaagatgaatttcaattttctgcttaggtatgctgaagaaaaattaaaagtgtaactccagagaagtaagttcagaaagttagc

SEQ ID NO: 220108 - DNA, 436 bp, Homo sapiens
cagctatccaaggactctgagaagtaaattttagcaggtgaaatggagaagaaagccagaactttaaattccactgaaccagcagtgaatttcctgttttttttcccctgtggtatctcctcgctgatttctcctgggcttgccagaaacccagaactgaaaagtaggggcaggcaaaaatagttccaagaaaggctctctagttctcctctgcaaagaaagaatgagaggcccctttgaatcagagtggaagaaatctcttttttgcttttgttttgttctattctgccccaatcctcttgtaggcctttagcagctgtggcagttaggcagatgtctaaaacaacgagagaagggaatcattttttgtttgttgtttgtttttgagacagagtcttgctctgtagccagggctggagtgcagtgacacgatctc

SEQ ID NO: 220109 - DNA, 456 bp, Homo sapiens
cacctgggattacctcaatgaaatgcatgtcaagactgtaactcggtaaacgtcctcatcctttgcagagaaaaaggacaactcacagctattctggagaggtgaactccatctagcattttagcatatgaaacattttcacacaagttattcacaattgtcctattttcagtgtgaggaatgtgaaaacaaatttgtgaagcaaagatttctttcactgcaaacccgctgaagcaacaccttccaccggctggaaatccaatggctcgaccctcacacagaagtcagaaccccaacagcagccagccagccatactcctgggaattcctgccctaaagtatcagtgactgcaaacccgtagcacatcactgctgtaaccgcagcctattttatagtgcattttaggacaaagagatttttcttgttttttaagtgtttttttgagtaaggtctca

SEQ ID NO: 220110 - DNA, 419 bp, Homo sapiens
aattattaaaggaacacaataacatcagcataaaataacatgaacttgtatttttctacatcagacagaatattgtaggctatgctacataataagttatactggcttcacaaacaaaggctttatttctcactcacatgaagtcctagccaaattttataactctgcagacgagcagttttccatgtggtgactcagaagtcctggcagtttcaaacttgtggctcaatcatctcaacatacagttccttggttgccaactgccaaccagttggccagaacttgtcacatggcatgacccaactgctagggagctgacagatgtgatgacgcacatgcttattcagtaatattaaatgtctctgtcacagcaactaacaaaatgttaaaattcataatgtaaaactggacgatgatac

SEQ ID NO: 220111 - DNA, 360 bp, Homo sapiens
ctataagtaaatatgttaatgctattaggaaccaagattttcagtgtaaaagaaaagagataaaatacaaaatcaaagaaggtaagaaaaaactttaaaacattgatttcttgctctgtttttttttttttttttttttttttagccttgctctgttgcccaggctggagcccagtggcacgatcatggctcactgcagccttgacctcctgggctcaaacgattctctcacctcaactcccagctacttgggaggctgaggtgggagaatcgcttgaacccgggaggcagaggttgcagtgagctgagattgtgccattgcgctgaaggggcaacagagcaagactgtctccaaaaaaa

SEQ ID NO: 220112 - DNA, 674 bp, Homo sapiens
tcctttgtgagaaataggtattgtgattactttttcccagtctgtggcttgccttttcattttcttaatggtgtctttgagcaaaagttttaaatttctatgaagttcaatttgttaatctcatcttttgtagttcatatgttttatgtcttcagagatctctctgtcataggatcactaagatattctcctgtttctttttttgttttttttttttaagaagcaaatagttttaggttttatgtttaggtctgtatgccttcttaaattgatatttgtgtgtgatgttacagaggagttgaaacattttttttcaatacacgaatgcagttgttctagcaccatttattaaaagtctcccctggccccttgaatcaccctggaacctttgttgaaaatcaattgaccatataatgtgggtctgtttctggattatctgttctgtcctgttgatctgtttgtccatctgatctctctttcttttctctacattatgccagtattacactgtctcattactgttgctttatagtgagtcttatggttacatagtatgagccctccaactccgttcttttttgtatgtttaaggttattttagctattctcagtattttgcaatttgatatcagttttagagtcagcttatatatttccagacaaaatcctgctgt

SEQ ID NO: 220113 - DNA, 446 bp, Homo sapiens
tgtgactgggggctgcatgcaccagtaattagattggaacaaaacacgatagggattttcacagtgcatttctatacaatgcctgtaatctatagataacataaccgattaggtcaggggtcgatctttaactaccaagcccagggtgcggcgccaggctgtctgcctgtggatttcatttctgccttttagtttttacttctttctttggaggcaaaaattgggcataagacgatatgaggggtggtctcctcccttactagaagaaggaagaaactcacatttgtcttccccgttggaagcaagctcaaactccataaaggagttacctgcatttcatcgtcatcaaagcaggaaaaacttgcctttcttgcgttggaagatagtaaaactccaaaaaaaaaaggagttgtactgcaaaataaactttagatcttgaccaaatt

SEQ ID NO: 220114 - DNA, 550 bp, Homo sapiens
attgtcatccagaacatgcctggattctcctgcctcagcctcctgagtagctgagattacaggcgttaacggtgttataccatgttagccaggctggtctcaaactcctgacctcaggtgatctacccaccttgtcctcccaaagtgctgggattacaggcatgagccaccacacctggccaccttcctctttttattagctcctgcctagtacaatgcctgaaacatagtaggtgctcaagtagtttgatggatgagtaactgtatgcgtgtcacccttgcctatcctcttgctttctcattacgttattgtgtacagtgttcttcctttctttccttcctctccagttaggttggagctttttcaaattcttagaatataccaagtttactccctaccttaaggccttccacatttgttgtctcaacctgaatgctcttacattagatacagtatggttggctcctttatatctttcatatttctcttcatataccttgtccccagaaacacctttcctgacaaccttgtctagattaacagctccca

SEQ ID NO: 220115 - DNA, 292 bp, Homo sapiens
ctgaaacttctgcctgccttgggattgctggtcaccctaacccaactgggtatgccttggagaggggaggaggcagggattggccgatggctgtcagacactcctcctggtgctgtgggtctgggcatcttagggtgatccccgacaggtgttctgacctcaggcttgtctgtgccactgactacctcagggtcacacttgaagccagttaggggacccctgggtctcagtttctctcatctgcaaattaaagagttctcaacctcactcataataaaagaggttcaaatca

SEQ ID NO: 220116 - DNA, 448 bp, Homo sapiens
attaaaaaaccaaaaaaacccaagacttcataaaacaaagatagggtatactgtaaatgttataaataccagtaatttaaaagtcaggtatagttaacaaaacctgggagttacaggtgagaagaagtgaaggatagtggagcattcatacgttctcactttgtggagaggaaattgagatacttcctaaaattaatgaaaaaataaagagaatttaagcctattatttgaaatcatgaaagataactaataaaaagttatacagtaaccaataaaacctgagagaatggtcagggagtaagcaacaagtgagatgaatcacttatctttcacagtgggtcattgttttaggttgcttagagctacattagtagtattgagaattagatgtagctggtttaacagcagtcactttagtaggtcctaatccttacctaaatcttttatc

SEQ ID NO: 220117 - DNA, 536 bp, Homo sapiens
gtggagtacagtggtatctaagcaggaatgattgatacagatcttttgtggaccatatggactatcttttacctccccctcgtcagccctgtttatactccaacactacatgtcctgcatgggaaaatgggtgtttgatgtttttcagtttatgggatctttagatgttttcacatagcagtctctcacatcttacatatttggccttgtagttcctgaagactttaaacaatcctttagactcactgccagtttccaaacctatcccccttggtaatgataatttttccaagcagctcatttgccctttccagagattttaatgcactgattctctaggcttctgcactggccctggtaacaataaccttgttctttgcaagggataccatcttccttgtatatatctgtgtggcaccactcggaggtgccattaaagtactctcagaggtcatattcacctccactgaggcagcagggtgtggttgctcttggaaatttgcagtgtctgctacagaatccaaatgcacaatctg

SEQ ID NO: 220118 - DNA, 620 bp, Homo sapiens
cagaccagcaatctggaccaaaggctaaaatatgtcataaaaataaataaggttgtgagtcagtttgtccagatcttcacagaaagaggaaacagaacatgaggatttccagaggtgcaaagcataaggtaatttttaaggattcagacaatattcagtatgactggcataaggtttgtgtaggagtctaaccaggggtgaagctagagatctaagtaggagaccacatcattaagcatctttacaatcattataagggcattcttaatattcacacaaaggcaattggaacccacttaaaatcatgtcactccccttccaattcttctgatcctccaatattgtgattggttcttcattttctgctcacttgacctctttccaccatcttgccaccccttcctttgaatggcagataggttaaatagatagcttacattttaaatcttttggtgcattattttctgcatagtgctttgctggggtgatatatttccccctgttatttcaagattcagattttagtcatttctgattttaaaaagaatgatatctcactccataacctatatttaaaactaaaaataaacgtatttttaccattgtataaaaaccttcta

SEQ ID NO: 220119 - DNA, 482 bp, Homo sapiens
aaaaccaaataccacatgttcttgcttataagtggaagctaagctataagtgcacaaaggcatacagagtggtataatggacattggagactcagaagaaggaagggtgggagtggggtgagggatgaaaaactacctatcgagtgcaatgtacattacttgagttatgggtgcactaaaatcctagacttcaccactacacgattgatctgtgtaaccaaaaaccatctgttttcttaaaactattgaaatttaaaagaagaaaagaaaatgccacccatgaaagacaaagattgaggaaatgttccagctgagagaagacgcatgcaagtaaatgcaatttgtgaccttggataagatcctggatgtggaaaataaaaaagttataaaggacattattgaaacaattgataaaaccgccctgtggactttgtattagaaaatgacgttatatcattattaaatttcttggttttaataaa

SEQ ID NO: 220120 - DNA, 478 bp, Homo sapiens
ctctcgttctgaagcaaatgtcctgttatgtgggctttgactatgtccattcagaccatcactctcaatctgtctatcaccttggaaaatatgtatcgccagcactagagcaaccttagagaagcaagttattcaacctctctatggattcgtgttttgcagcacttgtaaaaagcgtttgtatgaatgatgtaataaaaataatttcgttaagatatggaaagtcctcggtgggctttagtacaggatcttttcacagatgtcactatgcatgttccagtctcaattattttagttacctaatgtggtcccagctgaccggagaatcacttcatttggcaacctcaggaaaataatgcctatgtgcctctggaattgattgaataactgttgttctatctgcttggttcttcaatttattcaccaaaaataaactctacattgagcatatctatattaaatgttataaaatcctgta

SEQ ID NO: 220121 - DNA, 382 bp, Homo sapiens
tccctccttcgtaaaagataaaatcccaaagctcacttgataattgagacttaaatagaatcccagacctttttatgaaaggaaaagctaatccctctaaaagggagttctcagagtatcaggaagcagttgtgacaagtttttaaacatctcaagaaacttcagaaggaggtgcacaattgggccaacatgctgagtccaacctgcacttgcgcccagcctgaatcatgcctcttataaagttgaagctaagagcatactttcgggaactgaatttgaatcctgactctttgtaaccctaggcatattatttaatctccctatgcctcagtttcctcatctgaaaaatagggatagtaatagtgcctgcctcacagattta

SEQ ID NO: 220122 - DNA, 917 bp, Homo sapiens
cctccagctgctttctccttcctcccctgacaatcagccagacagaggcaacctgacctcttcctcctccggactcctccgggcgggagattcggctccaccccttcccttcccgctgagtcacacacctcccagtcaggtgatcctcccctgggcccttccgagagcaccttgacctatattccgttctctccatgacagcagactctaagagtcccgggagagagcccgccaggccagctggcgtggtgccctggcagccccagactgcagaccaggcgccccgggcagcgggagggggtgctcccaccccagaggcctggaaatggaaagttaggaggctggtggctgtgtgcagggcgggggaggaggaggtggggagttgagtcagctgggaaagctgacagccactggcggccgcgtgcttcctcccctccctctctgggctcctcagctccctgccaggccctgaccaagcaggctgcaggggatgaagcggtgaagggcagatgccattgtggctgggtgatactgcagcccacggggagaggtgaggaattgtgcaaataatgggataaacctacatgactcacccggagaatgtgagccgaagaaaacttctcctgccacaaggaccgaattcccattcccaaattatccacaaaatggcccctacttattttgtctatgggttctttgtgcagttgctgcctgtacagtctttgtgtcctctgaatgtgaggagaatagggctgctatgggaaaggaaattaaaagagaagtgatccttgggtatcacacctgtaaaaagcgatattaactgaaaatcactgttccttttgaattagaaagcactctgaatttagactcattcgtctttttttttttttttttccaaaagacagggtcttgctctg

SEQ ID NO: 220123 - DNA, 514 bp, Homo sapiens
gaatggaatggaatggtacggaatagaatggaatgtaacgaattgtaatggaatggaattgaatggaatggaatggaatcaacgcgagtgcaggggaatgtaatggaacggaatgcaatggaatggaatcatccggaatggaatggaatggaatggaatggaatagaatggaatcaacccgagtgcaatggaatggagtggaatggaatggaatggaatggaacaacccgaatggaatggaatgtaatggagagtaagggagtagaatagaatcaatccgaatgtaatggaatggaatgcaacggaatggaatggaatggaatgcaatggaattggaatggaatggaatggaatggaatggaatggaatggaatggaatgatacggaatagaatggaatggaacgaaatggaatggaatggaatggaatggaatggaatggaatggaatggaatcgttccgagtggaataggagggaatgtattcgagtggaatggaaaggaatggaatcaacc

SEQ ID NO: 220124 - DNA, 500 bp, Homo sapiens
ataatttagaaaaaatcatggccccacattttgtcaaggattcttacaagtgatattcaaatatctaatctaaaatgattatctagaaattggcacattctaagtgtgcagatgctgatgaggagcaggtattgatagacagcgcgttatgcgtcaaaggatgtctatcctttgctaaagtgttactctgactatgctgtaaaaagcaggaggtaagagcttaagaaagaggagtaaaagagataattctcatgagataaactctaaggattgatgctgtgctccaggtctctccagtgttttagatgtttcaggatgctatttattacagaatatggtgtacttggaattttttttaacatacagtagtaatcattttcctgattaacctaatttctagacagagtttgcattcatgaatggccacagtacagatgcggacatccaaaggatggcattattactcacaagcatagtgctatgtgcagttatggcttgag

SEQ ID NO: 220125 - DNA, 463 bp, Homo sapiens
gttgacgctaatatacatttgaatataaatgtatatttatattccaaggagtttccaaggaaactcaagtgtagcttaattatactcagatttgatatagagggtcttccaccacatatatgaatattaaagccagtcagaagaaatcctggacatgaaaacattttttcaggaaataattaactatgtgctgggtattattatatgagcgtggctacaaagatgaataaaatatagtccctgcctaaataagctttgttgtagcatcttacagcacttaatatcttgtgctgtatctatttaaatgtctttttcccttcaataatagaaatcctgactcacttatttttggtgcctccaagtgcccatcacacaattcagtttacagtgtttgaacatgtgaataatgagagagagaaaaataagaaaacggtcagggaattggggcctttgaaaaaactta

SEQ ID NO: 220126 - DNA, 410 bp, Homo sapiens
  misc_feature (384)..(384): n is a, c, g, or t
  misc_feature (386)..(386): n is a, c, g, or t
caggaggatcacttcagtccaggagttcaaggctgcagtgagctatgattgtgccactgtactctagcctgggcgacagagtgagattctgactcaacaaaaatttttaaaaatacagcaaaatatggggcctgcctaggtatcaatgaaaatatttttaaatagattattcacaataaacatcacttttgcataagtgaatggagtagattaatctactgtataatcttctttctaagccttccattccttctcacctttctaatcttttcattgggaccttaaactcctgctgccaggaaatctgcctgctctgagaaggcagccttgtaaccatcactggccccctaagctggataccatgattgccatccttacctgtananaaccatgtcaaatccataccgtaa

SEQ ID NO: 220127 - DNA, 143 bp, Homo sapiens
gcactggctccccctccctctctccccatccgcggcggtggcggcgtcagcagtggtaagaacagatgagggttccagaaaaacagagcttctccacccccggcagacagggagcaaacagcttcttccgccatcatcccccg

SEQ ID NO: 220128 - DNA, 542 bp, Homo sapiens
tctggttgtttgtatgtgtctaatctcttctactgctacttctacatttatcacacatttattatgtgtcagacactgtgctaacagctttttatgcgttattatcagttgatcctcactacgcatggtaagttttactgtgttcccatttgaggggtagtgtcatacagtggttggattggcagaatttgaggccagccagcttggatttgcatcctatcttcaccacttcctaactatgacccgggacaagttatataacctctctaaagcatcagtgcttttatctataagacagggatatacatatggaaatgatgataatatctatctctgcaattgttctgagttttaagttagttaacatgataaactgcatagaacacccctgccacgtagcagacactcaataaatgttagctattatcatttacataagaggaaaccaaagcttagtaagggtgttttttctagggtatccaactgtaacttacaggatgggattccaaatcagctaccatggctgacagccacacttgtgt

SEQ ID NO: 220129 - DNA, 425 bp, Homo sapiens
tttgtgagattgatctctctcaaaatatttgttttcaatccccatattatcaaatatgcacccaaagtggaaacgaggactggaaagaataaatacatcaaaaatataaccagaccgtgcatggcaggtcatgcctgtaatcgcagcagtttgggaggacaaggctggagaattgctgcccaggagatgtgagacaacacctctaataataattattattataattaaagttaaaaaagaaacatctctcctcaaaagataagtagatagataggtatatagataggagccaggcacagtggctcacgcctgtaatagcagcagtttgggtagtcgaggcaggaggattgcttgagtgcaggagttcgagatcaggctgggcaacatggcagaacccagaaccctgtctgtacatacatacacat

SEQ ID NO: 220130 - DNA, 435 bp, Homo sapiens
ctgcacgctttgtgcatttatcccagaacttaaaatataataataataataataataataataatgataatagaatagtgctctcacttcagtaacaacaaaaaatgctggacaaactttaaattaacaacttttattaaacttatcagagaactcaggttgtagggcaaacaactatagtttactttcgaacaacatgagtgtgaggggcaccaactccccaccatgcagtaaaaaatctatgtataagttttgactctccaaaaacttaacaactaatagcctactgttgaccagaagctttacaaataacataatcgattaacaactattttgtgtattatatgtattatatactgtacccttagagaaaagaaaatgttattaagaaaatcataaggaagagaaaatacatttagaatactgtactgtatt

SEQ ID NO: 220131 - DNA, 700 bp, Homo sapiens
gcagtattaataattaactttttcttttttttgagacagtctcgttctgtcgcccagacttgagtccagcggcgtgatctcaactcactgcaacctccacctcctgggctcaagcaattctcgtgcctcaccctctcaagttgctgggattacaggtgtgtgccaccacactcagctaattaattttttgtatttttagtagagacaggttttccctatgttggccaggctggtcttgaactcctgacctcaagtgatccgcccacctccacctcccaaagtgctgggattacaggcatgagccactgcacccagtctagtaacattttttatgtgcctccactgggtgttctttctgcctgtatcttccaaaaccagattggttaaatcataaatgtaaagaatctgaaaaagtacaccaaaaaatttcaaattatgtttaatcaatgagattatcattataaattatatttaagttttttaaaataacacccttgagatctaattcacataccatacaaatcgtccatttaaagtgtacaagtcaaaggttctcagtatattcagagttgcacaattatcaccaaaatcgatctcagattactttttcatcacccccaaaaagaaacttcataccattaatagcattctcccttccctccaacctcccctcagtcccatgctaatctattttcatata

SEQ ID NO: 220132 - DNA, 469 bp, Homo sapiens
agataaggaagagatggcgtagagctgatagcctggctgtatcacaaaggggatgtcaagttaaaggaagaagctgaggcaaaattaataatcataaagttattcatgatagcaggaggcagacaaaatgcctaggctgataggggcggtccccagtgaaacaccaccttcaagccaaaaacagcctgaagtctgaaagactgaactgttggttctggatgaaacctgtgacccagagtgagaacttctgttcctatttgcccactctttcccgattggttctttctgaataacgctttttgaccagttgaatgttgccttttctgatactacctatggcctgcccctcccccatcctgtgcctataaaaaccccagactcagccacactggaggagaccaccttcccgtctcctctctgctgagagctgttttgtcgcttaataaacttctctgccctcaccacccct

SEQ ID NO: 220133 - DNA, 198 bp, Homo sapiens
tatagatagtttgagatgggtctgtaaatcaacttattccctcctcacaaagttgcctcaaaactattactaaaaaaatccttcctatttccattagtttgcttataaatccagactttttctagactgccaaattggctctgccgggccagtaacaaacatttttataattttatattacttttaaataaatgacaa

SEQ ID NO: 220134 - DNA, 155 bp, Homo sapiens
tatattatgtcacggctaaaagagaattcccctcacaaatgcagttactatttagtgggagattctgtaaaactcagcgtcaacaaagctcttccagttatgtctcctgcttctgggacggccaggacctctcctgtaccaccccttcctctccc

SEQ ID NO: 220135 - DNA, 407 bp, Homo sapiens
ctacataggaattttttaaaaaataaatgaatctaacaagacatttattttcaatattctcatgctaacttacacagtaatcatattccaatgaataacaactggttcaaatcttgcataatcatctactaattgtgtgatcttgggcaaattaattaaccctgctaaacatatggtggagtgacagagacacagacacacagagagactcagagttccaaacctgtcaggctgtaagaattcccttggggctgggcacggtggctcacgcttgtaatcccagcactttgggaggccgaggccagtgaatcatgaggtcaggagttcgagaccaacctgaccaacatggtgagacccccgtctatgttaaaagtacaaaaattagccgggcatggtggcatatgcct

SEQ ID NO: 220136 - DNA, 498 bp, Homo sapiens
tactgcactgatcacacagaactgctgtcatctgtgttggccttgctgtggtttgtgcactcagaggcccacatgaagcaggcatcagtgaatctttagcgggtgaagggtggaatacacaaatctccctgaacattgatttcctcatctgcaaaattgggataatgacaactcctacccagtcttcctcactggatatccggagcatgacttaagatgattcatgggaagcattttataggtgttaatctactcctcccacagttattccttcctcaaccccaagtgggaagccagccctggctgctgtccagggtgctgaaagggacttgtcttcacccaaaggatgaggagacaagactgagaggcccgcccgcacaagctcagctgcagccttttcttgctttccagactggcagggtcaaggatgagcagaccatccctaccttcatgagaacagaccctgggagatgtctaataaaaatacaatgtaaacga

SEQ ID NO: 220137 - DNA, 370 bp, Homo sapiens
agctttattatgggggtgaagtgtggatgggagccatgagtaattgtcagataccacactaaaatgggcagggcaacatggacggagctggaggccactatcctacgggaattaacgcaggaacagaaacccagataatgcaggttctcacttataagtgggcgctaaacactgagaacacatggacacagaagggaacgacagacactggggccgcttttagggtgacgggtgagagaagggttgaggattgaaaaactgcctattgggtattattatgctgattacctggtacaccagattcctgtgacacacaatttacccatgtaacaaatttgcatgtgtaccttttgaacctaaaatagaagtt

SEQ ID NO: 220138 - DNA, 478 bp, Homo sapiens
tattgcgttgtaggaatattttgtgcatactagatattagtatgtcatcagttacatgttttgataatgttttccttctagtctgtggcatacatattcatttatttaatagggtcttttaatgagcagaagattttaaatttcgatgtagtataatttatcatttcttctagtccttagttactgctttctgtgtcttaagacatctttgtcttccctctaaatatgtttccctcttattctcctgtttgcttttagatgctttatggtttccatttttatttttaggactacgattctttctaaattaattgtgtatatggtgtaagataggtgtcaaagttctttttttttttttccaagtggatatcaatgtgttccagcaccatttgtgggatagactttctgtttctcaagagattgcattggcacttatgtaaaaaaaaataaatcaaatgactatttaaatttaatctat

SEQ ID NO: 220139 - DNA, 434 bp, Homo sapiens
ctgcagatggacttttcctgagatttgtttagggaaacttgggtctgtcagggctcagtgggcagctgtccagaaaccttggggtgtcatgtgatgcccactgaggtttggggagaggggaatgagggtggtgacttgctttcctccctgggacttgctagcccaagcttgaaggtgccaccgtctcagggcctgggcttgcttggggatgggtggtggctccacagggtggaaatgttcattcctttctcccgagtccagcgcctcctggcctctggtgcttgcatgcggatgctcccatgctgtatcccgctccccgatactgcactccagcctgggcgacagagggtgactcctcaaaaaaaagaaaaatagctaaaatatgattgtaccactgcactccagcctgggtgacagagtgagaccctgtctct

SEQ ID NO: 220140 - DNA, 100 bp, Homo sapiens
gtatcactccagagttaagcaagtctcagatcccatgggaccattttaagggctgtgggttctatccggtaagcaacagaaaattgttgaaggattttaa

SEQ ID NO: 220141 - DNA, 251 bp, Homo sapiens
aagctgctgtttatggtttgtctgcttaaatatgtttaatattagtgaagttagcatgaagtatgatttttctgctctctaaatgtgtaactgtcatatttatgatgtataatttacagctctagattgttagttttatgttgacccagttgaaaataacacacaccaaatagattatttttaacagtgatttatagaaatcatgttgcttatatttctctgttttctaagaatataaccccttctttccc

SEQ ID NO: 220142 - DNA, 399 bp, Homo sapiens
tggaagttccccaaaattttggaaaagtctcccttaacaggaaagaatatttccctctcctgcatcaagtctgcgtggccatcctccccccaccatccaagactattaggttttgtccctgcacccttcactggcatcctcaatcattaaccttctgaaagctcacagtacacattagtatgtataactggctttaccaaattgaatgaaaaggagcttgtgcaaaaaaatttaaaaatggatgtcaagatgttatgtaaaagatgagtgtaattgtgaaatgttctatacactatcaaatatataaagctttctatattgaatgtacattatacagatcattcatatgtgtacataaaattttaaaaataaagggaattgactgctttgttaatgaga

SEQ ID NO: 220143 - DNA, 799 bp, Homo sapiens
ctattttttcatcttttaaaaagggtgattgtgacaaaacttatggatcagaatttgtctacagtgatcatgccaaagaacttattgtaggggagatttttgttagggtgtataatgaagttcctactttccaactggaggttccaaaagcatttgctgcaagtctcttggattatataggctcgcaggcccaatacttgcacacattcatggccatactgttctcgtggtagcgaataagcctcacgagatctgatgattttataaaggggagttccccggcacaagtcctcctgcctgctgtcgtgtaagatgtgtttgctcctcatttgccatccaccatgattgtgaagcctccctagccatgtgaaactgtgagtcaattaaacctctttcctttgtaaaaaaaaaaaaaaaaaaaaaaaaaaaaaaaaaaaaaaaaaaaacagaaaaaaacaaagcaaaaaaaaaaaaacacacgcacacgcaaacagaccgaaagaacacaacaacagactaccgcgcgcagagcgaagaagagagagaacactgacgagaagagacggagagaggagagaggagggggaagaaggggaggggaggagagagaggagagacaaaggcggagggaaggggaagggaagtaatgtaggatacgtagtgatggttgtgctgatgtgtagatgagaacttatagataaaaatgaaaacgatactaaatcatggatacacactactacatacagcacatatggaagaaacaaattagagtggtgatgagagggaagaaaaagaagag

SEQ ID NO: 220144 - DNA, 3577 bp, Homo sapiens
aaaacaggtctccaattttaatcttctgtgccatgagactccatcaggcagtctacaaaggaccactgggagcccacgcgtccggtaccaccctgataagaatccagaagggagggacatgtttgaaaaagtaaataaagcatatgaatttttatgtaccaaatcagcaaaaatagtggatgggccagatccagagaatataattttaattctaaaaacacagagcatcctcttcaaccgtcataaagaagatttacagccttataaatatgcaggataccccatgcttattcggactataacaatggaaacttcagatgacctccttttctcaaaagaatcaccattgttgcctgcggctacagagctagctttccatactgtcaactgttcagccctcaatgctgaagagctcagaagagagaatggactagaggtgttacaagaggcatttagtcgctgtgtggctgtcttgactcgttctagtaaaccaagtgacatgtcagtacaggtgtgtggatacataagtaaatgctacagtgtggctgctcagtttgaggaatgccgagagaagatcacggaaatgcctagcatcatcaaggatctctgtcgggtactatattttggcaagagtattccccgcgtagctgctcttggggtagaatgtgtcagttcttttgctgtggatttctggctacagacacacctatttcaggctggaattttgtggtatctccttggttttctgtttaattatgactacacactagaagagagtggcattcagaaaagtgaagaaacaaaccagcaggaggtagcaaacagccttgccaaactgagtgtccatgctctgagtcgccttggagggtatttggctgaagaacaagcaactccagaaaatccaaccataaggaaaagcttagctggcatgctgacaccctatgttgctagaaaacttgctgtggctagtgtgactgagattttgaagatgcttaacagcaacacagaaagtccatatttgatatggaacaattctacaagagcagaattacttgaatttcttgaatcccaacaagaaaacatgattaaaaaaggtgattgtgacaaaacttatggatcagaatttgtctacagtgatcatgccaaagaacttattgtaggggagatttttgttagggtgtataatgaagttcctactttccaactggaggttccaaaagcatttgctgcaagtctcttggattatataggctcgcaggcccaatacttgcacacattcatggccatcacacacgcggcaaaagtggagtcagagcaacatggagatcgcttaccgagagtagaaatggctttggaggctctgagaaatgtcataaaatacaatccaggttctgagagtgaatgcattgggcactttaagttgatattttctcttctccgagttcatggagctggtcaagtgcagcagttggctttagaggttgtgaatatagtgacatctaaccaagactgtgtcaacaatattgctgaatcaatggttttgtccagtttattggctcttctacattcattgccatcaagtcgtcagcttgttctggaaactctttatgctttgacatcgagtacaaaaataatcaaagaagcaatggcaaagggtgctttgatctatttactggatatgttctgcaattcaacacatccacaggttcgagcccaaacagcagaactttttgccaaaatgacagcagataaactgataggtccaaaggttcgaattacgttaatgaaatttctaccaagcgttttcatggatgctatgagagacaatcctgaagctgctgtacatatttttgaaggaactcatgaaaatcctgagttaatttggaatgataattccagagataaagtgtccacaacagttagggaaatgatgctagagcactttaaaaatcagcaggacaaccctgaggcaaactggaagttgcctgaagattttgctgtggtgtttggagaagcagagggtgaacttgctgttggaggagtcttcttgaggatctttattgcacaaccagcctgggttctaagaaagcctagagaatttcttattgccctgttagaaaaattaactgagctcctagagaagaacaatcctcatggagaaactctggaaaccttgacaatggcaacagtgtgtctcttcagcgcacaacctcagctggcagatcaggtcccgccattgggccatcttcccaaagttatccaggcaatgaatcataggaacaatgccattcctaagagtgccattcgggttatccatgccttgtctgaaaatgagctgtgtgttcgagccatggcatctttagagaccattggcccactgatgaatggaatgaaaaagcgagcagatactgttggtctagcctgtgaagcaattaatcgaatgtttcagaaggagcagagtgaattagtagcacaagccctgaaagcagatttggttccatacctcttaaaattactcgaaggcattggccttgaaaacctggacagcccagcagccactaaggctcagattgttaaagctctcaaggcaatgactcgaagtttgcagtatggagaacaggtgaatgaaatcctgtgccgttcttcagtctggagtgccttcaaagatcagaaacatgatttgttcatttctgagtcacaaacagcaggatacctcacaggacctggagttgctggctaccttaccgcaggtacatctacatcagtcatgtctaacctgccacctcctgtagaccatgaggcaggcgaccttggctatcagacttgaaatattcacgagagacaataaacgctgaaaggccagtgccaagtccacattcctccagctgatacgttgaagcaaactcttactgcctttctcctggtttcatgacagtgttattcctttttctataaatatatttttaggaaaaaaagtcagtgatcctaattgtatcacattataagaaagcactctgtggatcaacataagtgggtacacaagaattttttttttcttggtgtatgtaagcacatttgttcctttatatctgtttacaaaactgtgaatcaaaaagacaaaactttcttcctagtttttgtaattttttttttgaactagcatgactgtagggttgagctacagtcaacaaaaattgggctaagtcacttttccccaggaaagaatatttccctctcctgcatcaagtctgcgtggccatcctccccccaccatccaagactattaggttttgtccctgcacccttcactggcatcctcaatcattaaccttctgaaagctcacagtacacattagtatgtataactggctttaccaaattgaatgaaaaggagcttgtgcaaaaaaatttaaaaatggatgtcaagatgttatgtaaaagatgagtgtaattgtgaaatgttctatacactatcaaatatataaagctttctatattgaatgtacattatacagatcattcatatgtgtacataaaattttaaaaataaagggaattgactgctttgttaatgaga

SEQ ID NO: 220145 - DNA, 1522 bp, Homo sapiens
cggacgcgtgggtcgacccacgcgtcgaagaaagcctagagaatttcttattgccctgttagaaaaattaactgagctcctagagaagaacaatcctcatggagaaactctggaaaccttgacaatggcaacagtgtgtctcttcagcgcacaacctcagctggcagatcaggtcccgccattgggccatcttcccaaagttatccaggcaatgaatcataggaacaatgccattcctaagagtgccattcgggttatccatgccttgtctgaaaatgagctgtgtgttcgagccatggcatctttagagaccattggcccactgatgaatggaatgaaaaagcgagcagatactgttggtctagcctgtgaagcaattaatcgaatgtttcagaaggagcagagtgaattagtagcacaagccctgaaagcagatttggttccatacctcttaaaattactcgaaggcattggccttgaaaacctggacagcccagcagccactaaggctcagattgttaaagctctcaaggcaatgactcgaagtttgcagtatggagaacaggtgaatgaaatcctgtgccgttcttcagtctggagtgccttcaaagatcagaaacatgatttgttcatttctgagtcacaaacagcaggatacctcacaggacctggagttgctggctaccttaccgcaggtacatctacatcagtcatgtctaacctgccacctcctgtagaccatgaggcaggcgaccttggctatcagacttgaaatattcacgagagacaataaacgctgaaaggccagtgccaagtccacattcctccagctgatacgttgaagcaaactcttactgcctttctcctggtttcatgacagtgttattcctttttctataaatatatttttaggaaaaaaagtcagtgatcctaattgtatcacattataagaaagcactctgtggatcaacataagtgggtacacaagaattttttttttcttggtgtatgtaagcacatttgttcctttatatctgtttacaaaactgtgaatcaaaaagacaaaactttcttcctagtttttgtaattttttttttgaactagcatgactgtagggttgagctacagtcaacaaaaattgggctaagtcacttttccccaggaaagaatatttccctctcctgcatcaagtctgcgtggccatcctccccccaccatccaagactattaggttttgtccctgcacccttcactggcatcctcaatcattaaccttctgaaagctcacagtacacattagtatgtataactggctttaccaaattgaatgaaaaggagcttgtgcaaaaaaatttaaaaatggatgtcaagatgttatgtaaaagatgagtgtaattgtgaaatgttctatacactatcaaatatataaagctttctatattgaatgtacattatacagatcattcatatgtgtacataaaattttaaaaataaagggaattgactgctttgttaatgaga

SEQ ID NO: 220146 - DNA, 1586 bp, Homo sapiens
gtaattaaatgtttatgcaatgtttaaaataaactctagagggctaaagccattaatatgcccataggacacatctcgataaatgctggcatatatggcattttcatgcaatagaaactgttagaatcaagggagaaatataagactaaaatatcagtaccctttcacatagcattcttgttttaacctatgacagatggatgtccagagccttttctttttcagagtccttggtttagcaacccttgttcgtttggtgttacttgttataatagcatttctttgcaccaaatgaaaataggttagtttgagtgttgacagaagtgtttatgttgaattttgtcacatatgacttttggatgagctgagtgtagagtttcttttgtctgtctgtttccattttttccattcgacatagttcttttcagtgctcggaattttttgaaagattgaatttcccaaatgtaagaaagaaaattttatccatatttccacaccagtgttactgtccagcatacattttgaaatgatttctagtctatagtgtaggcaaacatgaaaatagtactatgtagctgtttattaaggtatagatgtaatttaggtaattgaaatagatgattagttttgtgtgatggagtgcctgagcaggttctgacatttttataaaggtcaatgttttcacttgactgctttctagaggtgtgtgtttacctttctctcttgcaggacctggagttgctggctaccttaccgcaggtacatctacatcagtcatgtctaacctgccacctcctgtagaccatgaggcaggcgaccttggctatcagacttgaaatattcacgagagacaataaacgctgaaaggccagtgccaagtccacattcctccagctgatacgttgaagcaaactcttactgcctttctcctggtttcatgacagtgttattcctttttctataaatatatttttaggaaaaaaagtcagtgatcctaattgtatcacattataagaaagcactctgtggatcaacataagtgggtacacaagaattttttttttcttggtgtatgtaagcacatttgttcctttatatctgtttacaaaactgtgaatcaaaaagacaaaactttcttcctagtttttgtaattttttttttgaactagcatgactgtagggttgagctacagtcaacaaaaattgggctaagtcacttttccccaggaaagaatatttccctctcctgcatcaagtctgcgtggccatcctccccccaccatccaagactattaggttttgtccctgcacccttcactggcatcctcaatcattaaccttctgaaagctcacagtacacattagtatgtataactggctttaccaaattgaatgaaaaggagcttgtgcaaaaaaatttaaaaatggatgtcaagatgttatgtaaaagatgagtgtaattgtgaaatgttctatacactatcaaatatataaagctttctatattgaatgtacattatacagatcattcatatgtgtacataaaattttaaaaataaagggaattgactgctttgttaatgaga

SEQ ID NO: 220147 - DNA, 4328 bp, Homo sapiens
gggctcaaggcatggatggatggcgaccacttcagtccataccccagcttaagtggtgtctcttagccagtggacaggctgtcctgaatgaaactgaccttgctacccttatattgaacatgttgatcacaatgtgtggatattttccaagcagggatcaagacaatgccatcattcggcctctacccaaagtgaaaagactgctgtcagatagcacttgccttccccatattattcagctactgctgacctttgaccctatccttgttgagaaggttgctattttgttataccatatcatgcaagataacccacagttaccccgcctttatctgagtggagtatttttctttatcatgatgtacacaggttccaatgtgcttcctgttgctcgatttttgaaatacacacataccaaacaggctttcaagtcagaagagacaaaaggacaagatatttttcagagaagtatacttgggcacattctacctgaagcaatggtttgttacttagaaaattatgaacctgaaaagttttctgagatttttctaggagaatttgatactccagaagcaatctggagcagtgaaatgaggcgcctgatgatagagaagattgctgcccatctcgcggatttcacacctcgtcttcagagtaacacaagagcactttatcagtattgccccattcctataatcaactatccacaactcgaaaatgaactattttgtaatatttattacctcaaacaactgtgtgatacactccggtttccagattggccaattaaagacccggttaagcttctaaaagatacccttgatgcctggaagaaagaagtagaaaagaagccacctatgatgtcaatagatgatgcttatgaagtgcttaatctgcctcaaggacagggaccgcatgatgagagcaagattaggaaagcttacttcagacttgcacaaaagtaccaccctgataagaatccagaagggagggacatgtttgaaaaagtaaataaagcatatgaatttttatgtaccaaatcagcaaaaatagtggatgggccagatccagagaatataattttaattctaaaaacacagagcatcctcttcaaccgtcataaagaagatttacagccttataaatatgcaggataccccatgcttattcggactataacaatggaaacttcagatgacctccttttctcaaaagaatcaccattgttgcctgcggctacagagctagctttccatactgtcaactgttcagccctcaatgctgaagagctcagaagagagaatggactagaggtgttacaagaggcatttagtcgctgtgtggctgtcttgactcgttctagtaaaccaagtgacatgtcagtacaggtgtgtggatacataagtaaatgctacagtgtggctgctcagtttgaggaatgccgagagaagatcacggaaatgcctagcatcatcaaggatctctgtcgggtactatattttggcaagagtattccccgcgtagctgctcttggggtagaatgtgtcagttcttttgctgtggatttctggctacagacacacctatttcaggctggaattttgtggtatctccttggttttctgtttaattatgactacacactagaagagagtggcattcagaaaagtgaagaaacaaaccagcaggaggtagcaaacagccttgccaaactgagtgtccatgctctgagtcgccttggagggtatttggctgaagaacaagcaactccagaaaatccaaccataaggaaaagcttagctggcatgctgacaccctatgttgctagaaaacttgctgtggctagtgtgactgagattttgaagatgcttaacagcaacacagaaagtccatatttgatatggaacaattctacaagagcagaattacttgaatttcttgaatcccaacaagaaaacatgattaaaaaaggtgattgtgacaaaacttatggatcagaatttgtctacagtgatcatgccaaagaacttattgtaggggagatttttgttagggtgtataatgaagttcctactttccaactggaggttccaaaagcatttgctgcaagtctcttggattatataggctcgcaggcccaatacttgcacacattcatggccatcacacacgcggcaaaagtggagtcagagcaacatggagatcgcttaccgagagtagaaatggctttggaggctctgagaaatgtcataaaatacaatccaggttctgagagtgaatgcattgggcactttaagttgatattttctcttctccgagttcatggagctggtcaagtgcagcagttggctttagaggttgtgaatatagtgacatctaaccaagactgtgtcaacaatattgctgaatcaatggttttgtccagtttattggctcttctacattcattgccatcaagtcgtcagcttgttctggaaactctttatgctttgacatcgagtacaaaaataatcaaagaagcaatggcaaagggtgctttgatctatttactggatatgttctgcaattcaacacatccacaggttcgagcccaaacagcagaactttttgccaaaatgacagcagataaactgataggtccaaaggttcgaattacgttaatgaaatttctaccaagcgttttcatggatgctatgagagacaatcctgaagctgctgtacatatttttgaaggaactcatgaaaatcctgagttaatttggaatgataattccagagataaagtgtccacaacagttagggaaatgatgctagagcactttaaaaatcagcaggacaaccctgaggcaaactggaagttgcctgaagattttgctgtggtgtttggagaagcagagggtgaacttgctgttggaggagtcttcttgaggatctttattgcacaaccagcctgggttctaagaaagcctagagaatttcttattgccctgttagaaaaattaactgagctcctagagaagaacaatcctcatggagaaactctggaaaccttgacaatggcaacagtgtgtctcttcagcgcacaacctcagctggcagatcaggtcccgccattgggccatcttcccaaagttatccaggcaatgaatcataggaacaatgccattcctaagagtgccattcgggttatccatgccttgtctgaaaatgagctgtgtgttcgagccatggcatctttagagaccattggcccactgatgaatggaatgaaaaagcgagcagatactgttggtctagcctgtgaagcaattaatcgaatgtttcagaaggagcagagtgaattagtagcacaagccctgaaagcagatttggttccatacctcttaaaattactcgaaggcattggccttgaaaacctggacagcccagcagccactaaggctcagattgttaaagctctcaaggcaatgactcgaagtttgcagtatggagaacaggtgaatgaaatcctgtgccgttcttcagtctggagtgccttcaaagatcagaaacatgatttgttcatttctgagtcacaaacagcaggatacctcacaggacctggagttgctggctaccttaccgcaggtacatctacatcagtcatgtctaacctgccacctcctgtagaccatgaggcaggcgaccttggctatcagacttgaaatattcacgagagacaataaacgctgaaaggccagtgccaagtccacattcctccagctgatacgttgaagcaaactcttactgcctttctcctggtttcatgacagtgttattcctttttctataaatatatttttaggaaaaaaagtcagtgatcctaattgtatcacattataagaaagcactctgtggatcaacataagtgggtacacaagaattttttttttcttggtgtatgtaagcacatttgttcctttatatctgtttacaaaactgtgaatcaaaaagacaaaactttcttcctagtttttgtaattttttttttgaactagcatgactgtagggttgagctacagtcaacaaaaattgggctaagtcacttttccccaggaaagaatatttccctctcctgcatcaagtctgcgtggccatcctccccccaccatccaagactattagggttgggccggtacctcacggggtctcatcattaccctgaagtccgcacgtacgtgattacgggttcccatgctgagggtgttccactaacgggcgcgaatgtgcgggggccgttacgcacctcatcggggcgccactcttccagaggggtggggcggcgtcag

SEQ ID NO: 220148 - DNA, 2603 bp, Homo sapiens
gggctcaaggcatggatggatggcgaccacttcagtccataccccagcttaagtggtgtctcttagccagtggacaggctgtcctgaatgaaactgaccttgctacccttatattgaacatgttgatcacaatgtgtggatattttccaagcagggatcaagacaatgccatcattcggcctctacccaaagtgaaaagactgctgtcagatagcacttgccttccccatattattcagctactgctgacctttgaccctatccttgttgagaaggttgctattttgttataccatatcatgcaagataacccacagttaccccgcctttatctgagtggagtatttttctttatcatgatgtacacaggttccaatgtgcttcctgttgctcgatttttgaaatacacacataccaaacaggctttcaagtcagaagagacaaaaggacaagatatttttcagagaagtatacttgggcacattctacctgaagcaatggtttgttacttagaaaattatgaacctgaaaagttttctgagatttttctaggagaatttgatactccagaagcaatctggagcagtgaaatgaggcgcctgatgatagagaagattgctgcccatctcgcggatttcacacctcgtcttcagagtaacacaagagcactttatcagtattgccccattcctataatcaactatccacaactcgaaaatgaactattttgtaatatttattacctcaaacaactgtgtgatacactccggtttccagattggccaattaaagacccggttaagcttctaaaagatacccttgatgcctggaagaaagaagtagaaaagaagccacctatgatgtcaatagatgatgcttatgaagtgcttaatctgcctcaaggacagggaccgcatgatgagagcaagattaggaaagcttacttcagacttgcacaaaagtaccaccctgataagaatccagaagggagggacatgtttgaaaaagtaaataaagcatatgaatttttatgtaccaaatcagcaaaaatagtggatgggccagatccagagaatataattttaattctaaaaacacagagcatcctcttcaaccgtcataaagaagatttacagccttataaatatgcaggataccccatgcttattcggactataacaatggaaacttcagatgacctccttttctcaaaagaatcaccattgttgcctgcggctacagagctagctttccatactgtcaactgttcagccctcaatgctgaagagctcagaagagagaatggactagaggtgttacaagaggcatttagtcgctgtgtggctgtcttgactcgttctagtaaaccaagtgacatgtcagtacaggtgtgtggatacataagtaaatgctacagtgtggctgctcagtttgaggaatgccgagagaagatcacggaaatgcctagcatcatcaaggatctctgtcgggtactatattttggcaagagtattccccgcgtagctgctcttggggtagaatgtgtcagttcttttgctgtggatttctggctacagacacacctatttcaggctggaattttgtggtatctccttggttttctgtttaattatgactacacactagaagagagtggcattcagaaaagtgaagaaacaaaccagcaggaggtagcaaacagccttgccaaactgagtgtccatgctctgagtcgccttggagggtatttggctgaagaacaagcaactccagaaaatccaaccataaggaaaagcttagctggcatgctgacaccctatgttgctagaaaacttgctgtggctagtgtgactgagattttgaagatgcttaacagcaacacagaaagtccatatttgatatggaacaattctacaagagcagaattacttgaatttcttgaatcccaacaagaaaacatgattaaaaaaggtgattgtgacaaaacttatggatcagaatttgtctacagtgatcatgccaaagaacttattgtaggggagatttttgttagggtgtataatgaagttcctactttccaactggaggttccaaaagcatttgctgcaagtctcttggattatataggctcgcaggcccaatacttgcacacattcatggccatcacacacgcggcaaaagtggagtcagagcaacatggagatcgcttaccgagagtagaaatggctttggaggctctgagaaatgtcataaaatacaatccaggttctgagagtgaatgcattgggcactttaagttgatattttctcttctccgagttcatggagctggtcaagtgcagcagttggctttagaggttgtgaatatagtgacatctaaccaagactgtgtcaacaatattgctgaatcaatggttttgtccagtttattggctcttctacattcattgccatcaagtatgtatacagatggaattttggaaaccacagcaagattagcccatggaaaggagttgttgcatagttgatacaaaacctcaaacaaatgtcatctatgtttagttttaaagtgttatttacactagatttgtcttcctaataat

SEQ ID NO: 220149 - DNA, 1084 bp, Homo sapiens
gggctcaaggcatggatggatggcgaccacttcagtccataccccagcttaagtggtgtctcttagccagtggacaggctgtcctgaatgaaactgaccttgctacccttatattgaacatgttgatcacaatgtgtggatattttccaagcagggatcaagacaatgccatcattcggcctctacccaaagtgaaaagactgctgtcagatagcacttgccttccccatattattcagctactgctgacctttgaccctatccttgttgagaaggttgctattttgttataccatatcatgcaagataacccacagttaccccgcctttatctgagtggagtatttttctttatcatgatgtacacaggttccaatgtgcttcctgttgctcgatttttgaaatacacacataccaaacaggctttcaagtcagaagagacaaaaggacaagatatttttcagagaagtatacttgggcacattctacctgaagcaatggtttgttacttagaaaattatgaacctgaaaagttttctgagatttttctaggagaatttgatactccagaagcaatctggagcagtgaaatgaggcgcctgatgatagagaagattgctgcccatctcgcggatttcacacctcgtcttcagagtaacacaagagcactttatcagtattgccccattcctataatcaactatccacaactcgaaaatgaactattttgtaatatttattacctcaaacaactgtgtgatacactccggtttccagattggccaattaaagacccggttaagcttctaaaagatacccttgatgcctggaagaaagaagtagaaaagaagccacctatgatgtcaatagatgatgcttatgaagtgcttaatctgcctcaaggacagggaccgcatgatgagagcaagattaggaaagcttacttcagacttgcacaaaagtaccaccctgataagaatccagaagggagggacatgtttgaaaaagtaaataaagcatatgaatttttatgtaccaaatcagcaaaaatagtggatgggcccaactttgggtaccgagctcg

SEQ ID NO: 220150 - DNA, 345 bp, Homo sapiens
ggcccatgggttgtagtagctgtggtttgccaactaccccagcatttataggaaatcttaatgagaaagactagtgatctagtaaagacattctgtttaattttggaacattgtatataccattaagcattattcacaaatttctgctggtttgatttctatgtgttaaataaggaatgcctatgtgactctactggtttttttgctctgttgtgttgtctgcaggtgtgtggatacataagtaaatgctacagtgtggctgctcagtttgaggaatgccgagagaagatcacggaaatgcctagcatcatcaaggatctctgtcgggtactatattttggcaag
